United States Patent Application Publication US 2011/0014706 A2 - sequence listing, part 9

SEQ ID NO: 16582 - DNA, 2454 bp, Arabidopsis thaliana landsberg
aaacacatctgataagcggtttagacatggagaagcctctaaaaatacacccccgtcattcaatggaccaagtgcaaagaaatcagtgccagttagttctgtttttaatagggttcgaagtgatattacaaatcaaagagttcatacaccaagcattatgcaaacgcctggcacattgcagacttgtttcacatcaaaaacaagttaagtttacagatccatctatattatatatttaagctttatatgttgtcttttttaacataactacatttaacaagatttatttatgaaatgttaacaatgcagcaggaatcgatctttcaagtcctattcaatcatatcgaaggcatttaacatatgatgataatctacattcagatgcaaatgattctcagtatccatttggtaagtcatgggttacaaacttgaaacatctcatgtcgtttaatactatctaacgttttgttatattcaggaaatcatataccaaattccaacctaagttctccatgcacaacaactaattttgaagaaggagagacatcaaacccgtctaaggataaaagattgtttagaaactttaccaatgacattcctctttagataaatgacgtcacacattgtggacgaggagactgaaccgatgatcccattcttcttgaatttctgcaatcaggaaatcaaatgaatttaggagaatgtgacagtaatggaaaaacagatggtaaatattaagcataactataatgatttccttattcttcactgttaaaataaactatagtattggatgtataatgaacttttcttatttttaggttcagagtatgatatatatgatgatcttgaaaatggttttcaagatgaagttgattatgattcatataccaactacaaacaaaaggtgtcaaggttactgaactggttaaaaacaaaattataagtttttggatgatcttaagaagagtttgcttgccacttttggcctgagatgtcctacctctaatgaaaatatagagaaacattcttacggtgtgttatattcaataaactttgtaaatgaattataataaacttttttaaatgttcaatcaatggtgatcctataataaacagttttgagcgtcaatttaatatgcattcaagaaaaaacaaaacatgtatgattatatattagtactctgtgtatcctctatatttaacattttatgatttcaaatgcagtatacattgatcatggtgatcctatttacgcatgtgaatattgtggagctataatgtggtatggtgagcgtattgaaaagacagtcaagaataagaagtccaagtttacatcatgttgtttgcaaggtcaagtgaagttaccttttcttaaaaattcaccagaattactttatgcattgccaaccaatgacgatgaaatcagtagacattttagagaaaatatcagggcttacaatatgatattttattttacatcacttggtggtgatacagaaaatagtgttagagccagtggtggtcctcaaatgttccagattcacggagagaattaccataggatagggagtttgaaaccagacaatgatatacctccaaagttcatgcagttatatattgtagacacagagaatgaagttgataacagatcggaagcactcaggtgagtccattccttatagtgttactaatgtttttgtatatgacattgatgttgttttaatattggttactgttctaaatttgacttatttgattcttaacagtaatggtgttaatgctgacaagtataaaaagaaagagttgagaaaggaaattattgatgttgtgatcaaattgctaaatagtatcaacccttatgtatgacacttacggattgctagtgactttgcatatgagaatagttagtaaacgggaaaaggatggcagtgtgtataatgtaccaaaggcatcagaggtagccatgttgattccaggagatttcactatagatatgccaagcagagatataatagtgctagagaaatcagggaaactacaaagaattagtgaaattcttccatgttatcttcctttacaatattctcttttgttcccttatggtgaagatggattcagtacagacattgagaaacatcaaacagggtctggtaaaaaaacgaagaacaagtgcatatctataaggcaatgatttgccttcaaaattcacgaaagaaaacatgagaagcatattttacttaggtcgagaaggctatggcagtaattcttggtggattcttatacagcaatagaatctaaccggtttagttacatcaaacttaaccatagtagtttgagggcagataattacaattctttgcaaaaggcttcagaggaaggaaatagtgatttgaaagatcaaggattagcatgttatttgccagctacttttacaggtggtcctagatatag

SEQ ID NO: 16583 - DNA, 554 bp, Arabidopsis thaliana landsberg
  unsure (1)..(554): unsure at all n locations
tttccatgaaaatacagccaacatgaccatacttctattgctgngttanattcagaagagcccaacagaagctcaggtgcacggtaccatctngcgacaacatactcagtcattaaattactctcaggagttgcacgagcgagcccgaaatcacaaatctttaagtcacattgtgtactcaagaggagattgcttggttttagatctctgtgtagcacattggctgaatgaatgtactttaatccgcgcaggatttggtacatgaaatactgccaaaaatttgaagattgtgtcaagctcactaatcaaaatgatttttaagtttcaagaaacaataactctaaacacaaaccatgccatgatctttggttagttcttgatctgattttaaggttcgataaaggtcaaactccatcaattcattcacaatgtaaacatttttgaatgaatctctcttgggaggcaagattacgtctttgattgcaacaatctatagaaaaatgatattacattgttagcttttaatgattacaaattaaagaaaaaggtgagac

SEQ ID NO: 16584 - DNA, 1226 bp, Arabidopsis thaliana landsberg
  unsure (1)..(1226): unsure at all n locations
aacggaaagaccgattaaatcaagatttgacagacgaaatctgcgggttttaacagatcaatttaacttacctgttctccgtaataatttggatcaaaggttttggtgtcgtttatctttttcttcaagccttgtgcaaaatttgtagacaacatatcagaaataaccttagaaacatcgacaaaatccggatccccaaggttcattctaactgcgaaagtgtgtttcagagcctcaacaagtcgatgaaccccgagagagcccgaaacacctgatggaatcccatattgagaaagaatgttcaaaacctgcaacacaagaaactcccttacaaaaaaactcaagtaaacctaggtttcataaaagttgatatcttcacgtaagaaaaccaaacttacaagcatcattgcagcaccaccggatgaaggagaaggcatacctagtaggcggtatccgagaatgtctactgacaacggttttctaaccttaactctataactttgcagatctttcaaagtcattatccctccggatttaacgatatctctcacaagattaaccccaacagtgccattgtaaaacgcttttggaccatactctgcaatttgcctcagcgttaaggccaattttggattacggcaatgcctggtctctttagctctccatgtgaaactaatagctcagagaggcctttgtcttctaaaatactaactctggtcttgttcatctgcatatacaaatacttggaaatcctgaatccttgagctgcaagcttctctgcaggatacactaaatgcttccatggtagctttccatgctgtttccaagccatgaatagacccgctacctccccagggacgcctactgataagggtcctttattcttgttcttaacattaccatcatacatattctacaacaaaaaaatatgtcagtgattcataaactaagaaaagcgctataagctcaagatcaggccatatcaaatcagaggaaagaaatgtttgtctacgccataagcgtcattcacgtactgtagatgttagtaacagagaattcaattccctaaagcctaattgttcacaacacgttagctagccgcttgaactaaaagaaaatctgaccaaaccctaccannnnnnnnnnnnnnnnnnnnagataagccatgagttcctaaatcaatgccatattctttctttgcgatgtctcggacttcagcttgcttt

SEQ ID NO: 16585 - DNA, 3910 bp, Arabidopsis thaliana landsberg
gtccgtttccataagccaagtcagcagctgttttccccaaggatgttctggagatgggtccgctattgctccagcatcagcacccagtgagacaagtacagcgacagtatcctccctgaagttcagcagtacaaacagatttagtaatatatggaaaatactaaccaactgtcagagtttaaaacaaatcggttaaaagaacatataagaggaatgaataagagagtgctacaggtcactcatatcattagaagtttttatgaataagaaatgataaccctgaggtccttgcctgccactgaatgcagcccagtgaagagcagaccacccatttgcatcgcggaagttgatgctaactcctgctgctaaaattggctttatcgcccaatcataccccagcgctgcggctaggtgtagaacaccctgtccatcttcatctaatatatttggacccttgccctcttcagtcaccttatggatgagccacagatataatttatcttcaaactcttccctaatcaatcgctcttttgcttccagctctgttagatctttctcaattgttccggggagaggaggctctttttcatcctttagcaacatgattttgctgatttttcttcgtttttccccaacattttcaaatatatggtgttcctgaacagaacatctgagagccagcaagttttcaaaccgcaaatggagtgatgtttcaattgtattggcaccataaatgtcagtagcatttaactttctggtagacccaggaaggaaatcgaattctcgtacttcactgcaagaaaatctgtcagaacatgttatatagaacgggactcgaccgacttcatgtggcggagcatgacaacaaagaacaccatctactaaaatatcagccggaacctccacttctccaaacatgcatgaccagctatagctagttacttcctgaggactcaacagaaatgtcccgataaccattacctgttcgaaaattaaaatggtagatgagaaaggagttatctcctaacaaacttccaaagccaaagagctcaaaaataggaagaaacagagcagaacagcagaaagaaagtactgttcctaaacgtatacaggcttactacttgcagaaagattgattatcaaaggtgttatacgaaaaaaaaatcttcatttaagtttggcaaattggattagccaaagaccatcttaactgaatgctacaccacaaaaccattttttcaaaaataacactaaaaattacctcaacttctgagtctgtctgagtccatttgggccaaaagtcgatcatagtgaagcgctgatcctcggacagagaaggacttaaggaagacccagctgctgcgttttcacattcaacagaagtccatgcaatacctccagatgaagattgcatctgcaagtcttccatctccccaagttctttactaacccaccgagagaaactgtcaacctttttcaaactatcctctttttttaacaatgcttttctaagaggtagtgtttgatttgcacttgcttcatatataagatcctcggggcctaatttaggtatatatgctgcttcattatttgtgaaaggagcttggaaactactagactgttgatcttgactaccaagaagactggaaaatgtcccaaaattttcatgtgctccttgcccaaataaggcaagatcagtagcatcagtcattccagaatgcgaatccatgggccatttttgcaatggcacgctttcctgaacaggagtctatagagaaaagaaactcaaaatcagatattttcaaagaaccaacattcatgatgagaaaattcatgcttgaatgattaagtaaacaaattaaacagtggcaccataatacaaacataggcacaaatcctacttagatttaaaatgaatagcttagctataagcaagcatatatcacctgccaatttacttgactttgaagaggatttctaagatgctctgacgttaacagggaacctttctctgttttcccttccatggggatcaaaccaaaagtagaaggctgtgtctgagtcaacggagcattataaggtagattctggtatcttgccaatgaattctcaaaggaagcatcccatgctgggacatcacctgatctttgggagttacttcctttgaccctgttcccatgagctgacgtccaaccatctcgatttcctaggaagagaagacaatctcagcaaacatgcaggaatttggtaaggcaaggaagcttgtaaaacagaaagcaaatgaagtacccaaaacagaggttgtattgtaagaattgattgtgctagcattctgatgatgcataatctgaggaacaacagtttgaggttcaggattttgttgcaaactggaacttgcttgacgactatcccctgcgtcaaaatgatattagtttgtgttgaagcagaaccacgagcagcaatacaatcaaccacaaagtctcatcactgaaagagctacactcttaaacaaaaagatactaaagcagattatataagagagaaattatataccagaatcagcatcttcacataatggtgacaatatgctggatcgggttgctgtggaatcaacatttacagaacccgtgccactcagagaatttgaatggttttctttagttccactggtactcattcggttaccctgtataatagcatgacgtacaatataagatgactataacaaaaccacacataggaaagacagcatccacttaaaaaggaagatatagtgttgagcgatggaagttcatattttaagaatatattagtacagtacaaaacaaaagctataccttaacctccaagtagtgaacgaaaacaatgtgcatcagatccctgtatccatgtaacacacaaacagtggacatgagcactaacactgaaaagtgacaataaatgaagaaaagtaccaacaagcacatttcattccagaagatagggattttagagatcacgtgaaatgcctttggttcagtcttgtcttgtataaacattatcctcgatttcatctcacaacttagaaattgatgttttatagcagaatctcggaaattataataatattcctttctatagcccttctagctcattttctgctaatacaataaaaaggccattcccaggacactagcagactaccatgcacactttatacaaagcacataaatgctgaaaaactaacgcttatgatactaaacagagcaaaacatatgaaatgtggacaaacatagatagactcactgttcaagcatccagtagcaccgcctctggaagttctcattatcttctccatgagcatagtaacaatgtaacacatcaatgcttcctacctgtgtatacttacacaatcttattactctctaacattgagatgttgcattatcagctagaaaaatcagtagtaaaaccaaggaattggtttcaaggtcattgcattaatctgcactaatatttaacgaggacacataaatagaaatattaaccttcagcttttcgtgagcctctttcactgttttcccatctttcttcttcctccaattgtgcccgtcttttcggaaatatctgagcaccttcctatcgaagagaaagagtgaaccacctagaagagcagggaatttctgttaattagagaagacaaaccgcaataaattattgtcaaggcacacaacacgcaaaacttctgaactattcaggactaacaggataaacgggggagtgaacacgtcaagcataaagttcgttaaagcaagacagaaataaaacccaagctaatgtaacttattcagcatctattgattgtacagctcaaaaaataagaatatattgcacacaaaaatgaagaaagtcagcaagaaacatactgggt

SEQ ID NO: 16586 - DNA, 2429 bp, Arabidopsis thaliana landsberg
  unsure (1)..(2429): unsure at all n locations
cgacgtagatgatgttgaggctgctgcctccgtccatgaggaccttggtgagcctgacgttgccgatgacagggtcgacaacgagcgggtatttccccgggctcggcacgcggtcaggatggtcgccctggtcgaaggtgatgggcttgtcggaccagtctaggtagactggcgccgccacctttaccgagcagacctcccgacgctcttgcttgcggtgccgagccgaggcgttcgccactcgcccaccatagatcatgtagcagtcgtggacctcggggaactctcctgccttgtgatcttccttcttatcgttgttgcgagccctgtcaccctccgcgagtggcccgaccttgtgaaagtggcgccgaagcatggcgcactcctcaagggtgtgcttgacgggcccctgatgataagggcacgactccttgagcatcttgttgaccaggttggcgcctcatggaggcttccgagggttcctgtgctcggcggcggcgacaaggtccgcgtctgcgacgtcgcgtttcgcttgcgacttcttcttgcccttcttcctcgcgccgcgctgagcgaacgcctcggggacatctttcggctggcgcccctgaagctgcttgtccttccggaagatagcctcgaccgcctcctgaccagaggcgaacttggtggccatgtccatcagctcgctcgccctggtgggggtcttgcgacccagcttgctcaccaggtcgcggcaggtggtgccagcgaggaacgcgccgatgacatccgagtcggtgatgttgggcagctcggtgcgctgctccgagaatcgccggatatagtcccggagagactctcctggctgctgtctgcagcttcggaggtcccaggaattcccggggcgcacgtacgtgccctggaaattgccggcgaaagcttggaccaggtcgtcccagttggagatctgccccggaggcaggtgctccaaccaggctcgagcggtgtcggagaggaacagggggaggttgcggatgatgaggttgtcatcgtccgttccacccagttggcaggccagccgatagtccgcgagccacagttccggtctcgtttcccccgagtactttgtgatagtagtcggggttcggaaccgggtcgggaacggcgcccgtcgtatggctcggctgaaggcctgaggaccgggtggctcgggcgagggactccgatcctccccgctgtcatagagtcccccatgcctggggtggtagcctcggcgcaccctctcgtcgaggtgggcccgacggtcgcggtgatggtgctcgttgccgaggcaactcggggccgcaggcgctatgttgcgcatgcgcccggtgtggaccgaggcttcccgcatgaatcgggaagtcgcggtgcgaagctccaaggggtacccctgccttcgggaggcagagctttcggcccatcggaccgcggcatcctccaggagattcttgagttctccctggatacgccgtccctcggtggtggatggttccggcatcgcgtggagtagtattgctgctgcagccaggttctggccgaccccactagaagccggtggcggccttgccctggcattatcggcaatgcggtgctggatgccctggggtagatgacgtgcttctccggtcggagcttggcctgcccattcctgcccgatgttctgccggagcnnnnnnnnnnnnnnnnnnnnnnnnnnnagcctggcctgcatctcgcggatttgctcgagctgtgtgtcctgaccccccgcaggacttgggaccacagctagctcccgaaggatgtcaacgagaggcgcagcctatgagggatcgccgtcctccggcataccaaggtggttgccttcgtcgagaccccctagatcgacgtggaaacattcgcgacttgggccacagtcctcgtcgccgaggctgcggctaccgtcggaacagtcggaaaggcagtagtcgcatgcggtcatgaagtcccgcatggcactgggttaccaagtccggagaaatcccaacaaaagtcgggcttgtcatcttcctcggaacccgagggccctgtaggtcgagacgctgtcagccggtcccagggtgaccgcataccgtaccctggagggtttggactcgcctctgtgaaagcgtccaccgaagcgaagtcgcttggtgggtcgaggctgaatccaaaaggcacgagatgggaatcggtcggtacctcttggtcgacgggcggtgacgaagtcacgtcaggggcagactgcaccattgtctccggtacgagggtgacgcccagcaagtcctttgcgagcgtgttggcgtcgtccgtccgcttggagttggcgtgttgcggggaaacgacgctcgtcttcgtctcaaacgcgaagtcgatgcccgaggggatcctctagagtcgacctgcaa

SEQ ID NO: 16587 - DNA, 2481 bp, Arabidopsis thaliana landsberg
taccttgtcctgctctttagtttctcctttggttgtggctaggtttgtaacatatatagtgattcaaacaaagcatttctttggcattttacttctctaattcagtctggtctccactagattttgttgtcctctagcatctcaaaggataaattacaataagcctagacttgatacacacattaaacaccactcaatatgtacatacattacatactacaaaataaccttatggtctctgcaaattcctgaaaatttgtctctcatttttatttcacattcaacatatatacgaatacaattaaagtaaaaaatacaacctcaaacacttaacgaataaaccaagttttccaacgggattaaaataaaataacactttacactttcaatgattatcaatcacaagtaacgaccaaaccatggcatcaacctcttagctgtcgaggcggtcacttgcttagagtaccgatccaagccggcggctgcatcccagtctgctcgtaaactgtatcgagaaccggaggcagcatcttgtaaagtccagctatatccttcataccactcccactagcaccaccaatcccctgttctccaccatggttccaaacgctaatcttgggctgcaagtctctgaccgcaagcgcgttagtcttagcaatctcctgataagtgccattgttaatcatcaaaaagtctctaagacaagaatagtcattctgaacagcgtctaggagggttctgagataagttccttgagcactggctaaagcaacaagtccctctgcttctttctgctttgagtagaacgtagcgtctgcttcagctttctgtgcctcggcttgcttttgcttctcatatagaactgcctccgcttgcttctgcttgttgtacaattcccaatttgcttcttgaaccttggtttcatactcaacactggctttgctaaggaactcggctttgagcttctctgttcgagtcaaagcgttcattttctcgacctgagtctgaagctcagcttctctcaaagccactgctttggttgcttcaacctcagccacctgagcatccttagtccaagcagcttttttcatcgcaagctcggcattggccttagctacatcagcctccttctgattctcaaacactttaacctcagtcctcactttgatctcttcttttgttccttctccttgtctctgcatcgatatgatctttgactccgcgtcaattttggctgcgttctggagggtaagaccagtccgttccttggcaccgatctctcccttcatcttggcctcagagacatctatcctcgcctgatttgctgctttcatttgagtcttctgacccaagtaagagaagtattcatgtccaggcacatcaacaagctgcttcacattggcattgtatatccaagaccaaactggtttattctagttgaaccttatcaaacacctccttcttaaactcctgtgtcccttcaaatacataaaatcaaaaactcttttaacctaaactttcacaaaatatgtcttagttataaccaatcaaactgacatttatttaaagagacttagccaaatcattatacaaaaccctagtcttactacaactttatgtcaccaatcaaatccgaaaaatatctacataaattaaatctaccttaacatcctcatattcaccaataaacttaacatctaaaaccctaaatttgggggttacctttaaagatctcttccatagtcatggaagcagcaagaacacgagtctctccttcaataacaccttcaacaagctcatggacatgatttgaatctttatcatgaggagaaatcaacctagcatacaaaatcagcgcgtcatcgtcatcaacgcgaggaccaatcgtaaaaacggcaggaagaacaaaaggaagcttctctgcgctcatagcttggaccttgaaagtatagttcaccggagaaacgtcgaagacggtgcaagattgccatggaaacacccatgacttcttggaaagcttgatgtcttcgataccagcaccggtgatcgccaaatactgtgacgctcttgcaactttgaacatcttttgatttaatttggacttttcgcccaaatgatttagaagactttgttttgagttcttaatgacttattttatatatatagtcgtgcgttatgtacgaagacttagtcttacagaaaaaatcaacgcatttccaagaaactacatatttgaagccatcgcctattggcggcgaggtactttaggtttattttgaagttaaatatggagtcttttaattactccgttttaatgattttagtttctctatttggtttttggtttaagtggctaaattggtaagttttgcaatttacaatcatattatatttagcaaattattttgatttgttttgttatgatcttcctttattttctctccacgcggtttatgaatttaattttgttgactttttttc

SEQ ID NO: 16588 - DNA, 2223 bp, Arabidopsis thaliana landsberg
atcccatcaataacgtttttagaatggtagccgggaaacgattttataggtgagggcacagagcaagacgaagttgcgcagaagtgagacatctgatggacgagattgtgaccagcgctggcgcgggaatgcagctgactatttaccaatcatgcgttggttcactaattatgagaaacgcgtcaagaacttagcggttcggatcgataagtttttgcagagtcttgtggatgagaaacgtgcggataaagaaatgggtaccactatgatagatcacttgctttctctccaagaaactcagcctgattactatacagatgtcactcttaaaggaattataattgtaagtattaaggaatccatatagatagtctatatgtaagaacaataatcaaactttatgttggcgaattattgattttgattttgaatttacaggtaatgataattgctggatctgaaacaatagcatggactttagaatgggcgatgctgaatgtgttgaacgaccagaagtattagagaaagcgaggaccgaaatcgatacgaaaatcggttttgaccggttaatagatgaagcggatactaaaaatctgccttatctccaatggattgtgttggagaccttacgtctttaccctgtagctccaacaaatattccacacatgacgtcagatgattgcatattggcaggatacgacgttccacgtgggtcgatgttattggtgaacgtatggtccatgcatagagacccgtctatatgggaagccccagaaatgttcaagccagagaggttcaaaaatgaaaagcttaatcagaagttgttgtcgtttgggtttggacgacgagcttgtcccggggttggcctagctcatcggttaatgagcttggctcttggatcgatggttcagtgtttcgaatggcagagaattggtgaagaatatgtagacactagagaagaacctatggccatgatgcgtcctgtgacaccgttgctagccatgtgtaaagctcgtcccattgtccataagtttctcgatgcttttgcttgaagtgtaactcttctttccttgacttgggaataaaatatgtagtaaaaaaacttatcatgtcaaaaaatctaatagaatatagactgaccgtttactaggtcagtgttggagagccaaaggtaaaaagattagagagtgattgtttctcacgggacaaaagacgatgacttcaaaagtcaactccagtcttctttctttttgttccaccaataatttcaattctctatttctccttcaatctcatcttcttcctcaatccagtcttcacatagaccacacatgttttttcatccattaacctcaaagacttgactttctctctttctccttctctgcatcaaagctatggagaatttctgttttcaagactctgtttctctatttatcacgatcatggttcttgttcttctcccccgtctcagtctttctgatacttcgacgtacacccgtcctgagaatttttacgtcaactgtggatcggattctaatgtattttatggtggccagaccttcgtcggagataccaactcgagtactaactcagtttccttcaccaacaaaggaactgaagtcatcaacgaccaatcgtccgttgcgcctgaaatataccggacggttaggatatttagacacccttcttcttacaagttcaaacttgattctctgggtctgcactttgtgcgtctccatttctctgttgtgttttctcgggcagatcttttaactgctcggttcactgtctctgctacctctggttctaatcatcacttgaaaagtttctcgcctcagaatctcactaataccccacgagttgaagagtttctcctgatgatgaactcgctggagttcgaaattcgatttgtgcccgatcattcctctttagctctcatcaatgccatcgaagtgttctctgctcctgatgacctcgaaatcccatcaggttccgataagaatctgcatacgatttacagattaaacgtaggaggcgagaaaatcacaccggataatgataccttgggacgaacttggctgcctgacgatgatgactttctctaccgaaaagattcaacgaggaacattaattcaacacaaacgcctaactacgtgggagggttaagttcagccacggactccactgctcctgatttcgtctacaagacagctaaagcat

SEQ ID NO: 16589 - DNA, 672 bp, Arabidopsis thaliana landsberg
  unsure (1)..(672): unsure at all n locations
aaaacgcacagaaatggccgtagttttaccaagtgttctatggttatggatttgggatctcctctgactttcattttccatagatcttcccttgttgttgaaccagcttcttcgattagatacttctctgcttcggagagacatggaaccctaacggagtggataagcgtaaggtccaagtcaaggacaaggtgaagcttcttcatgttgagacaagagaatttcgttatgagacgcttcgttaacgctaaagcctcgctgcttagatgtaaaccgtcgaatactcggccttcgatagttttgtccaccgttgatttgcatacgatgcagaatccgtaacgaatgtaccagtgtccacagttattaggagacaacaatggaaatgagggttccatgatctccggttctttcttctgccttttggattctcgttccggagaaagatttttggctacaaacatgatttctctgatctatgaaatgaaccgtttaggatgagaatcttnnnnnnnnnnnnnnnnnnnnnnnnnnnnnnnnnnnnacacacacatatacacaaaaacgtaatttgatcagaaacctggtcagaggagagagtgaataagaactcgagatctcacctttttgatataactcaagatctcacttttctcgtatttaattactaggtta

SEQ ID NO: 16590 - DNA, 3296 bp, Arabidopsis thaliana landsberg
atatgtgtttgagaacacagtatcggactgacccgttatgagaactctacaagattgttatatgagtgtcattagagtttctcatcacaacgatagagtatagtcctttgacctgagttcgtcatgatttcttattcatggattagttcgctttgattctgtcaaacgttagccgtaaaaggtgattataaagacagtgattgggcacgttatgaattgtttaaggaacagggatggaaaaagatgggatttttccctcccatataacgggagataaatatatttgggcctatcgaagatttgatactgagaaatgcgtggccgcgctcaaacgaggtgaatgtcagtcgtttgttttatcagtagaaatcagagttcgataaacatggtctagctgaataaggatgacaatttcttgccttatgctgagatcgagatatagagacaaagggattatgggaatagatgattccagtacaagtgggagattgttgggaatgtcctgaaatcagttgtactttactctagttaaagttgtaatgtcgaggtttgatatttgtataatattaggtggttataatgttttgctaaagaccccttataatctatgagttataactcattactaatattatacaaacctacagggtcacacacctaagcaaactggatcaataaaaagagttattgggctatggtccattattaaccctaattggttagggttaaacatttggctatatatatgatatattagcaacttttgtgagatacacttttgatcacaaaaccctaaaaatagagagacaaatagtttgtctgagttttgagattagatctcaaaggaactagcattccagatctgatgcagtttgtgtgcgtgtggataccggtagaggcacaacacttggggtgctaaaacaaccgtgaaacaatatgattcatctttccgctgcagaatatccaggtatattcaaaccctttgatctagatttaattctttgtttacacagttcctggcaattgaatttgtgattggttttataaatcgatataaacatggtacaaattccttcatccaaacccaaggtcagatgaagcagacaagaccgctattcctaaaaataatgtatgtacctattttaaacatagaaaaacgtataaaactgttgttgacaatcatatttgttaacaggatgaatcagacaatgttgctgctgtcgaagcaaaagaagaaaaaaaagcatccccaaaggtcccaaaaaaagtgaagaagcaacttgtctatgaacaggatgatgcccatcctgatggttttaaggcaaaaacagttttggtgcccgatgtaccaactcaacagacagaggttgttctcagggctggaaatgtctcatacaaccccctggacatggttgacccttcaaaagtagaggaattcagcaatatcattaaaggaccctctgtgtaagtacattatattaaaatggattatttaatatctcaatcatcatttttgcaagtcttaagcttgttatcaaatatttttctggatttacaggattcacactcttttcgggtttcgcaaagtgcccaacaatttttttgcgaagcttctaacacctagtgaatggatcgaaagttcggtacgttgcatttatatacgtacactctttgttataaattgtacatagatgattaaatttttggtggaagtgtacgtacactgatatattttttgaacatttcagcatttagaaatgatggcaatgttgatgtggcacaagaacgagaacagatgatagcaaacagatgtattgtattggacatgatgctgacgcatctacttaccaagcgggtgggcgactttaagaagtgtattaataagaacgggttcaaatggggtaaatttctgtccgacattgctaatggagcacacataaaccgtgaacccaatatgaagtggctgaaggatgtcgatgttgtgtatgctctgatgaactggaagagtaaacattgggttgctttgggaatcaaccttaatgaacggctaataactgtgtatgacgctttaatattgcacacgcgggagtcggctgtgaaggcgagaatgactcctatttgcgaaatgatgtcgtacttagtcagagcgatgtgccaggatgtattgatttctccgtactcagttgaaccttttgagtatgtgcgctgtcctaccgttgctcaaaacccaactacaggagattgcgggccatacacgatgaagttcctggagttgcttgcgtttggacactctttttcggatttgacaaccattcgagaagcagatatggtcttctaccgtcaaaaatactcggttgacatctacgagcacggcaagcgggaggccggtactgtgcacttactgtgaacaatattctggttctttgcaaccaattattatgaacaaacctatcttatatatatgattgcaactacatttaatttggagattgtcagaagttaatttattgtcctctatcatattgtcgtacacgtcgttcacttataattacataatgtaaatgtgtacgtacatatctatatgtctcgtacactgcatattaactttataacataactcaagtgataaattgatttgacagccaacgcttaccaacacaactatgacattcatttcaaccgtaattgccccaaccaaattcacagtagtggttattaaagtgaagaaattactgacgatctctgactatctcatttcaaacatggttaacccgactcttcccgacgatttactctcgaagatagctaagaacctggctgaccaatgctggtccgaccttggtccattggtacgatcaggcactcgtggaagagacattgtctaccgtccggatgtcctcaaagatgccaatattctcaccttgtgtaactcgcccgatgacttccaagctggagggggccacaatccctccggatccgctgatgaaggccgacatcgaccatttttcttacggtgttttgcagctaataatcccacgaccgtgtattacgaaggtattcgtgttctaacgcatgaacgaaacatcaatggagccatcaagctcttacaccgtcatgctccagtacgagcaaatgcaacacttgcatgcgccattgtattcatatgtgctgggtatgattaaatgggcggcttgtttctacagctcttcacccgcaaccattatccattggactcggttgccactcgagttttgggtgatgagttcatcgaggaaataaagaagtctgaccctcca

SEQ ID NO: 16591 - DNA, 720 bp, Arabidopsis thaliana landsberg
cttcttgtgttatagttttaaaaatgccttgtaaaatcattattaagtcagtgattgtgcttattacaggttgagactacttcaaatccttttgtttctcattctgtccctaatgctcgggtactaatcgttttaaaaatccttgtaaaatcattattaacgttgttaaaccccttttaaaaatccttgtaaaatcattattaagtcagtgattgagtttattacaggctgagacgacttcaaatccttttgcttctcattctgcatctactacccaggtaataatccttttaaaaaatcttgtaaaatcattattaacgtttttaaaccccttttaaaaatccttgtaaaatcattatttaagatagattgatgtttgaggtaagctttttattttggcagccgaggttaacctctaggattattgaggcgtgtgtatctgaaacatctagtattcttgatcaacagtattccagttctgcgttttcaactggtctaagtgatgctgattctttgtttattggaaaatttttcaaagacaaagatgaaatggtattcacgttgcggatgtttgcagtgaagcacagctttgagtttcatacagtgaaatcagatctcatgaggtatgttcttcattgtattgatgaaaactgtagttagagactacgtgcaactaaggctggtggatccgagagttatgttattcggaagtatgttagt

SEQ ID NO: 16592 - DNA, 2472 bp, Arabidopsis thaliana landsberg
tttatattcagtgagcaagaacacccacacaaagagagacaaagagaagaagaatcaattagagcagaagacgagaatagggaagaacacgaataggaagagaaagagtcgaggaagagaaagagtcgagaaagaacaaagagtaggaatagttttttcagtacttaggattattttgaggctaatttttttgtttcagcgggcaacaaaattaatccgcgctattacattaggtagcgtttaattaatggtaatgctatagaacaataaccctaaatccaaaaacatggcccgcgtcattttttatttctcgggtacgagattatagcattttgaaattaccaaacgctataaaagtttagccgggtgataaattatagcagaacatggttaactgctatattatagtgctataaatactccatattcttgtagtgttttatttacttagtctttctcttttctttttcttgtgtgtttcatgtgtttgtctaatcgcagaagcgaaaacaaccaaagaacatgaacgagagtaagattgttggattcatggctaagcttgacgcagtccacaatctatttgtggaagatgtcaattatgttggtggaagaggttatcagaatcagagactacaacaccaacgaggctatagaggtgtctatgggaatggtcaacctaactacactcacaagtctcagttccagcaaccttttcagtatagcagtagtttcagcttcacaagaaactacgatcttgcttcttaccaagcccccccctccacccgcacaaagaagcaagatagaatcattgcccgaacagatttcagagctaaattatcgacatgttaagggaagacaagttgtagcacgagtgtcgaccaacacaccacgagtgtcgatcgacacccatcactggttcagagagaatcatttaatataggtacttttcaaggtcgaatcacttctataagtctaggaactactgtcatgtgacccactatacctctactccttcatccacctcctaaacgaccaaggtactcatctcctcctctttaacctccatatgtcatcaataagagtttaaaattttcaaaaactgttttacagttatgcaagctacgagtttttcgtcgagtgcttgtcgttcttttgatgattgtgcaggaaaaaggagtgttcctcccatacctgagtcccaccctgctgatgctcctctcgtcctagatagacctaatgcgctaacagcttatacaccaacatggatgatgagaggtctttctccacggtatttacttccaccttttgaaccacctgattctagaaatcctttaaagtcaagctaatgactgaaactaagcgtttagtgggaggcaacccactggtatgattttttatttatttttcttttatttttcgttttttcttttatttatttcgtttactccgaagttgaatgctactggggacagtgacgtttaagtttgggggatgcgcttactaactacgtttttctttacgagtcttcttcttattctgcttttcttttcgagttgttatattgagtcaaaattttgtttggaattctgatctctattctttagtttattgcctggttgattaatgctgcaggttcgactcaatccgactaatggaaatctagatggcaaaccaacagaccaatgtgataaaaagaatatgttactctccccttataaaaagaaaaatataatgagatattgagacgattttcagatagtgtataggggtaggaaagtttcctatgaccccattattatacattatttgaaatgatctattacaaaggttggaaaaataccgaggatgtcgatccagtatgcgagttcccctttgtttactctctaaaaaggataagtctgggggagagaaagaacaccaaagaaaaagaaaaatggtcgatttatcatggtatagtacaggaatgagtctagaaggatcttgaatgttagcgtgtttgatgagacccaacgatgaaagcaaggtggatatagatgtggaacttaggtatggaatctagaatgttgtgtaagcttccagagaagtacatgttggttaggatttgattagaactgcaaggcatatggatttggttagaatgatgatggcaatagactagagaaacttgggagttcctgtgttttcaaacctcttccacgggttcggcttttgtgttttgtttgagggcaaacaaaagctaagtctggggtagttgatataaccctatttttactgcttttagctatgatttaggtatatgttttagagtccttttgttatttctagagttttttctagtctttttcaggtctttacatgtttgggatttatttggagataattgagcattctggaggaaaacagacaacttaagctgaaaagagaatccggagacgaaaatgcacataggtgtcgaaagacaccaccccgggt

SEQ ID NO: 16593 - DNA, 1487 bp, Arabidopsis thaliana landsberg
aatgcatttcagaataaaacattaaggaggaaaaaagactctcgtcattacaaggtctcgagctgcggcgcgtgagcttggtgagcctgagaatagaattacctcccatcaagcggaggaagtcaaaaggttcaaccatatttgagcccggcacatccaaagaaaatagtagcaaggagcctattgacctgacaaaagacgcagttccagaaacggttatagagaccgagccacttatcgaggaggatatacttgagccaaacgagcatcccaaaccggaaccaagaatattccacgaggttgaccaaattcgtgctaaagattgggggactgattggagggagacaataaaacattacattgtgacaggcgagctcccaaaaaataagtggcaggccaggaaaatgagaatcgttagcggaaaattttgtttgtcaaaggacgcattatataagcgaggtgtcagcgacccttacctactttgcatttttgggcccaaagtcgagatcgttatgagcgaagtgcacgaaggtttgtgtagcagtcattctttaggaagggctatggctttcaagatgaagaggatggaatactactggcctactatgatcacggactgcgttaagtatgcccatcgatgcaaacgttgccaactccatgtgcctctcatccatcaaccttcggagttattctcttcgatctcttcccccatacccgttcatgcggtggtcgatggatattattggaccattgcacaggttaacccgaggtgtacaatatctcttggtcctaattgattacttttcaaagtggattgaagccgaagcatatgtaaacatcaaagattcggcggtaaaaaccttcatttggaagaatatcatatgtaggcaccatacgagatagttacggacaacggaccacaattcatctcacacgagttcgaagctttctactctgattgggggacaaagttagttattctactccgcgatatccacaagggaacggtcaagctgaaggtagcgaacaagacaattctaagcaatcttaataaacgtttaagtcatttgaaaggaggatggtatgatgaacttcaaccggttctatggcatatcgcacgactcctaggcgctcgactggagaaacccgttctcattggtgtatggaatggaggcagttgctccagccgagctcaatgtgccaggactttgtcgaacagaagcccctttaaacgaggaagagaattccgtgatgctagacaattcgctagataccatcaacgagaggcaagatcaggccttgatccaaattcaaaattatcaacaagttgcagctcgatattacaattcgaaaatcaaaagcagaccattctttgtgggtgattatgttttaaaacgtgtgttcgataacaagaaggaggaaggagcaggcaagcttggcattaattgggaaagtccctacattgttaccgaggtggtctggaatga

SEQ ID NO: 16594 - DNA, 1224 bp, Arabidopsis thaliana landsberg
gatcgtcaacaggcccaacttcaccctgtctccatcaatcctggcgatatacctgacctcgcccgaagtatctcaaatagatttataaaaatgatatggacaaaaggcgggcgggagaaggctggagacgaagctcgaagtcatcttgaaccagtaaaaaatcctactttgtacttaccttctccttcatacttgatttttactctggatacctggattcatgtaggatgacgaagctgaaggtgattaaagaatatgtcgccgaagcggaagcctgaagaagattagtagtagtaggctagaaaatttgtaacaacttgttgtaaatacaattaaaccgttctcaaggaactttgtacataccttgtaatatatccttacccttttattaagacgctttgatgtggacgaaatcaatattttgagccgaaggcgaaaaacaccttcccttcttttcgtgcacaacgaagcattaaagactgcttcttctttctgcggaagctttgcttttttgtacaaaacataaaagactacttcttctttctgccgaagcttttcttttttgtaactccagaacataaaagaatacttctcctttttgccgaagcaatcacttagtagtacatatgcctggatgaatgtttatgaatgcaaatgctatgatgtaatgtgatgtgcaaatgaatgtccaaacatatattccgaagccatactcatagccattattttcttaaaaacaatcacacatcagctctgcattcccttaggaacgactttggagcttcttcgcctttacttttggcggaatcagcgttgacttttcgctgtaagctctgcatccccttaggaacgactttggagcttcttcacctttacttaggtggtattttgagctttgcacccccgtatgaatgacttttaagcttcggaacttactctgcgctcccttatgaacgactttggagcttcagaacttactctgcgctcccttaggaacgactttggagcttcggaacttggttttttcacactcgatggtgtaaccacaggtttattacatcgagctaaaggttaaaccttcctatattatcttttgtgaaggaaatataaaagcaaaaagagtagaaataaaacaaattggggctttcttttggccaaaacattgtgttatcttcagtaaataccctgcctcgggcacagtactgttaactgtgcgaaaaacaa

SEQ ID NO: 16595 - DNA, 419 bp, Arabidopsis thaliana landsberg
atatttggttccatcaatattataaattcactaatttatatatatatatatatatataatgaaatatgaatattgtattcaatttgtattaattctttgtagaatttaattctaatatttttactaaatcgaaaattttagttttggtttttaaacttgacaattattttataattgtaattggtttcaaaaatattattgattataagaaaagaaaaaaataccttttttgattgaatattataaaaaattacataatttgtaaaatttctttataaattaatatctcttcaaattaataaattttatcaattttaaaattattaatttatagagattttaccttatatgcatttttaactaaaagtcataatgttatatattttatttatatttagagaataatatatttattaaaa

SEQ ID NO: 16596 - DNA, 994 bp, Arabidopsis thaliana landsberg
tggagatgcttcatcaacaggtgcagaggaagaaggaaaagatcgccaggctagctgaactgcaaaggcagatagacaaagcctctgaagaagttcgtcatcttactcaggatgagcaacaccgaatgcctcagcatcaagaccttcatcaggagggtttcctcaacgaagatgactggtatgacaatttacatcatgggaattttgtttttgatgatgcttctcctctgtcccctgagctgcaggctacaccttggcctccgtcctacaagccgcctcagcttcccatattcgatggccactcagacccgaagcagtttttgatgagctacgaagcaacaatatcttcgtatggtggcaatactgccgttatggccaaatcttttgttatggctgtcaggagtgttgctcagacctggtattcctcccttcgaccaggaacgatcacttcatggcagaagctgaaggacttgttgttaaccagcttccaagggtttcagacgaagccggtcactgctcaagctctattccaatgcacccaggatcacgaagaataccttcaggcgtacgtccggaggttcttgcgtttaagggcacaggcaccaacagtgccaaacgaaattgtcattgaggccatgatcaaggggcttcggccaggaccttcagctcagtactttgctaggaagcctcctcaaactttggagaagctgctccagaagatggacgagtatattcgggccgataatgattttcgtcaaagaagggaggaggctttcaggttttctgagatgaccaggggcttcggaaaaagattctatccgaggcacgttaggtcaatccataactctgctcaaaatgatgataaggggagccagcagcaaaggccacagtgctcctcacaagcttcggggcaacagcaaggctccttccgaccaccagctccaagaggcagaggcgccaggggcttcggcggaagatttggagatcaatcaag

SEQ ID NO: 16597 - DNA, 2612 bp, Arabidopsis thaliana landsberg
  unsure (1)..(2612): unsure at all n locations
actctctctgtctccatctattgtttcctttaactgccaacaaaaatgctcgggcgacacggggggcttctggctgtcttgccacgtttctaccatgtaagacaaacctaaatagttcatttgaatccgtaaggacatatctctataaacgattcacctcagattatattggatctgtctacagttattcttttgaacatttttgaaacttttgtaacttccaacaatgcaggtccatatagccggaggagaacggttaactaacggcggtttttcaccggagataaatccgttcacacccaaagcgtctttagtacgttactggaacaaacagatccatcaccaatcacccggctcagcctttctcctctccaaggcttcaccacttaccgccgtcgcctccgccaccttcgccaaactcgcctccgaaaacgctcttccggatcgcctccccgacttctgctccgccgcaaacctcttctgttttccagatttaggtccaaccctcgagaaacacagcaacgacgttaaattctctgtttacgaccaacgaaacttcaccaactacggcacgattcaccccggcggtgctgactcgttcaagaaatattcacaaaacggtaacgcagtaaccgactctttccggcgatacagccgagacgccgccggtcacgaagataaattcacaggctacgctgataacagcaacgtcgtcgaggaaaaattcaattcttacggcacatcagccaccggcgcntccggcgattttaaaaactatcaatccggtgttacaatccgacgactcgtttcaaggcgtattccgacgaaggaaatggccgtgctcagacgtttaaaacctatactcacgaagccaactccggaccgggtcaatctttcaccagttacggcaaaaacggtaacggagctccaaacgagttctcttcttacggtgtctcctctaacgtaatcggatctgatttctcaaactacggtgaaaacggtaacgcagccaacgacactttcaaaggctacggtggtgacggcaatgttcctcagaataacttcaaaagctacggtgcctccgggaacgctgccgttgacacgttcttgaattatagagacaatgctaacgttggtgatgattcgttctcgtcgtatgccaagaactcaaacttcgagaaggttgatttcgtaaattacggcaaatctattaacccgggttcagagtcgtttagtggttatggtaaaggagctgagggaaacaaaattgatttcaaaacgtatactcagaactctacgttcaaggactacgcgaaaaccggagtcgaatttgcgaaatataaccggagtagtctcggtggtggcaaaacggtaaataagtgggtggagcctggcaagttctttagagagtcgatgcttaaagaaggtacattgatttggatgcctgacattaaggataaaatgccgaaaaggtcgtttttacctcgtagcattgtctcgaaactaccgttttctacatcgaaaatcgcggaaatcaagcgtgttttccaccccgttgagaattcgtcgatggaaggtataatcaccgacgcagtgccggagtgcgagaggccaccgagcgtcggagagacgagccggtgcgtaggatcaccggagaatatgatcgatttcgcgacgtcggtgttaggtcgtagcgtggtgcttagaacaacggagaacgtagccgggtcaaaggaaaaggtagtgatcgggaaagtcaacggaatcaacggtgggaaattaacgaaagctgtgtcgtgtcatcagagtttgtacccgtatctattgtattactgccactccgtaccaaaggttcgggtatacgaagctgatcttctagagttgaatagtaagaagaagattaaccacgggattgccatctgtcacatggacacgtcatcatggggtccgagtcatggagctttcttagctctcgggtcaaaaccgggtcggatcgaagtttgtcactggatatttgagaacgacatgaactgggctatcgctgattagaccggtggttatggacttatcaaatagtatgattattactatcttatcgccgagttttaattacatagaggaatgttaattttctattatcattactataatattttgaagttttttcagtaacatgtaaagaatgcttgttactgatttgtggtggtgcaaaataatttttatgaagattttagtgaatgtctgttgagcgttgacgcaatttatgatatctggttggattggtcgatatttatattttatctataaagtgaatgggattatgaaattgaaatggatatatttgtttatataatataaggtgaaaaaaacatataaaagaagatggggatagtgatggtgttttcaattacatgtgctgagttatgtccacagaccacaagatgttgtaggcgtgtagaaagatgaggtggattttatgtgccactcaattngttttatgaacattgtaagatattttatgtgaaanaaaaaagagatattgagagtcacgagttgtggctatatcaatgggacanatgcgtaatgaggttaacacacttggcgttgtggct

SEQ ID NO: 16598 - DNA, 3115 bp, Arabidopsis thaliana landsberg
acgtgttaacagaatcgataacaggcgttagcatacgttatttaatccgttaattacactaaacgacgctgttttgtgtaaaacacaaaccacaaaatttccaatacgatttctcagtccctaaaatcccaaatccgaaaatcttcaaatacatcacttggatttctaaactcatatccagattttatacatcaatgttttgattaccaacacgtacataatactaaacgcagattcagattcttcctaggtcaagttcaagcatttcgtataaaaacaaaagtaacgaagcataagcataaaattgagactaaataaaaagctgcaataataatccaaaactgacttgccgttgttctaaacaaaacataagaagaagaagaatcttttttttttttttgtcaagagaacaagaagaatctaaaatcccaaaaggcaaaagaaacaaacacgccatcatttccaaattcttcaattccatgaatctcaacttcaccatcttgaatctcctgttgaatatttttaggatttttcccatccacagtacaactaacagacacacaagttcccagaatctctctcatagttccactcaattcctaagcgatagatctaggtctcatgatcctagcaatctcagtcacatcatcaaacgaaatattcccattatgcttaatgttcttcaccttcttcatatctctctccggctctttcaacgccttgatgacgagtgcagcagctgatggaaccaccgtcactttcgcctgacgattccgcactgtgagcttgacggatacacgtaatgctttccattccttagcggttcctttcgcgatatcttctccgatcttctttggtgcgagacctagcggaccgattttgggagctagagaactcgctgctccgacttctcccccggttactcggacgtacacgtcaacgatctgactcggatccaactttggcggcattgtggatgtctcggattttcaaggtttctacgatcgaagttccgaaacgaggaggcgcttgaagaagagctccaaggtttttgaaggagtgtgaaaattagggtttacgaaagagacatttacggatctacccttatgggcttctatcatctatgggctttgtaacccaatctgtacaaattagactactcggttctgttcggtttactttaatattctccggtttagttgaaccgtttcctgaaaatgaatcgtcgtcttctttggggcaagctccttgatgttgttgagtctaatcagaggaggaagaatggcgggaggatctgagaggaagacgatactggtgggtttggttctagctcttgttcttggtatcggtgtttacttaaggctttggactatcgattatactctatcttccgatgacacagagcgcttaaggtttgaataatacttcatttgattccgtttaatcattgtaatttctgggttttcttctaatgatttgctcaaagtattgatttttctgtaataacatgatgaagggtcttctcaatttcagtagttttggattttcaacttttttgtgaattgactttttgtatttcagctgcattttatgtaattagaggtttatggttagtgttgtagtggtggttaattggattaatcaagtaagtgtttatggtttgagattttacattggtgtaggagacagtttgatttggcaaatagagaggcaatggatgaatctgcagattggcggagaatgtttgataaggaagctgagaaagcttctaaatgtaacacagaactttcactggtatttactaagcctaattgctttagttgctttagagattattttcaatgtacttgtcttcacactgagcaagactgtcactagttgctctgtagttgattggtcttgacggtatcctcaaaatgtacagccgtgtctgctctacttagattgttttcgtggtttgttcattcaatggttttggtaaatggtttaaagtgtatcttattggctttcatggctattatatggtagtaggttttatgacatgaaaaagttggtaccaaaggtttagttgactcgttcatttcatctgttttagttgattatgggcattgtcttgttctggtacagatcaaagagtcatctgggaatggaaacacctttacctccaatcaaaagctagagtcattaaaaaaggtgacattcccactcaagattttcaaatttcttttggtgttggcttatgttggatgatcatggctcattagttcactatctcttgggtagcaaaatgcggcattgctcattcacatagagacattcatgcaagagcttaaagcttcacggttaaagtgccactcgcggcaggcaccccgtaagaatactgttcttgatatgttgacatgttgtcagttatagatttagtcctccgctggtaagaaatcccggaatgtcatatacatcatataggctctttcatggaaattaactttttaacagcaccaaccacagagtcttgtatttttttgaattcagttctcaggccctctcactgcattcatttagtttatttctgagtattagatggtgatttgttatctccaaatatagtctttgatccttatgtttataaatacgttctgaatcatatttctgccagttgcataacagatgaaagctaaaacctttcataatagtttcatgaatttgtcaaactccattccatcacatcaatttcattttgagcactgattgatttcgtcacatatctaactttcctgttggttactcatcgtcggactcctgacttgcctcaagattccacatcaatcactattttgttgatataaacttgatgactcagaatcgagcttgttttcttgtactatgattttccaatataatatctgtctcaaaacatttgctaatcaagcgatacattatactccaccctttatttacattatactagaaagatggatttctctgaactcaacttgtgtgctatatatttagtgggtggctaaggaccagaagctgagaataaaggaaggagacaccgcaaaccagctgatgaaggccattgctgggcagtctaaaccttgtgcagtgattcacg

SEQ ID NO: 16599 - DNA, 3907 bp, Arabidopsis thaliana landsberg
ctgtccttaagtttgttgattggctttctggattttccattagtaggattgatttaaatctgcagtacttaagcaatccaggcaataaactcgagagatagatcataatttcagacaaaagttttgactcaataaaacgactatctaagttaaaatgacacaactgactcataggaaaagaaaagatgaagttagtaactgaatcccccagacttagataacactgtccccatagttagtaaactagaggaatcgaaagagaaataatcaaaagttaaaagttagaaaacgtgagttgccacctgagagtggtgtcgatcgataccatgttggtgtcgatcgataccatgttggtgtcgatcgacactctggtcgtttcgcttacctttgtgaattctgctcattgttgtagacccttggttagtgttttcacatggatcctccagttagactgttaaatcactaaaacacacatcaatagttccaacaaagcataggaaaataagtgtaacaagtttcaaaacaaataaccaatagtctgaaataaagcaaaaacaaagtcagaaaacaaagcaagatagggaggatggctagtcctcatgctctgagccagaggtgggtgcgggagagcgacgacgacgacgagtgggagcaacacaaccgcagcgagaaagtgtagctatggcattctagacgctcttgaaactgcccacgacgtactgttgaaagacatgtggctccatcgggatgggtggaggagaaggcagctgatatggaagagcagacgaggaagatccaactctcggacccccaccagggtcaatgaactcgtcctcggtctgtgtaggcgcagatcttgaagcagaacctctctgtcgcctggtgcgtggtgcgacatgcagaagggagggatcgggatgaaagcctatctcctcatgctctcctgtaatctttgtatgtgcagggcgaggtaactgaatcatgtgctgccatgtatcatctttgaagcaccacagtaagttgcctttaagccagtgagagttcttcaggtaagtctcatccatagtgacacgcgtggtgttgacttcttcgccctcaaagctgatgcgaaaatgctcgaatatgggagtgagaagactgccaactctctcagatttctgtcctctacctgtaaagagcttggtcttgagtgacaccaagtgatgagcgaacacagcaccaaagttgacattacggtcaacctgctcaaatccaaggttttctggaaagaagtcatgaagagcgtgatagagcaagaacaactcagaaagtctcatcttgccaggctcaatcttgcacaacagtgtgctactaatcaacctaaccaaatattgcagaacaaggtgacggatctctgagtgtacttcgtccttggaatcatagattccattaccaaacctgctccagaaaatctgagaatccttaaactgaccaggcagggaaactctagtgagatcattgtcaaaccccatagatgtcacacaaatctctcagtggtagactgtatctgacaccgcaaacgaagaagataagagctccttcctgagcgttgtgtttcctgtcattcacataagaaaccctaacagaagccatgaattgtcaaaccagctcaggatacaaatcgtactgcctacaatagatgattcccaaacctatgtcatctagcagtcctaaaacagatttctctatctgcaaacgctgcatcaaaccgaaattcgcaaaccgagtaggcaaaatttctacactcatctaggcattatagaacagagtatcataatcatcctaatctggagaaaaatggcgattgatatagccacctttagtgaattccctgttgacatctttctcccaaaccctttgagaaggaattctctcttttggaagctttggccatggaaatcgataaacaggaggttgaggagctgcaacttgggatatcggttgggatgggcggagacgacagcagtggataagcgcaggcgtggtgaggggcgacggaggaggaggatggaggaaagctcttccttgccttctttttctgcccagtcatcttgcagattgatagaattgatacttggggaagatagaggatggaattttgatgagtttagagcctgaaatcacaagaaacggtgaagaatcgaagattctagagagaaaatggtgaattcggtggtttggaagaaagtgaaatgaagaagatgaaatttttaggttaagtcgacttacctggaaaatgagggtgtcgatcgacaccatagcgtttggtcgacgcgtccttttttttctaaatctaaatcaaaaatcctatacaatcaaaaatcctatacaatcaaaaatcctaagtttaaaatcaaatgaatgaaataataaaaaagagaaatacttaccagtgggttgcctcccactaagcgcttgtttacagtcaatagcttgactctacaattgctcagtcaacaggtgggtcttgaagatccaaaggcttttctactggaatctcggcttcagcctagtagtgtttgactctttgtccattcacggcaaatggttttccattgttgtttttaagaatgactgttccatatggtctaaccgagtggactgtgtagggacctgaccaacgagaagacaattttccaggaaatattgtcaatctagaatcataatgaaatacctggtcattaggcacaaaggtccgagtaaggattttcatgtcgtggtaagcttttgtgcgttccttgtagtgcttcgaattgtcataggcatgaattcgtatctcatcaagctcattcaactgaataagtctcctttctccagcttatttgatatcgaaattcatcatcttgactgtccaagctactttgtgctctaattccactagaagatgacaagctttaccatatagaagatgaaaaggtgtgatcccaagcggagttttgaaagctgtcctgtaaacccacaatgcatcatctaacttgtaagaccactcctttttcgctttacccactgttttctcaagaatctctttgatttgtgtgttggaaacttcaacttgaccgctcgtttgtggatggtaaggagtagcaactcgatgttgaactccatactgtaaaagcaattttgcaagaatcttgttattgaaatgcttacctccatcactaatgactatgcatggcactccaaaatgagggaagatgatagagttgaagagtttcatgacaaccgctgaattgttcttcagactagctataacttctacccatttggggacataatccacagctactaggatgtagagattcttgttggaaggtgggaagggtcccatgaaatctataccccaacaatcgaagacttcgacttcgaggataaatttctgaggcatctcattacgcttgctgatctttccccttctctgacacgggtcacattgcgatatgaacttctgagtatcccaaaagattgtaggccaccaaaagtctgcttgaagaattttggatactgttttgaaagttgcaaaatgaccaccatagctagagctgtgccaatgcgatagtatatcaggaacctctgttgcagcaatgcatctcctgtaaattctatcaaaacgatgcttatagagataaggctcatcccaatgatatcgcctaatctctcttaggaatcttttcttgttgtaatttgtgaaactatcaggctccacatctgcagctaggtaattaacaatgtcagcataccatggataatctttctcgaccgatgtgacggcgcgattgtcaggtggtccccaatttctaatccacccagccgggtgtcgatcaacaggtgcaaggaaatcgattgacaccatcgcgcacctaccaatatc

SEQ ID NO: 16600 - DNA, 1799 bp, Arabidopsis thaliana landsberg
  unsure (1)..(1799): unsure at all n locations
actccatgagaaatatgggtcgaggcatggattcaccgaatttctttgatttgagcatgatcttagataatgagatgattcccagagcaagatagtttgtgttgcaagtaaccaaagtgaaattactctaacgttattgtggctttgacatgtcgtgtcctctgtttgtattttgagtgccggtattttgattttaaaaaccttaatgtaaaaactaaactaattactgtgggaaaaaaaaaaaattgtctaccaatcttctgtctgaaagtcagagagaggttgtcttcaccaatcaaaagtcaacggctattgactgtttcaaggagttcctttgtgcgtcatggtgttattagtgttgagtctggttgctgttaactccgatatctttgttgcgtgatagatacattctttggaagttatactaaaagcaagttgcatattttctgactaggaaactaaaaactagactgatatacacagttttcatgatagtgatgttggaacattatctcccttttcttcttcttattcctctcgtggtgaagttgcaatagaaaacaccttttggtcattatccaccttgtttaagcctaagggctaattgttataaaccttgtttatttcctgctgacctactttgctttgtaatatctagtcagcatatatagatcattgtgtgcctaaataatgctgaatattgttgtggtttctcactttttattcatatgatttgaaacaaagtcaggtctactacatatataagtcaacgaccattagaatgtcaactctttctgaacatttcttcatgcatcattgtggtagtctggtggctattaaaccaatatcttttttgtgtacttgacaagttcttttgaagtaaattgcatattgtctgaccaagaaactatactgatgttcaatgccacaaatgaccccagtcaagttcataatagtgatgttggaacattgttatcctcttatccttcttcttcttcccatggtgaagttgtaaaagccatgacttgaaaaagtctttgcttttagtctccagtctgttctttgcttatctatccctctgttatctttctgagctttagcaacgatttttgtcattggtgggtaagaagaaaatatggagaggtctcttgagctcnnnnnnnnnnnnnnnnnnnnnnnnnnnnnnnnnnatatttctcaagctcaaagccaacaaggtaacataatccatgcctaaactgacacatatatatgtgtattcttcatcttcttgttcttattaatcgtattttcaacattcatgtttttttttccatgtctcgtaacagggttcatcagtttggattgtggtctacccgcgaatgaaccatctccttatacagagccgaggactggattgcagttttcttcggacgcagcattcatccagagtggaaaaattggtaggattcaagcaaatctggagcctgacttcctgaagccatcaacgacgatgagatattttccagagggaaaacgaaactgctacaatctaaatgtcaccagcgacaccaactatctgatcaaggccacattcgtatatggaaattacgatggtcttaatgttgggccaaacttcgacctttacttcggtccgaatttgtggactacggtgagtagtaatgatactataaaggagatcattcatgtgaccaaatccaattctttacaggtatgtcttattaagactggaataagtataccttttataaatgttttggagctacgaccgatgaagaaaaacatgtacgttactcaag

SEQ ID NO: 16601 - DNA, 4119 bp, Arabidopsis thaliana landsberg
ttgacaaaccctccatgaggattatacatcatctctataataaagcttcatgttgatgttaaaaataaataaattatgatattatagatagatatctattttacatgattatgtgttttaaatatttatattaaatcagctatttgtttttttcaaataaaccaacgaataattaaattaatgatcattattataataattgagttatccaaacaaaaacaataataaagaaataatgttgtgagcattaagaaacaactataagagtataaataataattatataaactacttattgatttagtttattttacatgattatgtgttttaaatatttatattaaatcagctatttggttttttcaaataaaccaacgaataattaaattaagggagatttgcaaaactgcccttattctaataactttttgtaaaaatgccctttcacgaagaccatttttaaaactaccccttctaatatggcaaatgactgtcttaccctctgaatgattaggtttcacattcgtttcacaaacttcttcgttttggcacaaacttcttcgttttcctctccgattttcctctccgatttcactcaaaatcgccggcgaatttcctctccgatttcactcaaaatcgccggcgaatttcctctccgatttcactcaaaatcgccgacgattttcctctccgatttcactcaaaatcgccggcgaatttcctctccgatttcactcaaaatcgccgacgtattttctttctgagaaaccccaaaatcaccgacgaatttcctctccgataaacctgttcttcgctgaaggattcagatcatatctctacgacgcaaacaatccccagagatatcgatagatccgacggtaaccgtttttataatcgattttatagtcaattttatagtcaattttatagtagatctgacgctgtttcataacatgtttcgcagatggattcagagagtgaaatccttacattgcctgaacagatctacaaagaaggtaacgaatctattgcaatgggtacggttcagcaacattccgattggattttagttaataaagtagaggaagcgttaggcgatagtttatttgacaagattagaagttctttttttggtcctctagttgaattgggaccaagaatgaaggcaaagaggggtgtaaaattttcagggaaatttttccactacctcatgcagaagagagtgatgactaaaggatcaactctttggtttagagttgattctcaaccaatccgtttctccttgagagagttcttccttacgacagataataaagttttacaatcatttttaaagcttaattaactgtcgtagaatgatttacaaggcatttgcataactgtttgcgtagtttacaatcgtttttaaaacataagtaagtatcatagataatttacaagagattttaaaagcttttaaaaggggtttacttcattaacaatcgtttaagaagcataagttagtggcagataatgatttaaaagggattttaaaaagggtatgcatggtctacaaccgtttttagggataagtaactagcatagaataatttacaagggattttaaaagcttaaagaagtgttaaacacgtttacaagggatttcaaaagcataagtaagtgtcttaaaacgatttacaagggattttagaagtgtttgcatagtttacaatcgattttaaaacataagtaagtggcatagaatatttacaagggattttaaaaccttttctaagggttaaacatgattagcaatcgttttttaagcataagtaagttgaatagaatgatttacaagagattttaaaagcttttagaagggttaaacatgatttacaatcgtttttaaagcataagtaagtgtcatataatgatttacaagggattttaaaagtgtctgcatggtttacaatcgtttttaaaaccataagttagtggcattgaatgatttataagggattttaaaagcttttaaaagcttttaaaagtgttaaacatgatttacaatcgtttttaaagtatttactataaaacctgtaataatagtctctacactgtcttttgttcatacaggaattcaatgtgaacctgttcatagggaacttcgacgaaaggggaaagatcctgtaaaagaaccatacttttgggctagtaaaggatcctatactcttggtgatctcgaagatcgattgtttttaaaacctaaggaaggtgaacctgctgttgaagatgaagaaaagttgtgtcttgttgcagtagtgttgactgaaggaattcttttgacaccatatggaaaagagaagatacctttgccaagattgcagcatgcttctgattttgagatgtacacagcccaaccgtgggggtaaagaagcattcagtgttctatcaaattcaattctgagaatggacgagaaaacttgggcaaaagagaaatatgatttgagaggatttggactagcgctaacaatatgggtgttgagcgcagttccagcatttggtgcagcatatggagttaaagataaggaattccaatctgaatatccattgatattgaagtggaaaagcactactactccagagtttttcaagatcgtaaaccttgtaaatgatgtttctgaggtaagcttttgtctatttacagaattctttaaatggttttgagatttgaagttctgctttctcaagatttgtaatgttattgtatcttcgcagattgaggtgaatacaattattggaaacccagaagacttcaagtctttagttcctgatttccacacagacgacatagaattccaaaaggttttggaacttgttaagatgggctacagattgaagaaaactgaatggaatacaagatgcgttgatgtttgtgctgcccttgaagaagtaggtcaaaacaaaatcaataacaaaatatctgatagcgagaagcttgacaggattttgacaatccttgaagatcttaacaagagagtcgagctgattgagaggattttggacattagaatggaggaaaagaataatcagagatccgaggaagatgaagaaagaaaacaagaagatgaagaagtagaaagacaaccagaggtaattgtaaatgtttctttaaaaggtatttgaaaggaaaggttttacaatgtattttaaaggttaaatacgcagtaaacctttacaatgtactctttttttcgcaggctgaagaagaaggaggagtagaaagaaaagcaaaggtaattgaaaatctttacaagctattttaaaagtctactaattatattaatgattgacttattaattttattttgttgcagaatgacaatgaatcatttgaagattcaatctgagagccaaacacacagtatgggagctatccgggtgatgatgaaaacacccaacgtgatgttggtgatgaagtagctgaagaatcatcaaaagtacaataatttatatctctaaaagtcttacaaaaatgattagtatcctttttataattttacattctgttatcttttcaaggataagtctcctattccacgatcctctacaccaaatttcaatattttgtctgaagaaagtctggatgtttaaaaggataagaagagagttagcagaggaagaaatgaggttagcatttaaaaaaatttgtattaatttaaccaagtgtttatagtatttttttcaaatctttaaaactttatgtttcatgcaccttcagaacaagagagttaaagcaagtgttcatgctgaggataatcttaaaacaagaaaacaggttagtatttgcaacagtactgtttttaaatttgtcaattgtcttgttatgatatttacaagggattttaaaagtatttttaattggtgttttttactattctaggtgccgagaaagaggtagaaacaagttgatagtgctgatgttgatgttccaacaaggaaagaggttagtatctaatttattatgattttgaaaattttgtttacaaggtattttaaacatctgttttttttattatttttgataggcacagagtaagaaaaggaaaattattggcaatgatggtaataacgctaataatg

SEQ ID NO: 16602 - DNA, 1426 bp, Arabidopsis thaliana landsberg
gattttgtagaggctaaatatgtaatataggaaaaagttaatttatttatttaatgcaaactaacaaactataaatttttagtaatagaatatttggttgagatataatttgtaaggacctaaatgttattagtaaatagttaacggatttttggccaaaaagtctaccaaaaatatatatgtagatttttcttcttctcttcccctactttttttagtctctcccaaccaacaaagagttatttttttcaaaagcatgaaactaaaattacaaacaacctaatagcagccgatactgctctgcttttgtttcctccacttgcgtttatgtgcacttgcttcttctgctccttttcacttgcctgctaacaacatcatcaacagtctcagttatgtatttggtttacgtccaagttatttcacttttggacacttatatacaacaaacatcacctctactgctactttttgctttgacttaggtgacttttgctgtgtgataccgaaggaatcttcgaggtcatcatcgacgtttgcagaccttcgagtagctgcagaacacagatacaggttttaaatgaatcgagcatgaccagaaatcagggaacactatgcaaacttccacacataaatgtaaatctcccatttacttactctagaagttggctggatcctgcggatagatctacgtggctccattccctccgatgtttttgaagaattttcagccaacgccttgtcctcttcgattttggctaaccttcctgcagtaggagccactctccctttattagtgctcaaggaggaactattcttcgaaccagtatcatgagaggatgatgtggtttgctcttctactgttcccttaaatgaaacaccagatccaggacccctgttttctgcactctcatcagattccatatctgatgctgttgtattacgcgagtccttgcggggaattatcctagccgtagcacccggtttctctttgggcttgggcgcaggtttgaaagtcttgggcctagatattgttgtctgtttctctatggagatagttttagaaggcattttccagctacctattccagaattttggggcacaattgatctcacaggcttaactggttccttccgttcctgagttttagtgcttgcctctgaaacatagtgtttgctcacgtccatgaacttccttttctttccaggtttagggacaccaaaaatcacttttgatccttgcttttgcaaaccggttctcttcattcggagtggatcgggtttgttctcctctctggtactctttccaatgttaaaagtattctctgaaacaccgaggttaagaacaccagtctgaggcggtttccccaagtctggatcatcaacaatcttcatactcgtgtctgttacttcagccacaagagcggga

SEQ ID NO: 16603 - DNA, 1386 bp, Arabidopsis thaliana landsberg
tgtaacacctgccccgccttataggccaagacggcatgttattcatatgatcttgccaaaaatgttttctttaaacttcatacacgaacaaattatttcacataactcttcacgcttactaacctgagaaaaaagggaaaaaggagggtgagtaaagaatactcagtgaaggaaatcaactctgcccactgaaacatagaacactttctaaagcattagaaccatcatcataacatataaacttagacagaagcaatcaacctaacatgctttaacttctaagaccttctccaatgtatagctctatatcttactctaaaatagagaagggtttctctcaaatgtatatctctattttctactctaaaaaaaatatttttagaaatattctatttatattttatattatataatttacaatttgagcccatatatcatagttttgcaaaattcccataaaatatgatattatttaaattaaagactaattatatattaaaaaaacattacatcatataacaataataaaatattataaattttattttaaacaacaccattagaatattttttcccacatatgatcaattaaaggaagaaaacaaaattttattttgtgatttgaatttcgttcaaaacccaaatattcgtgcatattttgagattgaataagcacggattttacaaaaatgacgtgtccaacaacaagatcaatatcaagaaactccttctccatctacttcatttggacaatattttaactatcttggcggatctacaagcagcttaccggaatattatattattagttctatgttttagttatcttatattgtttattttaaatttcggacttgtttgcttgttaattttataaaactatgtgttgtagttgttgtttgtaaaatgatgatatatattaaataaaaaagtttaatttgaggaactaaagtataaataaaaaagtttaactctaaaataaagtaaagaatagagttattctatatataaagtaattttgtagaaatctttgtttagaatctaatatataatagggttggagaaaaatttatagtttttattgtaaaatacgataaggtcggagatatgtcctcagggaaaatgaaaaggaaggcaaggtttaccaaagttagtcaaggtttttgccgaatcgccataagtgttgaaggtgttgaacccgaattctccataaacacttgtgacaacttaaacaacaataacaatatttgattagatttaagtattaattgagattcgtgtaaagatataagcaacaataataaattttttttctatatcaatatttggtatttagataatgcttgatcgattatctgacgatgattatggccgtcggttcctttc

SEQ ID NO: 16604 - DNA, 2530 bp, Arabidopsis thaliana landsberg
  unsure (1)..(2530): unsure at all n locations
caattttccttttaatatgattaaggttttacctatccaaactcaatttagaaaaatcaattttattgaattcgaatatttgattccattatacagtgtgtcccttaattaatggaacatatttaattaatgtctcttgtatcattcaagtcattccacgtctataatcttttgcatgggaaaactaattattctctttttatattaacataaaccggttttcattgcgtgaatgaaattttttgctctgtttggtttattttatcatcttcgatcaatagaaacatttatccatgacagatacattacgaagacgtctagaggtattgaatgatgttgacttggatttggaacataaatcgatgtttcctagtgaaatcatgtggtttaagcaaatctagttaatcagttataaaatacatgaaaacaacgttcttttttattgaaatatatctgaattaatcagactgaatacaaatatggcaatgccgagtaattaagccacacacttggcttgttttattcaaaccataattattcactctagttaccactgagtagtatacaacaattattaaaaagtaaaaacaaagcaaacgatacctagccaaactgaaccgaaccgaaccggtttacttagttttcaaacgaccagctccaaacatcgtgacgctcaccggcacgtcccatggaaccagcaaaaccagcgtacatgttttgaagaagaacatcattgagtactctcgaaccttggatcaaaggcctcttcggtttcttaacgttttcaggggcgatggtaatggtattcctagagtctttgcttctgaactcgatccaagccttgaacctctctccactgctaagattcacatctttaaacgaccaaacttttctttttccgactaatgtctgaacccaataaccagctttctcagcgacaagagaagtcatcgagttgatgttgattccgacatggttaccactaatgtcattagactcattgttcttaaacgtgtcgaattcgataaatatgaggttngtttctgactttccatcgttggttttgttgaggattccgagatatcctccgccggaagcgccggagttatcagcggctgggacaatgacgaaggcaaggccttgaccagaattaggtttggtgcgaggagtgatggagaaagtgaaagaagttttaaaatcaaaaggagaagaagtgtttgaagatttgaattggattggattgatgtaaagaccctgaccatgagagaatggggtttcgtctcgggtcatggaaagagctccggatcggcttacgccatcagaggaaggaccaagctcagcgtctccaaggaataacaagttgctgccatcgaaggaatcgaagttgaatttgacggcaaaagctgcattagctaagaacagagcaagaaaacagagtttgtgaatctgcattgtgtttcttttgttgttgtttgtgattcaagtgtggagaagattgatgatgaaaatatttggaggttgataatatgtttatataagagttaacataagccatcgagcttgaatattcaaaatctatgattcgaaaaagtggtcaaataaacaatgccaagtggatgcgttggagacgccaccacaaggggcttagcagtgaaatggacccacccagatgtctttcaatgaacaaaatcttatccttttgaaaaaatattataatggattcgagtaataataattggttgattatattatgtgtttcttgtccccttctctacgaaacattgtgaattttaatgtctcgtgtacaaaaaaacacattgacaagcttagttgatatcacgaactcgtttttggatgcaaaaaagttactctgttttatgactttatcatctcaaattattaaataggtatatttttaaataccaaataaataaaatttacattttcttgtgctacgatacgacggcgggaacgatcgcacctttcaatggtatgattagtgggccgggccttttatagcccaaatacctagcccataactcaactcgggggtttaatgtaatttatattgttaataaacttcgtccctctcattgcgtcaccgagattctcaccggacctctgcttattaaatcttcgtctgtaaatccatttaaaggttattattttgtttctgagttacttcgtctcgccctcttgttaagatgctgcaaaaatgaattaaagaatcgttttacacttttgttggtgttgtggttgccttcgttattgcatcgtaggaacgagagattttgtgaattaggttttagggtttcggaattcagggttttaaccatttagggtttatcagaattgttaatttctataatcgtttctctgaaattggatgaaatcattaatcgtatcaatattgaaaaatttgggaattcaataatcactctatagaatagaagctgaaacgatggtgaaaggtttagtatgatgttagaacattcattcaacgaaaacatggagtggcttatggtacgag

SEQ ID NO: 16605 - DNA, 1400 bp, Arabidopsis thaliana landsberg
acttatacattctagatatgtttgcccaaaaaaaaaatacattctagatatgtttgtttatctacatagtctcgatttttatatagattattttctgatttttgctgatgttttatataaaacaacagagaggtaaggaacaaaactatattttccaaagtttgacgagttcattcccatcatcatcaaccaaaaagagtgataaacttcggatacaattttatttataccttatattttttttgattagtttcgtaagaccacactccaaagattcgtgtcttttcatataaccagtcagaaattgagatccttgtacttacattttcatatgatcaatcaaatcttcctgataactctaaattgttgtgcaatggtctctcctttattgcaatgttacatattcctagtctctattatggattaggtttataccaaaagttaccaattgcaaacaaataataaatcaaagaaaatgtttgaaacatagaaacaagtaatgcatcataaaccctaagacaagcttcaagtctctgtgacggtttcactctgtttcaagatcttcctcgtacggtactcgtcgacacaaaggacacgacctctgacgcttaagccactcaaagatacaattttgatggaacaaatggaaacagtcaggcaacagaatgatgttatcatcatgactctccgaaaagtcctccatacaaatcgaacaagtggtttcttcatcatctcccaaatcagtcaattcgattgtttgttcctcaagcaatctttgaaacatatctctcgaacgaacaacaatagacggtaacataattcgaacatctcttgtcactctcacgtaaaaggagacgctaaaaggttggggaatatgagcacaatccaaagcgatcctttcgctcaacagtcgacaaaactgagtatgtgtgatgaactcgtcaaggtcttgatagatgtgatgtgaactgagacatgatggtttcaattcgattttagtcataagtggagccgcgaacgttcccaaacacattacgacaccgttttgatcttcagctaactcgttgaccacatcgtgtagattaacgaacacggtgtttctaaacccttgatcttgtggtaggatcattgctgttgtagtaatcttcacggacaccaaattactatatgtattcatggtggaagaagaagaagaagaagaagaagaagaagaagaagaagaagaagaagaagattcaaagcctaacttttgatatgaagagataagattgtgaaatcaagtgaattagtttttttcaggtaaggccgaatgaattaatatataaagagatatagctttttcgtttggccgcctcagtaaaaaaaaaaaaggaaaacatataaatttgttctgagttcca

SEQ ID NO: 16606 - DNA, 843 bp, Arabidopsis thaliana landsberg
tgtatatattgaagacctttagaaactatgctctggaggggaaaaggcgaaaactttaccgaatcgatattatcggattgcaaagcagagttgatttcggagtcaataactcggataagcgtttgctcggagctaattcgatcaatagccgtcgagtaatttaaggcgcgagagacgaatggacgaattgaagatgggttgcgagctagagaggcgcggttcgcaacggcggagatagatcggactcggccaccataaacggaagcaaacttagatgctgacctgcgtacaacgcaccaagctaaagccatggtgatttgatttgattgattctctcttcttctgtgagtgaaggaagaaaatggagtttcaagggttttaaggttttaacagcgattgaagttgaggctccgtatcagcccggttcggttcgatggttaattcaaatcaacgaaccaaataacattctaaatcaagccaaaaatattagggggaaatttatcatctaacaaattgcattacaaaaaatctgtaaaattcaaaatatttttattaatttttttagttttttttttcttaattgatttacttaattaatcagatcaggtgccaatataaataaatttttattgaagtgaataaatgacaaaaataaataaatatgtttattattattgagtaaggtaaattataagtaagaacatgaagaacatattgttaaaagtgaatttcaaactcgtatctcaacttgaaagtcattaccctaaattctcaaaacattgtgcttgaacatagattttttttggcttaagttgctatttagtcacttttttaactaatgga

SEQ ID NO: 16607 - DNA, 1408 bp, Arabidopsis thaliana landsberg
  unsure (1)..(1408): unsure at all n locations
attattagatcacagtcatcgtggtacaatgctcttatacaacatcaacaaacacatacatttcatgattgacaaagttgaatcaataatgttacttccctaaactctctataagctcgttaatgcttcgatcagagcttcctccttcactcattgccttcacagccaaatctttccacttcttcgaactctctctaatcttcacactactctctccttccatcactcctttcaaacacctcaccaattcttcactcttcacgattacttccccagcttcctctttcgctctatacccaactttccaaacttcctccacaaacttagcatcattcatctgatcactccactgaggcacaccaaccatcggaactcccaaactcaacccttccaacgtagagttccaaccacaatgagtcaaaaagcaacctatcgattcatgagctaaaacctcaagctggttacaccaagaaaccaacaaggctctatctttagtcgattccacaaacccttcaggcaatttcgctatatgagcttctttaatcacccacaagaagttcaaatccgattcttgtagcgcaatagctacctctgcaagttgcttctcaaagagaatcccaaacgaaccaaacgaaacaaatgctactgactgagcctgcttagtctcaagccactccatacactccttcgatatcggtttcaacagactcgcaccatagtctttatcatcttccatccgatcatcaagataagccgatggaatcatcggtccgatcaacgtcgccttcattgcatcagactcaccattttcacaatcctaatcaaaacaacagttctaatttcaattcaacaatgtaacataaagtttcaaactttatagtagaatcaaaactcttacttgtgtttcttctaacccttcaaagccattaacgaataaccaatcagcattttcatggttaggaaactgattcagaagaactctgccatgctcaggatgagtcaaccaatgacgtcccacaaacgaaggtaactcatcgtagctcaaagacggtaagccacggatacgaaacggcgccgaattaggatcagcgggaagaggaaagtcaccgttagagaatttacgcaacacagaacaaacagtgagattattagtgaagaaagaagcagctgaaagttccatagatctagcaacttcaagtccccaaggaagaaacgaatcgtagattaagcaatcgattggtgaatctgtggatttgaatttctcgattaggagagttagggtttcggatccgttgagcttgaaggattctgagtaagtatcgacgctgaaaccggngatacctatggggatgaaatcgaatccatcggagattggttcgacggagagtgatggtgttgtgattgagga

SEQ ID NO: 16608 - DNA, 1607 bp, Arabidopsis thaliana landsberg
aaaaataaggtaatttttttgtttggcaggttaaaatgtattgcgaaagaaccaaaaagatggaaatgatttccaagtgtgaaaatcaggattgcagcttcgactccccccccccatggcataacatgatcactcaaagacgtgacattcttctctcctcgctctttttttttttcagattcttagaattccacttgtacatttttatcagggtaatgcattttatgcttctttaacttttgttttgggaaaaaaaagagaaataattattaaaaaccaataatcattgcatcattctacttataagttataagttgctatcaaggtgtttcgtttttctctcccaaacgactaataataatcgaaggccatatacattcgaagattactaatttaatttagtaagttcacttcacacccatagacacacaacctttttttacatgaaacatatatatatatatatatatatatatatatatatatatattgattgaggcccgaaaaataaaataaataaattaatctttaatctgaatctgttatcaaaataattgtactactttaaaaatgaaaaacaaaaccaatagttgtcaaaaaaaaaaaaaaaaaaaggaacaatcattcgtatggttggaggttttgacccacaaaaaagaagaagttgtttaaagatgcaaacccacacactcgtttcttcatttaactgtctcttcttcaaaaccaaaaccaaaaccttctattgtttccctcccacgctataattcatagacataagagaatgaggaaagcacagggctactcctactctgtaatcgcatcggtgttggtgttactgtgtgtggtggtgtctcgaatcgaatgcagcagccaagtgcacgccctgagccgtctttacctgtctaagcgaggggttggtggttcgtccaccatggacacaagccatttcaaggcggttaaggatttgaaaccgtcttcgctgcggagtgctgctaatcaggaggggttaagaaagagagatctgatacggagattgcccggacagcctcccgttagtttcgatcagtacggcggctatgttaccgtcaacgaatccgccgggcgttcctttttctactatttcgtggaagcctctaagtctaaagattcttctcctctgcttctctggctcaacggcggtacgtttccactgtccacacgcatacgtatatatatttcttttatcttggtttgcatctttagttaggggcactgcattatgggtttatatctgtacatcttatatctgagtacaaagatgaacaagaatgttagtttgatcgatcgaggctgtctttttctcagtgcttattaatctatcatatgctatatgattttcagaatttaataattgtgaggaccataccatatttatgccttataggtctgctaattttctttttcttttataatttttaaatcaaattatcggaactaattattatttgcgcaacaatagtagtgaataatagggaaaagatccacaaccccaatcgaaaactcaactgagaaaagaaaaagaaaaatgatttgccttttttcaaaaatggcacatgctgaggatttct

SEQ ID NO: 16609 - DNA, 503 bp, Arabidopsis thaliana landsberg
cccctcaaaagacactttaactaacacgtaccttgcacctatctgatataacctcatagtcactgccatcttttaggttcaagtcttgcttcacctgattcaagaaccaaagccaattgtctgcattctcggattgaacagttgcccacgccacatggtatatttggttgtatgcatcatgaccaatagcagtaaaaaggcaacctttaactgcatgcttcaagaaggttccatctatccctatgagtggcctacaaaggtagaatgcattcttcattgctccaagacatacgtagatccggttgaatacatgattccctttggcatcagtaattgtatcaacaattgcagttgatcccttatttgagctcatgatttcagcaacataccctcgaagatgagcaaattgttgctcatattcgtctttcagccacttcagagccagtcaatctcccatgtctgaacgtgtcttatactactcaccaacttccactaatcgtttg

SEQ ID NO: 16610 - DNA, 913 bp, Arabidopsis thaliana landsberg
attagtattgcaattttttttttttttaataagagaacgtatttgcaggaataatgatactcgtagcggttatcattgtagcatttgtggcattttttgcgagagaggtatctccaaaatactcacgaggtatattatttattcttgttgtgccgacgatgacacatactactattgttcattgagttgtataatactgaaaaaaattatcgcaactaattatagagtttattgtgtttttctttcatgatttgcgtaaatcaatagagacgatgcctcctccctctcctatggccatgtccatgatgcccatgccaggctcgtccatgcccccggaaacgctggtgaataatttgatttatggcaaaaaaattaaaataaaacaaataacatccaaagtgtgctttcttgtgttcgctgtcttatgtgtctgttatggagtttagaaagggccattgtttacgactgagatgtatacgtccatcgtttgtacgtaagtatgaattattcgtaaacaatatttttctttgttttttctattcatataaacacaatgttagaactcttagaactttttatgcaacactatgttacatatctagttatctacacgaaactgaataccgacttttctcaagaaatacaattcagacagagacagtgaataaaaataagtaaatgatgtactagctaggcggtgactggtcattgagagcttaccgcactaaactatggtttatataaacaaagaccagtaaaaataccttcatgtgcatgcacgtcaataacatgggtgtagttctaatttactgtgaagcgtattaatgattaaatgtgaagtcccgcgttgagattaaacatcatacatccatcacccattacttctacagttctactgctatatatatacaac

SEQ ID NO: 16611 - DNA, 1033 bp, Arabidopsis thaliana landsberg
  unsure (1)..(1033): unsure at all n locations
aaagtcactagaagcatctctcaaggcattctttggtttacccctatttagagtgagtgagctcgtcttctctccacaaaaatttaacttgagctgcatcaatggcggttacattttctgatctccacacagagcgaggtctcaaaaccctcgaggaacatctcgccggtaaaacgtacatctccgggtaaacacgcatattctttcataatttgctatatcattcatcaatagcttagattttgcacagtttctacttacatcttggaactcggttttgtttcagcgatcagctttcggttgatgatgtgaaggtttacgctgccgtattggagaatccaggtgatggttttcccaatgctagcaagtggtacgattctgttgcttctcacctagctaaaaggttcgttttattctcattcgtttttgcttcttgttgatcttctgattgaatggctctttggagaatgatgacttctttgaatgtttcagttttcccgggaaagcagacggagtgagagttggtggtggtgttgctcctccatctgaagctcatccacatactgaggtactaaaagtagtcaaaatatggaatgacgccaatgtaatctgtttgtagaattgaaacaattatttgatagtgtgagatcaagtagaggaaaatgcaattgtggtgctgttggaatgatgattttgtatactgtaatttagctttgcccctcaacttatatctgcaggaacctgctgctgatggtgatggtgatgatgatgatgatattgatcttttcgctgatgannnnnnnnnnnnnnnnnnnnnnnnnnnnnnnnnnnnnnnnnntaagaaagatactaagaagactaaagagagtaagtctttctctaaacttggattggatcactgtggactattatagtgtaaattgttagaatcttgagatcctgctcatgtttggctaacttttgtattctcttttaacttttttggtaggtggaaaatcttctgtgctactggaagtaaaccatgggatgatga

SEQ ID NO: 16612 - DNA, 928 bp, Arabidopsis thaliana landsberg
tttatcaccgctcgtcgaccaagaggtaccgaccgattcccatcccacgtcatttggattcagcctcaacccgcctagcgacctcgctttggcgggcgctctcgtagaggcgactccaaaccctctggggtttcgcatgcggtcgccttgggaccgactgacggacgtctcgacctacgggccctctgggtccgaggaagacgacgagcccagcatctattgggatttctctggacttggcaaccccagtgccatgcgggacttcatgaccgcatgtgactactgcctctccgactgttccgacggtagccgcagcctcgacgacgaggactgtggcccaagccgcgaatgtttccacgtcgatctagggggtcctccgaagcaatcatctcggcatgcggagaacggtgatccccctaggcctgcgcctcgcgttgacatccttcgggagctagctgtggtccccgtcccggtggggggtcatgacccacagctcgagcaaatccgcgagatgcaggccaggctcgacgagggagcaggaacgcttgagccgttccgccgggacattgggcaggaatgggcgggccaacctccggccgaagaagcgcgtcatctaccccagggcatccagcaccgcatcgccgacgatgtcagggcaaggccgccaccggcttccagtggggtcagccagaacctggctgcagcggcgatacttctccgcgcgatgccggaaccatcaaccaccgaggggcggcgtatccagggagagctcaagaatctcatggaggatgccgcggtccgatgggacgaaagctctgcctcccgacagcagggactcccctcggaacatcgcgccgcgacttcccgattcatgcgggaacctcggtccacaccgggcgcacggcaacacagcgcctgcggccccggg

SEQ ID NO: 16613 - DNA, 993 bp, Arabidopsis thaliana landsberg
  unsure (1)..(993): unsure at all n locations
cagtattctatctctacagacaaacagaaaggtaaaccagcaaaagatgatttaggtatttccacaagaatatttcaatacataaaatctataaaaatttgtatatagtacaacatttttattattaggttatctagatcatggtgattcgacatacaagtgtcgtttttgtggagctataatgtggtatgacgagcgttttaacaaaagaaggagatctaaaaattcgacgttttttatttgctgtttgcaagggactataatacttccatnnnnnnnnnnnnnnnnnnnncgcctaacaaggttacttacaggaaaagatcgactaagtagacattttcagaaaaatctcaaaccgtacggaaaagaattttcaatgacttcacttggtggtaaagttgataggtcagttcaaaaagtaaaatgaccaaatatgtttcaactacaaggagcaaactatcatctcacatacaagtgagactttctatatgggtattgttagtgatcgtataggtaaggatggaaggaattattacaacccaacaacatctgaagtggctgcagtgattcctagagattttgtgaaaggaatgtcatctcttgacataatcgttgaaaagaaaacaactggcagactacaaaggattagtgaaattcattcctcttattcgccactacaatatcctttcattctctattatggtgaagattgtttcagaactaagatacataaaggatacactgggaaaaacaataccagcaaaattaagtccactagtatgagacaatggtttgcttttcgggttcaggaaagggagaatgaaagccatactcttctattgtgtaggagattgtttcaacagttcttggttgatggctattaaacaattgaagctaataaggttgtcttatattaaattcaatcaatcgaaaattcggtgtgagaaattcagtaacatcaaagaagcgtctgcagctggaaacaaaaaaatg

SEQ ID NO: 16614 - DNA, 2124 bp, Arabidopsis thaliana landsberg
aggagatgatctccatttttaccactgctccagaatcagttcatgtccttctttgcaagaatttctccattttccgcttgcaggtttctagtctctgtctttctctctctcttcaaacgttagaacaagaacaaaacaaaataaaatatgctatgttataaattattttagcttacataacaatttctaatgtcaataaaacttatttttctttatcagaaaaacaactaaattctagaagaaaaaaatcgtaaattcaaatttggaaataataaattacaaacgaatttgttttatttatgtcttactataatagtttatttggtttcttttccgtttcttcttcgtcaagttaccttcaaattaggttctttgatagatttattcctactaagttttggaaaacaattggatgaatttctcttaatttattcgacctgaaatttgggttttatacgaattaaaataatacttttttgctgacaaaccattttaatacaagaaaataaaataaaatacaagagtctatgaatttgtgcaatcattttgacgttttctcttggttactactacactatccaacacatttttacgtaagagtgttcctgagagccatcactagttcaactttgattatcgagtacatgcatttcataattttttgttttacataagagtattattatcgagtacatgcatttcataatttcaaagtttatcggaaaacaaaaacttattgtttaaaatatgtcttaatatttattaatttggatgatgcaaatcgtttctttcttttttttgtttgattgacctaatcttttacgttaagaaaaatatgaattattgatattgtaagatatatcctacaattacactctcttaaaatattatcgtggagccatcatattatatacagtatgtgtgtaaatgatttagtcacttacattctcagcatcttgttctcgtgaaccgcaagacaccacaaatttagtaaacaaagcatcgtaacatttgatcacttgcactctcttctacattctatcgttttaacccttccaagcgtcggtacaatattattattgatttattgacatcattttggttatccatttgccaagttacttaattaataccgtcaaatccaataagttactattacatgcataatacgtatagtctttgatagcaaataaagaacgaattaagttcgagtttctaacaaaagatatttgtccgatcaattcaactatattgttgttacaaataatttagcatcttgactgatagttaagaaaagaaaagagaaaacaattgtatttaatgagtataatccgccttggaatagcggggaatacttgtattattttcattactaaccaaaatgttatctgtcaagttaaagtacaaatgtagattattaaccgttaagagcatagattttgtaaccataataatgtagtaagattaataagatagattaacgccaagattaagggccacacgcacgggagaacacgtgcttctaccttcgtgtcgaccaatgcttctcttatgtctctcaatcccttcaaatctacgaagttgatcctcattctttcttattcccccaagtagaattctcttctgtatttattattttttagcattttattattattaaaacaaccctcaattgttattttatcatcgtcgatcaccacctacaagtttgattgggcagccttaaaaactagatctatggtaagctccgatcccaatattattttgggttgacgataatgtagtactgttaggattaaaatatactccatatacgagtacaaattacttataaattgtgaaataataggaagtcaaaccttaattctttttttccggatggcatttattcatcatagctgtattattaattcgagtttgactcgaaagtgattttgacttaattgtgataggagtacttgcgtatatttagttgatacaaacaaaaaatattacttgttactcaagttttgttatcataaaagttttgggtttatgattttaactacattgactaatcattacaatctcatattagtgaatgtattccaccaattaatattgagcttcatgatggttcgctaa

SEQ ID NO: 16615 - DNA, 283 bp, Arabidopsis thaliana landsberg
cacacataaggagcatggtcacctttcatcccacaagcatcacaaacaaagaacatcaattttggcatgagtgtgagtgtatgctcatgtacctttagctttgaaagagaaactcgttccgggtttcgaattgcacaaccaatatccaggttgaacatacacatatcacaatgataaagtaagtttgcagtttcgactccacatatatgacattttggatctgtgtaatctggagcttcatctgtgagtagcttagagggtgtctagcatgaaaaggatgagt

SEQ ID NO: 16616 - DNA, 923 bp, Arabidopsis thaliana landsberg
attggcctctcgttgcattggcgcatcgtacgcggctctccggatgtggtgatctcatattcttcttccttactcatttctagatgtttgcgttgatgtcctcggttctgatgatttgtttgcattatatttctaggttttgctagaggatccaatggaggaaaatatagagaaaagaatatgcgtcgaacagcttgcaatagaggatctgataagcaaattaccggaggttttgctatctcagatactctcgtatcttccgacaaaggatattgtcaggacaagtgttttgtccaagaggtggaaaagtgtctggcttttgattcccgggttggatttggactctagtgagttcccacattacgatacctttgtggattttatgaacgaattcctatttttctctagggaagagaatccatgcttgcgcaagctcaagctaagtattcagaagaatgagaatgatccgtcttgtgtcacgctatggacagactgtgtggctaggggtaaacttcagcatcttgatgttgagtttggtggtcgcgtaatggagcgtgagttttgggaaatgatgcccctaagcctctatatctgtaagacgctccttcacttgagactctatcgggtattgttgggtaactttgatcagtctgttgattctttacctagtctcaagagcatgtgtttagaagaaaatgtatattctaatgaggcgagtctggagtcgcttatctcgtcttgccgcgttctcgaagatttgaccattgttaagatagatgataacgtaaggtttttacgagtgcattctcaatcattaaccagtctaagtgtaggatataaatcatattatcctggtgagatatattattattatgatagagatagagggaactcgggacttgtgattgatgcccctagactca

SEQ ID NO: 16617 - DNA, 1311 bp, Arabidopsis thaliana landsberg
agtgtaatcatacctaaacttgatacttgataagattattctatattggacatataatgtggtagttggagatctaaatatgaggataattaaagtcctgtcaatataagagtttatatacacaacaaaaattttaaagttaatatgtagttagttttttcttacattagctagttttaataaatttcatgtaattgaaatttgttcttataaaaatgaatgtaggatgcaagttttaccaaaacaatttagtttttatttgtaactttacttgtccaacttttaaattgttaactaatattattaatttctaagcaagtaaatttttttgggtcaaccaatttctaaccaagtaactaaattataactaatcaattagaataatgatttaatttttcttttttggtgttgaaaatgagaaccactctcgacaaaacctcctggatatgatgcaccaagacggatcatgtattgatcaatggatattacacatcattaaccaaacaaatacatattatacaccattgacgaaaaatgaaaaatgacactcaaatattccaaaagtagtcaaacaggtttctcttctttaatcatgcaatgaacctcattatatagagtaattacaaataattcttccataatagttgcttaacatgctctcggaagatgaaaatcaaactctaaagtgcatgtaagagaaaaatagacataattaaatgtagtctttgccatggacgaaaattgatcttccttgattgttttttagctgaatctacttaggtgactccttctttcatggattaagattataggataactcagtttgtagcttaattaattatgattcctagttattgagtatataaatacttcaaacaatgaacacaagtcatgatgcttcctattatcaaatcactctcatttttatttactagacactagcctatttatacatgatcataacaagatttgttgacaagttcttttacatattcgataatatgaaacctatctatttaacataagaaaatatatacaaatattaacataagaaaatatatacaaattaaaatattaactttttttcaagtcgatttcgcaatcttcaagttctcctaactggctacaccaacctataatgacatattatgtggctttgggtgctaatgcccatcacatcttggtcagatcatcattcgaattctgaaaacataagcatacctgttgtgtatacataagtcatttgtaatatatatatatatatatatatatatatatataaaaggaagttataaatttcatagaattgta

SEQ ID NO: 16618 - DNA, 1904 bp, Arabidopsis thaliana landsberg
aaaagaaatgtattccctagcgaaaatcatttagacattgtaatgttaaggcatgcaaagagcattttgtatacgcattaagatatgaggagaacttgctccagctctagataacgactccaagtttcttgtagtgaagcttaacgcttcctccaagatatcttctcttgttgtccttaagtgagcagcttcatacaaactcaccatgcccttgacatcactggttatagattccataaaacttttcattctcccctttgaatctcttgaaaacatctattggtcaataggagaatcttgttaatacatatgaatcgattacaaaaaaatgtactggtagataacttttaccggtagacatgttgtaaccgtatgtcctgaaaacccaaaacatgatggaaatcgtgtacaaatcatcttcaccggctatcatctcctgtatcttttcaaaaccctcttctagactctgctcaatctcatcttcgaagtgaaacgctacaccaaggctcacaagcatatatatgaaaaggatcctcgtcttggtcgactcaatgcttttcgaagaaaacatgagcatctcccctacttccggctttagtctctcaatctcttgggcaagggcattcatttcctaacaataatatcatatgttcatacccgttacatcgatcctttacatttactatataaatgtgtgtgtgtgtatagactcaccgagacatcaacttgatgagcagagaggaaatggtgaccccattttgaaagtggcaatctcttgaacttgcgtttactttcttgatcatgacaggcccgagtaggggtggccttcatgcgaacaagctttccatgctgacctgaaaatgacttgtggggaaagctagagagttttcttaccgaaaataaattggaacgtaaaggaagagagagtatagatccataagctgatatgcattgcatgtttactactagtgatatggaatacattttcacgaccaaatatataggcaaaacataagcgttttcattaagtcatcttttgaaaagttttggaagaatgtatattaatatccccatatttatcttcttcgatgtacagtacaatctctataaattaataatgttgggaccatgatattttttgaatctatagtgatattcgtttatctttaaattgatatttattaatttataaaaaaaaagtttaattatttattttttttaaaaatacgagttgacacaattcaatatacatcaaattaatgacttggatgttgaaatttgtgtagtattagaattgaaaatttaatatttcaaaaaactcatttgacaataaatcacaatgactataactgaattcatttatataatagatatacatacatctaagtttatgattaataacctcaactatcagatttttaaatgtagtagactattgaaatgaaaataatgcagattaagaagttgtatacttataaaaacttatgactaattgtattaggaagttataaacgatactacaatatgatagttttaaaacacaacataatttaatgaaaattagagacaaaatcattgtttgatgtaataatagttcaagacaaactctaacaaacattcaatagttcaaaaaagatttaaactatagattatatatattatatttttgtggctattaatttatgatgttattaagactatattttttatatagggttttgaaacattgttaacttattattttatcaaattatgttaaattttacattcacacgacttgaaactagtataatattatttttttgtatttattaatttatcaaaaattaatttgtacaggttttagtgtaagacatgtttcatttttcattaaaaaagaacctccaagtggcaaaaataagatc

SEQ ID NO: 16619 - DNA, 1151 bp, Arabidopsis thaliana landsberg
cagattttatgttgaatactagtttacctattagtgattttttttcattccatatatgaacacaaaattatattgtgcattttgttttcttacaatttttctcttctattcaatacgattatcttagaacatatactataaaaaaatacattatgcattttaaaatgataattttagttaattcattataatatatagttctttaaatttaattacattatttatctagtattgttttcctggggcaaattctaaatctgaaacggtgaccatctaccttccaggggtcaataaataccccatgcaatttttccaaaagggatcaatgtaacaatcgttagtttctttctcagcctcaggtaagctgtccccacatatccctccctctttctaattatctgattgtagtttgtataatgttttgttgtattcgtaagacttgatcaacttgcaagcaaaagagatggtgcaaaaggtggaagcaaggggtggtgagatgggagatgtatgggatgatggtgcttacgacggtgttagaaaagtatacgtagggcaaggcgaagatggtatagccttcgtcaagtttgagtatgtcaatggttctgaagaggttgttggagatgaacgtgggaagaagactttgctaggagctgaggaggtatactaatatatctatcgatctatgcatgttgagatttgtttattggtttcttcattgagaattctctttgcagtttgaggttgatccggatgactacatcgtatacgtggaaggttatcatgagaaagtttttggggtaacaacaaaagaaatcatctccactcttactttcaagacttataaaggcaaaacttctccgccgtttggaatcgtctcggggacaaagtttgtcctccaaggtggcaaaatcgttgggtttcacggacgttctaccgatgctttgcactcacttggagcctatatatcttcgccctcagctccgaaattgcgtggaaagtggataaaggtcgtagtaatatcttagaccaagataaataaaaattactgttaacccatacaacacaattaagggttttgattgataacaacaaacttgcgttggaaatccattaaaaaataaacactagactttattggaaaattcatatta

SEQ ID NO: 16620 - DNA, 1461 bp, Arabidopsis thaliana landsberg
tgtattgcgagtctaagctgctcttcgtcgacttcttttactccgatctcgctgtcaaagcgatctcgatgttgctcaatccgccgattctcgtcctaatcgccaatgaagaggaggaagaaggaggagctgaagtaacggagcgttcaaaattctgttacttgtacagcgatctaatcattagagggaatccggattttaaatggatccgacccggaagtgaatgggacccgattgtggtcaactacacatcaggtacgacgtcgtctcctaaaggagtggttcattgccacaggggtatattcgtcatgacgcttgattccctaaccgattgggccgtaccgaaaaccccggtttacttatggaccttaccgatattccacgccaacggttggacctatccatggggaatcgccgcagtcggaggaactaacgtctgtgtgcgtaaactccacgcgccgtcaatataccgtctaatccgtgatcacggcgtgactcacatgtgcggcgcaccaatagtgcttcagattctatcggcgagtcaagaatctgatcagcctcttaagagccccgtcaatttcttaaccgccggttcttctccgccagctacggtgcttctccgcgccgagtctctaggtttcaacgtcagtcacggttacggattaacggagatagccggtgtgatcgtctcctgcgcgtggaagccaaactggaatcgattaccggcgagtgatcaagcgcaattgaaatcacggcaaggagtgagaaccgtcggatttagcgaaatcgatgtagtggatccagaatcaggtcgaatcgtgaaccatgagacggagaaacagttggggaaatagtgttgagagggagttcaatcatgctcggatacttaaaaaatccgatcggaactcaaaattcgtttaaaaacgggtggttcttcaccggagacctcagtgtgattcacggggatggttacttagagattaaagatagatcgaaagatgtgattatttcaggaggagagaatgtgagtagtgtggaagtggaggcggtgttgtacacgaatccggcggtgaatgaagcggcggtggtggctagacctgacgagttttggggagagacgccgtgtgcttttgttagtttaaaacccgggttgacccggaaaccaacggataaggagattatagagtattgcaaatataaaatgccacgttacatggctcctaaaacggtctcgtttcttgaagagttaccaaagacttccactgggaagattataaagtcattgcttaaagagattgccaaaaacatgtaaaagtattgtaattttgatctaatatcagatatgtcatctctttcattaagattaatcatatgatcaaattaattgaaatcagtctctttcgtggccgcatatgtctcagcatcaaaagaaagtggtttatcacaaaaaagaaaaaaaaa

SEQ ID NO: 16621 - DNA, 1902 bp, Arabidopsis thaliana landsberg
  unsure (1)..(1902): unsure at all n locations
catcatacatcacctaccaacccaaaccagtcacatattaatcgtcacttgattccttaatagcttatttgattaaactagagaaagtatccaacttacaacagatgccaaaatcaaagcaatggcaaaatgtgatccaccaaagccttcttgtaaaccaatagctacagcgagagctgtaacggtcgctgaatgcgaagaaggcattcctccagacccaataagctgtttgagatcccatctccgttccctatacctacagaatctaggaaaccatgtaaagatcctttctcatctaacgtatactataatttcctatgtaccgtttcgaaccaaagattgaggaaccaggcacatatagatttaatcggagtctgatccaaacagagatataaagagagaacgtaccaggaggtgaagagtttgatgaattgagcgatagtgaaagaggtgacggcggaaatgagaggataattcgtgaaaatggagaaataatgagtggaagacgaagacgtagccgtggctgtagaatcctccatggccgatgatggatctagtcaggctttaaatcgtgctagcgaaagaagaagaagaaaatgacaccgaaacgacaatgatccataaaacgtcgactaattccctttcaaattccaatggcgtctacgtctaccgttcaatcctctttgtctttctttttttttctttgaccaatttttttttgggcgaacgacctgtgtccccatgggaagtttcatatacgctcacaactccacagattttggacctcgactctagtccacataaaactaaagttaaaaaccgcgttacccctaaaagtaaagtcaaagacctcgatccccatatttttgaatttcgtggtttattgttggtttactgtacccgaaacaacattaaccatataagaacgaaactaaaccggatttacacataaaccaacccgttttattacccaaacaacccgactatttcagaaaacccccaattcgaaaaatcccccaattcgatagaaccctaaaattaaaaaatccccagtttttgagaattcgatagatgcgaatgaatttgagacgaatgctttaatcgttcatcaggaggctaccggaactggtccgcaagagtttcgagaagaagatattccaatggaggacgacgttcctgacgacgaagatccgagggagcgagnnnnnnnnnnnnnnnnnnnnnnnnnnnatgagttcagagatgagccttcgattcttcacgacgagtatccggacagtgacagtgatgaagatgaggatgttgttcgggagagaaagcgtgagaacagtagacgtggaggagggaatctctactatcaccagacattcttcaacgagatagcctttaaggaagctgtactcgaccatgccttgaagacaggatgcaacattgcacaatacaggtatgacaaagataaggttgcttttaagtgtgatggtgatggttgtgtatggcggatctattgtgcagtgactaaaaaatgttctaagtggagagtgaatgtgttcaaggatgtgcatacatgtattccgaatggtgattgtgaaatgttgaaggttcctgtgatttctaggttatttttagataacattagagaagagcctcaatatttcatgcctatgaagattgaggaaaccattaaaaaaagatggaagatcactgtatctaggcctcaatgtcaagctgcaaggagaaaagcattgagatggatagagagagaatatgatgagcagtttgctaggcttcaagactatgctgcagagataagagaatcaaacaaagattccctgttccattcagactttgagaaatatgcaggagaaaaggtattcaccgttctatgttgttttgatcgattag

SEQ ID NO: 16622 - DNA, 956 bp, Arabidopsis thaliana landsberg
tccgcatgaagcagtgataaacttcgtcgagcactcttgaggccaagatggaggactaagtcttgtcgaacaaggacccaaccatatccgcttaaggagtcctctgcatgccaagaagcatcaagttgacattcagggaccaaggtgagcgaaatctgagaagaaactaggaaaggcggtgagcttatggggacgtcttcttttagggttgcttgtttccaaacagatgcctctttaagtgccaaagccaaagtgtcagggggaggtccctgaaattctcaaaaacaaaacgatttctacttttccagatataccaaattatccatggaaagagttctaacacctcctctccaattccaaattcccggccacgccaaaaaaggaagtcaaaattatagaagagggaatttctagggaaaatattccctgaagaaggaataggcgataatgcccaaatctgtcgcgaaggtggcaatgaaaaagaagatgattaattgtctcttctggttctccgcaacggggacatcctttatctgttcccatgtgacgatatgtcaatctttggcaagtggcaagacaaccagagatacattgccacgcgaaatgcataagcttccgcgtagttttaagcttccatacttgtgcctgtagtgccgagacaccaggtccctgaaaagggaggtcacaagtaggacgagacaaatctctcgcggcccaataacctgatttaacagtatagtttccagatttagtatgagaccagctaaacccatcactcaggtaagtacggcttggtcgaatccctaaaatgagtggaatatcagcgggattgatcaaagcttgaaggcgatctaatttccacatttgtgtggattgatcaattaggtcgtttacataaagataaggataacttatgtcaaggatactcttggctggtcttgccggaattgtgggaa

SEQ ID NO: 16623 - DNA, 1900 bp, Arabidopsis thaliana landsberg
  unsure (1)..(1900): unsure at all n locations
tgattattttattggtttgtgttgaaccttatgcacctgtaatacatgagttctagacaaaatagttagtccatgtgtttgtgttgatcatcgaccaccaaaattaattataggaaatggttaacccaaattccctttcaccaaggctactcttaaccgtgagtaccactgatataccatattctaacactctgcagaggttgcacactttacccatgagtcgtgatccctttccagcctgggttgtacagacctgatcttcactaccgaggtgaatggccagggattcactacgtagcctttacaaagactctcctagtgcattgctacttgttaggttttgccagttgtacaaacacaatactcctccctaaggtgggcgactaacaaaaccaaatcgaatgatcctcggcacccacccttaacagagcgagcactatgcccggaccccattgacggccctacgacgaagccaactactcctctggtgcctctaattaatcggctaagggcgtcccattccaccctcattgttgcactattatcccgggtttcactccccaaacacggtcttacggagaggtactcaggaaagagcctgagccccctaaagtaatcacaaggacctcatcgggataacatcatcgtatcataaaagatcacatcatgttcattgattaagttaaagcaatagcataagctaatcatggttaacccaaaaaggtaaacaagggtaaaggaaatacaaactagtcaaaccttagggtttcaataaagtaatgcgggacagtgaattataaagtatagtaggacataataggtctgaggacacttgccttcaccaggttgttgctcaaagggatcttcggcaacacactcaggaaccacgagctgctcgttgtctaaataaagcgagcatacattcaatacatttggaaagtacaaataaacatcacatcaagcatataccaacattggaaaacatctcaaaaggtatagtattaaataaaagagaatgagatcaacttataaaatggactaatcttaattggggattgattactctctaagtgttggatcatagctcaaaaaggtaaagtagtaattaaacaaagaaaagattaaattataaggtgaactactctcatttaggaatttgattatttcttaagtattatccataattacattcctaattctatttatgtcattaaggcctagaggttaagccaaaaataaatccaagtaatgcataacactaatctcacaagattcaatatactttattcctagggttctccttttatttatttcattaaataaataaatcaacatatacattaatcccatattctaatgtaaaattaaggtatgcagattacggttggtcatattttatttgatcagagaataatattatgaacattttgcaacttgaaccacctgatttggagttcatatgcaaaagatatgaaataaacaatttttggaatttaaaatacaaaattaggtctaaatctacgattaaacaaaaggctaggggtctttccgcaagaatacagagacttnnnnnnnnnnnnnnnnnnnnnnnnnnnnnnnnnnagaaagtcgatggtttctttaacaaaaagaccatgcgaaggggtatcgtggttcctcgtccgtcagatccacggtcaacgaccaggattagatctggcgggcaggagcgtggacgcgagcacctgacaggtggactcagggtgggttgaggcactgacacgcaggacccacgggtcagcggtgtgctgagggtgtggggcgagctggccactagatctcagattgacggctctagttccacgaaccgtgcgaaccgttatccgacatctgggctgtcaattgaggctggacggttaag

SEQ ID NO: 16624 - DNA, 944 bp, Arabidopsis thaliana landsberg
tgaattgtacactcataacacaaaccattacaattttcaacaaacattcatcattagacattcccaatcttaatctcattattcaatcctggcttgaaagtgtaggataataaccaatagctatactcaaatgagcatattaacatagaaatttaaagctgaaaataagacagcttattaagttttattgtgcgacgaaaaattagaggaaaagatttagatttttaccaaaacacctaactttagatttgattacataagaggggaaagattaaagtttctcaaagtgttaacttcctaggctagatctatatctttttatgatgtgagagggtatgagtcggatgtgtgcataaaataaatgagacacaaagatttgttaacggggtttcggttaacaacctacatccccgggacctaatccagaaacaactccactagaataagatcgcaaatacaattgcatatgattttacagcataattatgcctatcactttttctagatggactttagaaacagtatcaagccacgcatgtcttgactaccacccggcagcaccggtgcatcaccgtcttctctaacggctgcagattccaaaggaataccaccaagagatcatcatctgtatttggtgggcgacgccacacacatgtgtgcatctctctcaactatatcatagacgcgccacctctttttgtcacgccagtcatctatatatactcaagacaaaaccctaagctccaaatattctcgcaatcttttttctttgatccgaaagtatctgagccaccactaaaggaaacatcacgtctccaatagaaacacgccacatcatcttcattcttagcttgtttctttctacgttcagttctcctgttgtgtacacagctgctacctgtggaacacaactctgatactttctgttgatactccagcgtcac

SEQ ID NO: 16625 - DNA, 565 bp, Arabidopsis thaliana landsberg
ttctttgttcaggtgccaaaagatgggcacaccttctaagagttagggctgattcgcacatctaggtacacctaggtacacctccctcgtttagactcacttctatacgttgtttcatgcactccacacagaagtaatgactgcataaagaagtggaaaacatctccggactttcgatatcatcgacaaagcaattcccacaagtcttcttctgagcagtacgaggcataggtctgttgttgcgagaaaattattgtttcctttgcaagttccttttcaagcttatacccaaaattggcttgatttcctgtaacaagaacaaggatgctagatgtaatttgttgtctgatgcggtgcacgtcatccattagcagtgaatttctcatgcatggtgaggcacatatctctccataacctaatcatccaaggcaaatcatcaatcaatttaagatcttgaagcaaagacatgtgaaccttagcagccaagaaaacttaccaattcaaagatctcaagatcaccacagcaaattgtgatatgattaggaatgctgtggtggggtaaaaa

SEQ ID NO: 16626 - DNA, 1426 bp, Arabidopsis thaliana landsberg
tttcaagttgttcatatacctcgcttacatataaagtctaaccatcaaggaagggtcagccttgcctcagcaaagcccgaccctccctcgggggctagaaggggggcaccccctctgcgtcaaaattttcctcggaaaaagtctttctgccggaacatctttcgtgcttttcgactacttcgaaagtgggatcctgaaaatgacggagtacacgtaagcaggcaaggccgaccgagccgagggactcctacgcctccgggatacggatacctcactcatcaccttctgcgataagtaactcacgctcggataagcgattccgctgaccaaacaagtcttaatgctcgaaaacttttctgccgaaacgatttttcgtgccttctcgactatatcgataacagaatcctacggacgagtaagagcacacgtaagcggcaaggccgaccgagctgagggactcctacgccttcgggatacggatacctcactcatcaccttccgcgaaaagtaactctcgctcggacaaacaattctgttaccgacaaataagtccagatactcgaaacaggggaaaagagacgcagctttacaacatgacgacgatatgtttgggcctcggcggccgcaaaaaacacacactacaagataatccaatcctgcatgctcggatctggacagttgaagggagccgcagcaccctcggcgtcgacaacactttcggcgaggtttgacctagcctcggacggcgacgtgctccgaggatctccactctgaaggacgaccgtcatcaccacgccggggccatcaccgctagagtcttctccgagaatccggcccgagcaggcggctcggctggtcaccccgagcctcggccagctgtcccccgaagacatcagctgcgcctgaggcctcggaagatcaactccggcgtcggtcccgctaacggacgacccggccaggctccggccgaccaagtcttcttttcgaagccaactctgcctctgttcgagccgacaccactacccccggctttggctcatcgaagagcggccgaggggttcctttaactaagcaagagaagcctcggacaacaaggtcgaccgagccgagggactcctacgcctccgggatacggatacctcactcgtcaccttcgcacgaggcgactcacgcttggtgaagcggttcagataaccaacaggcgagtcttagtgctcgaaaatgaggaaaaaacacggtccacgccaaaaatacatacatgttcaggccctgacagccacaatgaacaaaagaccggcattcaaggtgccattacaaacagaaccccggttccacctccgcaggtatgaacaaccccacacgattggggggcctgcggagcaacagaagaccgatgaacggctcgccgtcgcccgctccagcagcg

SEQ ID NO: 16627 - DNA, 948 bp, Arabidopsis thaliana landsberg
cacatttattttttctctttaacaaattaagattgatacataaactataccttacatgcatttattcaaactataataaatttcgaagacgatattgtgcactggcatcgcatcgtatgcataatggatattgctcaagcacattggaaaccagatggaagctttctgttacaaacgttgagaagaacgctgagagatatcggaacgttaaggttgataccaagaacgttagccctcagagcagtgcatagacaaatcgcagcgtcgacgtcaaccaaaccttggatgagcgagcaacattgttgagaggatggctgtcccaactggatgttgagtagactgcttaagacatttgcacatacaccgagcttgagagcatcaataggacagctgtttccggatgaaccaggggtgcgtggaggtgtgaccggcctaggattaggacttgggactgaaggacggggtggaggaggacattggaccggcttgggcttaggacttgggactggctttggtttaggacttggcttgcagttgcaatttgttgcagtggttaaggtgaaaaagaggatgttgagggcaaagaaaagagcaagagaggttgagttctttgaagccatttgttttttttttcaaagttatattcggtgttgtaagggttattgaataaatagatatgaagagaagatgttggtatttataggattttagaaggatgtgaagaggaccaacttgatttagtttaaaatttatttatagatatttgtaattatttgtatatatatatatatatatatatataaattctgaccatttttcctatatgcatgtagctaggtacgtagaaccttgaaattatttggattttgttttttgtaaaccattttaaaattaagaaaatactttatatatacgtgcattcatataagtattaatgtcaagttgtca

SEQ ID NO: 16628 - DNA, 1431 bp, Arabidopsis thaliana landsberg
  unsure (1)..(1431): unsure at all n locations
cgttaatgtaacggtattgttattgtaataacctcttatactgttcgtatctggtcctggtatcggtgttaccggttatattaagtatgttgcctcattttgtatctttcggtcttgctgatggggttgcttagagactagcttagtaattagagtatagtaattagagttttttatagcccactttgaatttatcctaataaccatgacaatcataattttaatttagaacaagctaatttaattaagaatcgtacaatattcgagttagtagatacaatagtatcgaatattaatttaattaagcgtctactcggttttagacacataaccaaatcataattctaaatctaaaacattcaccctacaaatttggtgattccgagtaagatcatacacccgataaccatgacaatcatcattttcttactgcttgctttcgcttcagacaaagcttcttcaactttctcaagcacctcattctctatcttgatttcgagtttctctgaaaccatcctttcaaacaccatcctctctgttctaagctctttcagctcttgctcaatttcacgtgttttgtctatcaatgtttctcactacaagaaatatcgacattattagcatgagagaaaagctattatatgtcatcaatagcgtattcataaacgctatgttatgcccctgttatggtagaccccccatatatgatggcgtttttttcatatgctattataaagtattctatcatagcattaataaaatgcattcatatagtaactgtatattgttattaataacaatacatctgagctataatctgtttttttttacaatgctataatatttggtgttataactcttattttatatagtcgtattaagctttttgcatttaggggaaactgcttaatttccaaaatattcaatctatatatatataataaatatctaagagatagtcttcatttcataaaccaaacatcaattcatacataacacaagtctgaaatatcaatatgaataatacatgtcaactacaactaagacaagccttgaacatggaactgaacatcatgaaccgggaaacttgctcactaacaacccacaagtttgatgctaccttcactatcttccatctctcaattctctctatttgaaagtcttttcctctgcctccttgatctttatcaaaactcgatctcccaatagcttaattgaagttaagtatattgtaaataactatacacaagaaaaactaaaccgaaacagagaaatttataagtcattactaaaaggatatataaatcatcacacatagttttagaaagagagaagacagattgaccttaaacttgacaaaagaagcagnagagactaggaaaaaagnggattctaaaggtagaattgctaaggttgctttttagaggaccc

SEQ ID NO: 16629 - DNA, 2561 bp, Arabidopsis thaliana landsberg
cccccggtcatgatttctttaatcttcttcttataaccaaaagcaactgtcttgattagatgttttaggtattatcttagctagtgatgaatttttgacttccgccttttcttcgagggaaattttcacgaactctccgacgtcgaggttttgcgaggtcaccaattgcccgtagctcatcatgatgcctctcgatatcggtacagtctttcgcagtataattatttactatatggatgctgccatatgccttttcatcgcaaccatgttgttagagatggttgtctcgatcttctctttcccaagagatggtgtaatgcccctgaccttgactatatggccggacgtacagtctgtcgagtagaatgcgagatcaagccaaaaaaaggcaagatcagttcggccttttagtgtggcaagtcatgggtaaggagcattgaattggatcaagtccatgggtaaaggaatgacacaccatgagacggaccaagtttagctacgatgcgactatcggtaaaccccaaaaccattaggctagccctaagaactaggatagcttcaggaaaccttactttcggtctaggaaaccttagaaggtcgagtggaatccatttgggcagtggaatatgagtatgggtcgtgaatagtcgagggattgaacggagaatgcggataagtgacgttagcgagcttagtcggttaattctggcatgaaacgtgttatagtcctaaagaagccttgatttgtgtcattgaccctcatgagacattagagatggagtgtgccctatcaatgttcttgcggtccgtgacagatcatgggtttcgccggaatgaagaaacggacggccaggattgaactgtggttcatgtttatccgttaaggctcaagcttatctataattccggtcatccttatcctttagggtcgagcttatccattttggatgatgtttatccagaaaaaatggaggaaaccaatcggagactgattagtgtcccggagcgcccgtggagtgacatttatcgagttttgattggtccgggccacctcgtgcttgttttggccgatcttgtgaccgacttaagaccctataaatactccacttcgtcccatttgttcctcagacccaaaaatccactagaaaatgcctagctcgcgggagaagaccttagaagccaaaccgctcgaaaatccatgtgagtacttgagtcacgtgaagtagcacgtgaataggatagtttattcatttatttccttaatatagcttaggaggttaattaggattagttagcttaattattcgcttaatccctgattaggatagttaattaggtttagtagtagttaattaggattagtgatgcctaattaggattagtattctctaagcatgattaggactagttaaacctagattaggggaactaaccgtgattagtggtaattaagtacgattaattgtttgattagtatagttttgtatataggatagttgcataatagtatatgagtctgttgtcatgttagtagtctttaattagatgactaacattaaccgaaccatgaggatcccgtccgtatgttgtgcgtcgcgtgtaaccacgttccgttatggtatacgaaggctcggggctggatcgctaccgacggggcactacatgacgatgtagtattaaggaatgctatgtctcttgtagactttgtgtctaagagatggaggcatgtcctgggagatcaaggattcgtagaaggccttacctaggttgttagaagcatacttgcattagttgtccactacatattaggaaatcgagtttgcatgcatttttctttgtgtattatgtcttgcttgcattgcttgttgcgtgttttctttgtctgtgtgttatttgcattattcgtattttattcttcttaggtcgtagtattagtatccgtcgatgctgcttagggtagaggtattagggtagctctgtctagatctggggctcattaagtaatactagattacttatgatgctactttttgtgcgggaaaccttagttaaccaacctagtagaggccgctcgtgacttaggacaaaccaatgtatattttatggctttttgtaagatcttactaagtatattatgtatgattttcaaagaggatccgaaaacaactcctaaggctggtggattagaggtgcatgaagttggcaagcttacaccgctgggcgtacttaacacaatctgtgatcatagtgggcatataatatcccattcttttaattttaaaagccatggctgtaacaccctcgaatcgctctatgtccggacaagccaagggcactccaaaaacactacgatgatagctcacacagacaactcaacttaggttccaaacggatttaaacccttagtcggattacccacacgaaccatccctcacgaacgcggtttaggcttttcaacccttgccatgatcgtgagttgtgttagccctgacaagactaatatcgaatgaacacactctttataaaaaactaatcttttataacatataaattcttggaca

SEQ ID NO: 16630 - DNA, 1189 bp, Arabidopsis thaliana landsberg
  unsure (1)..(1189): unsure at all n locations
ggaatttagattacaagacgcgttaaagttttccatttatttttattttaagtgaactgaagtcagggaacattacatatctctgtattggttaactctcaaagccgttccacattcttttgaaaccaatgtagtccgagaaaaggaaaacataaaaaccagtggtccactcgatatggtttaataaccggaatttaaccaaaaaaagaaaattggaaccgaaaccaacaaaatagtttgacaattggctacggtttgtttccggtcaagtggatcaatttctcacacaaaccagtaaaatagtttggtagtggtttagttccggttatttcattggaatgcaaattgaaccggaacatgcagaggaatcttcttgcttttcccaaataattttgttggcttctctctcacaggctccgttgtcagaatccgaccaagacttctgcagcgggaagaatctaaatcgagagagtgatgtcgaatctcttcaaaaacgtgagtttatctgcattaatctatttgtgctctcgaattgactcttttgactcgcattaatcgactaggggttcccgttaaatcgatgttgattcgacagtaagggaaaatattggaccatgcaaggattacgaagagaaatcgcgagcttttgttcactttcgtaagtcgaaacaccaaatcatttgttgccttttagagttttcgggtagttgagaattgggtttagatatgttttttaaagaagcaattgttttatctttgatacttgttactagtccaaatcatgcctttttagattgttttgttactggaaaattggcttagttaatagtatggtttgattagacctttgatacttgttactagtccgtcatatcttgcttattaataatgtatttgtattgagaaatatgagaaaagagttttagttctttctctatacatttgatgaatttttaccattgaatgaatatatatagacactttctaacacgtagacgattatcttcatatggtactttgttgaacctatagggacatatcatgagacatgtactgtttttaattagcttgtaaatagttcaagctcattggatctatatggtagtgactgttaacagttgattctcagaaactcgtgcttanaacactgaatttctatttatgcaaattctgatcaggatgttttaac

SEQ ID NO: 16631 - DNA, 3219 bp, Arabidopsis thaliana landsberg
aaaacaaaaaccctaaatctaaatctattcccatttgttttttcttcttcttcgacctcttttcttaagaattttggatctagtggctcctctctatatcattatatacactcttgatttatttactccagatcttagggaatgcttcttcctcgatcatttgatcttctcatttgaattatttttcttttatgtcagctatttatgttcgatgagaagactatgcgatggtggttgtgcgtcgatgatgatggtagagctccgatattgatggtggcttgtaaattgtcttggattgtttgttatgtgtagcaataatatgtaaattattttcggttaaccgaataaaccgaaaaataataagtattcagttcaattcggaacacaatttttagtccataaccgaaccgaaaaacccgagaaccgaaccgacctgaaccgaatttttgttcggttcaattcgggaaaattttaaaaaaccgaaaaaaccgaaaaaccgagtaaaccgaaccgtttaaaccgatataaccgaacccccaggcctagtttttttttagaagaagcattataatagcttataagaatggcaggttcaaaacaaatgtttataagcttttataagatgtttataaattttctcatataacctttttatgataaaatttaataacataagatttttttattagatgtaaagaagtgcttttgtattacttaataagttttataaaccttaatatttttaatagatggttataagcttttatgagatgttataaatattttatcggatgtatatatgttttttataagatgtttataagcttttataatatgtctataagatgtcttttatcagatgtttataagctttttataagatgtttgtattttataagcttttattatctgcatatacttttttggggacgatttgtgccgaaaaatcctttttcaatttcgatattgtatgtttagtccctacaaaatcaatcagacaagatattttctttaggacaataaccaaatttttgctcaactattcacgtattgcactaattacttgcctaaacatataaattgttaagtactaccctcataaattgcacacattaatcccttgaaactctactaattcaatattacacgaaataatatttcctaaaaaatccgaacaaccaaataactaaccatatctttacgtacttcattccaaaatctctaaatatttactacattcttaccaaatattcatatttcgatatcacatttctataagttaaacgattattaatcatgcattaattccataaaccttaaaagaaccctcaatatatcatataatcttacatatggtatagtcaatatatttttacacattctacaaatcatcatcaattcgaaattccaatatatcacctcgaaaattaattttcgccaactataatattatccaaattgttatggattattaccttccaaatattttatccgatcgaatcatctattctctccactcctcattcatagcaattctgtttcctgatttacatatatcaccttaactacaaaatcttttaacattcgcttgccagtcaagacataaactaaatcacgcaatattccatcttctaaaccatccaaatcattttgttttgaatgtacaagcgtaaaaataagggcaaatgcatctaccatatctcgacagtttgattcagaatcaaatcaaaatctaaatacggcatttcgattattattttgcacttatgatactcaagcatattcctattctaaaccattcagaatcattatgtttctaaagaatttacgctctaaatctttgcaaataaatgtttaaagattcactcggctactataaatacgcttctcatatcatttcatttcatcatcactcacaccgcaaacgagagatcaaagcaattatacattttgagaaatggctgctacattcgcataccttaaagacgtgaggccttacaaaaacgcatggagagtccaggtcaagattcttcactcttggaagcagtacacaagcaacacctgtgaaaccattgagttggtcatctctgatgaatatgtaagaactactgttatctatgcaaaatttacgtttacatatacacaagtgctaatatagatttctgttgtctttgtcataagggaaaaaaatgcatgctactgtgaagaaggaattggtttctaagtttgttcacaagcttattgttggagaatgaatattcatagagacttttggtcttacctatgcgtctggccagtttcgtcccacaaaccatctttacaagatggggtttcaggctagaactgaggtgatgggttgtgagtctatctctgataccaactttctgtgtgtggctaagttttccaaaatctagagtggtgagcttaaccctcatatgttggttggtgagtggtttagtttctatataatatgattgatctttttccttctaagcgctatcaccaaaagaggaacttatgttttacgaataagcaggtgtgaaaactttatccaactcttttgatacatctcaagttcatgtcaatcctgacttccttgaagttgaagctttcggtcaatcgtaaatgcttatactctcaacacatgatacttttgtcctaacttcttaatgtgctattgacctataatttgacttatgcagactaccagctgatagtactatttgcattttccgtgcaagtcccacggtttgaaatggtggcggttaaaaagattgattacaatgagttttcaaggaataacattgcagatcagatcaactcaatgcaggtttgttttaaattttcactttgtttcttcaacacaataagactataactaatatcatatcaaattttatataggttggcaaagttagagttatttgcacaatctatgtaatagatacagattgggcttggtattacatcagctgtaagacatgtaataagaaggtcaatcatatacatgctggtgttaatggtgttaacaacaagaggaagaagcctagattctggtgtgacacatgaaagtctgttgtcacaaatgcggtctctaggtaaatatgattaaaaaaatatttatagagtaagctattacattcacctcagtcatgatttatgcaaaggttatggataacattggtgaagccaaattgctattgtttgattcaatttgct

SEQ ID NO: 16632 - DNA, 2299 bp, Arabidopsis thaliana landsberg
gagtccatagaaaccacccttggactactaccttcctctgtgatgggtctttgatgtttggtcctaaccccaccagggttcttggatggtatggctttcctattgcgactaacatttgatttaacatcccgcttatgtcttttagatgccaattgcatctggaatgggaaacatccaccaccaaacatgtcattcttgaaaattagaccctcactagccaacattagaatattactgaccctctcatcttcctcatcatcagaccacaacaaatcttcctccggatccatcataagatcatgacaaataatggtagcaacacgaatctgcaagagataacgaacataataatataagacgtgaataacttgattaaatagaaaatacttagtgaataacaacacagttatcgccatcaacgatgttaaacgataacaagtttaatcgataagagtattacagaacattttgcatccaacaccttagcattctcgagcttgaaagcgacggactctcgaggggcctcttcaacatcgtcttctgcgccttcatgtgtcagactcaattgtctcatcaattacaagcccttcttgaatagattgagctgcctgtaagataaccaattgtcgagcgtacaacaacccctgaacaacgaaacacgtacttgctaattgttcaatttccctctcttttattgacttaatcatcatctcgaaagtggaacagccccagggataagcaagaaatgcacccacgttgttagccattttagcgtgcgcctaaacaattttaggataatgagaggtaacgacaaggaaaccgtcgacgatagctaagcaagcacatcagatcctcataccggaatttgagacattctttctcttcaacatcatactaacccagtccacggtaacatcttcttcaagcccaaacaacttactgtaaaatgggatcgtcttctccgtcgtgcctttcttcttcttcatcttcaagctcgaatacttcccatggggtaatccaataacgatattaaattctctcaaagaaaaacgaataggaatacccgcaaataacacccaaattttgtttggcttcgccacctccaactgtctacccaaaatgaaaattccaaagctagtggacaaggcaggttggttaggaaactttaacaggcgaccaaaaagagatcgagaaaggtactacagttcaccattgtcgagggcgttgaagataccgcattgagtattcatcttctaataaacatcaactttctcgccgcgaggttcttcgccaaaagctaacagacgtggagggagaggaatcgaaggcatcgtttctagaaaaaaggataaaccctagtaaaacaacacaagagatgtagtcgaaataaaaatcaaagagaaaaaatttagattgattaccagaacaagtcgtgaggaacaaaacccagatttgagagataaactcttgctcgaaaaacagaaatatataatacaagaattttggggagtcgtttcttatttccttctgcctcaatacgctgtctctcatcttcatataggatcgaaaaagatgactgttcgttaaccgggaaagaaaaaaaacaaatataaaatacactattcccaaaacaatatctacataaaatcttctcataccgtctacaataatatcgctctacactctataattgactaaattgataacatagggatacatgcgtaaaaaaaatgttaactgtagtgatggaacactggaaattgaagagagttaattatcaagtcttctaagcatatcgagtgatattatccattacttatttatatttgtattataaataaaatatttccccaattatataatgccataatatcaaatgtgttgcgcatcagtctctcaaaagttctctctcttacatacttttttattacttttaattatttaaattctaaacaacttaataaaaattcacgataggaaatgctcgatacaaaaccaattcaagataacctttggaatttccttcgatcttcaatcacccacactctatattatcaacaaaacacacacttcatcgtcatcgacaaaaaaaaacaattcagttttaggtttaagaagacatgggagatcgattcggattcctggggagagagagcaatggatatcgagagagatgcttgattaatcctccatagtctagcatttttgtcatataccccgcgattattgcatgaaaataacacaatgagaggtacgtgatacttagttaggcatgctaagacaattttgctcgggtttt

SEQ ID NO: 16633 - DNA, 1326 bp, Arabidopsis thaliana landsberg
ctatgacgttaccttctgtgattaatctctctggtttagttctctattgatcgtagcatttatgtcgctcgttcgtactgcgacgatcgctcttcttctaatcgcgtttctgcaaaacgctaacgctgtgaaaaatctgcaaagtattgttgcgtatcacggtgcggttgcgacagacgatggacggtgttctgcaatagggacgaatgttcttcgtcaaggaggaaacgcgattgatgcgtcggtggctgctgctctttgtttgggcgttgtcagtcccgcatctagcggtataggcggtggagcgtttacaatgattaagctagctaatggcacggaagttgcttatgattccagagaaaccgctcctctaagcgccactgaggtaagtaacacgttttatagtaataacgtctttctttttactcttataaaaatgagcattttggataacgtttttgagttaagaacagtgttttttgaatcaaagatattttttggctgtttctcttgatgtaggatatgtatggtgataatcctgagcgaaagaagaaaggatccttgtcagtaggcgttcccggggaagtcgcgggtctatacacggcttggacacaacacgggaagttaccgtggaagcagttagtagaacctgctgagaaacttgcagctgaaggattcaagatttcaaaatatctctatatgcagatgaatgtgactagaagcgatatcttagcggacaaaggtctctctgacctatttgtttcaaatggagagctcaagaaaccaggggcgatttgccgtaacccgaaattggctgatacactaagccaaatcgctgaatacggtccaaaagcgttttacaatggcacggttgggtttaacctagtgagtgatatacaaaaagccggaggaataataactttgaaagatttgcagaattacaacgttaaggttaaagaaccattatctacggagattcttggataccgattactcggcatgcctcctccttcatctggtggccctgcaatgatgcttgtaagtaaagtatttttgtgaaaatttcacatttcatcaaacctaggtttatcttttggagtttctcttgtgttgcagattttgaacattcttgctcaatatggtattccatcgggtgtttccggccccctcggtgttcatcgactagttgaggctctcaaacatgcattcgcggtaagaatgaacctcggggatccagatttcgtccctgatgttaccgaggttgtttcagatatgttatttctaaagtttgcacatgacttgaagagcaagatacatgatgagaag

SEQ ID NO: 16634 - DNA, 2627 bp, Arabidopsis thaliana landsberg
tcatatctatttttttctcatagtttttgttcaaattgatttgtgcatgtttaaggagtggtaatgagatagatagaaatagtttggaccatgaagacgaagagtttaagttttcctaaaaaaatattcatatggaagtcaacttcatagtaaacttcaacgtaagaatgtcaacttcatagtaaaacagaaaaattatctgcatctattcacgtactcacttatgggaaaatgaaccaaaccttgcataatgtatattaacatgttgaatatttaactttgctaaattgtatcatattggaaaaaatatacttttatattttttattaatcagcttctgttattagtacacatctttgcagccattgagtaaaaagaaacgtatacactttttcttgacgtaattaaacagagggaatgtgacattattaggcactttgtgagaatctttttacgtttgaggcacttgtgagagagagggcactttgccatctttttttagaggagattggaccaatttgcccctgaagtgatgaaaacacaataatttttaaacttattcttaatgagatcgtgtgggtgagaaactaattttttttttttataatcatttttcctttccatattcttttgtttttcatcattttcaattcttctttcaaatcatagtcgttctcaataattcttacaaaattatgaaaattctgaggttatctcaaaattcacaatcacaatctatgtttaccctaaatttcctttatttttttagttttgtattcttttctccattctccatcatcaaatccatttcattatctgcaacctccatcaatgaacgactgtgaccaacaaaaaaagtaacatcatcgatttctccttttcgagacgaagaagaaggagatccttactctctgctaccgaactccctcttcccttaatcttcctctttttctggttcctgctcttctctcttgtcttacttacggtttctggtttcgttgtttttttttggtaaaaggtttctatggttttgaatcataaaggccaatggtacatgtgattcgttgattctagcttaggctttagattgtaaatctttaaacttttttttttgttatgggttctagattttatgattttatccttcaatttaaatttatttttgttagatctgttgaatttattgccttgtttttgaattgaaaaatgtttggatgtcatttgcgtagacggaaagtgattggacgcataaggctgggtatgtggtggttatgcaagaagattggttgatgtttatgagctttttttgaaactttggtccatgaggctgcggtggccgccgtgagctccagtgtcttgtctggcaactccatacttatgtcgactcatggatgtcaagaaaagtttatgagaaaacacgaaaatgtatatccatttgttcggcgctaggtggatacaccttcatttcttacactatatccatttggtctatgtttcatggatacaactctacttctaaaaatcatatatgaacacgtacttgccgattgtcagctataggaatccgtccattactcttcgaagatatgttatccaactaatgaagtattcttttatttgattttggtgaacaatgtttagatttggtgaacaatgtttagatttggtgttattcatctttcgtgtatttgtttgtgcagataaaacattttaatgtaaaaactgtaaaatataggatcattcctatggtaatattcatatgattatattcaaaaatggttcatacgagtgtgtaaaccctctacccttaacgctttacactaaaccctaatttacttaccctaaaattaaacccaaaccctaccatgatccttctacactaaatctaataccataaaacaaaactctgaaccataaaaaaaatgataatgttaccaaccaataaaacacatttgaagcaaatcaaagacatagttgttcattgatgactatccaagcggtttagtccatgtggtaatctagtgactgatgaggtcgtttcatttcaatacacaagtttatacatgaatgataattaccaattcaaacaccaattcaaagtacatcgtccatttttctttgaccatttattcacttgtatatgaaaactcccaacattataaccaaaattgtctactaatcctagatataacaagaaacagatatacttatatagtgtataaaaggagcataatatcggtgtttgcgtctgaatggacagatttccttagatgacattaacaagcaggcgtccagctgaccaaatatgtttgtactatcatctatggtcaccaatcatttgaatcaagttgaattcatggatgcacagtacgtcagtttgtgatgtaaattaatgtaatgcaaagaatcatctgcaaaattgaatcaaagagaatataagatcaacacaaaaccaagtgtttggggaatcggatgcatcataacaagcgaatatctactcaaacaagtttaaactcaattcaccataacattcacacccaataaaaaaaaaactcaatatgaataaatcagtgtggaaagaacctgatacaaagctgcttcattaatgaaaaaattttcaaacactt

SEQ ID NO: 16635 - DNA, 995 bp, Arabidopsis thaliana landsberg
tatcttcatgaaacactaggtgaacgtggatgcattgatatgggtattccgagagcaactaagctgaatgaactgataaagagatcacgaatacgaaagcatagacgaagggatttaaatcgagttgaagaagaactgtaaacaaagaggcaagcaaggcaggaaacagaacgaatgtcgctttgtggaaggggaaaaatgatttttataagcagaaattttcatctaaagagaaatggtcacaaatccgcgtcgctaagccaataatgcaaggtcgtacggaggtttggttttcaaacgctacaccaaagtacgcctttctaacttggttggttgttaaaaacatagttgcaacaggggaaagaatggttaaatggaagcaaaatatggacacaagctgcatcttttgccaagaacctatggagacgagggatcacctcttcttcctatgcccttattcgagaaaagtgtggaaagaactgatgagtgggcttcttctagacaatttctaggcaagatggcgagatgttatgcggattcttgcgagtaacaacttggacaacacgaaacgattcataattgggtatgtgttccagaatgttatacacactttttggggggaaagaaacagcaggaaacatggagagacaccatcaccgacagagaagattgtgaagatgatagataagaacattcgcaatcgcttgagtacactgacaagaggaggagaggagagatatgcgggagggcttcaaatgtggtttgtgtcaatactacacactagatagaaaaactcttttgaaagtttttaagaaaagtttgcactcgatgtataaatttttattatttttttgaatataatttaacattaaattaaaaaaaaaaaaaggaaaacagagaatttatgctgctaaagaaatatgaagacaaaaaaccgcgtaagtgtcgtttcgaagacgcaacttattggtgttttaagatttctaattggcccc

SEQ ID NO: 16636 - DNA, 1087 bp, Arabidopsis thaliana landsberg
agagttatgtattctgttcgtgatccaagtctccgtaagagcggagttggtaatatatttattaaggtacatatattaaatctctttttcctattgtccaagtttgaacttctatgcagagatggaaagaaaccttggcttgtttaatatcctatctcaaagtttgtttgtttattgacatggtttattatctgtgtctcagaatcttgacaaatcaattgatcacaaagcacttcacgagacattttcagcctttggtcccattctatcttgcaaagtggccgttgatccctctggtcagtcgaaaggctatgggtttgtgcagtacgacactgatgaagcagctcagggagccattgataaactgaatggaatgcttcttaacgataagcaagtttatgttggaccctttgttcacaagctgcagagagatccttcgggtgagaaagttaagttcactaatgtttatgtcaaaaatctctccgagtccttgagtgatgaagagcttaacaaagtttttggagagttcggagtgactactagttgtgttatcatgagagatggtgaaggaaagtctaaaggctttggatttgtcaattttgagaattctgatgatgcagccagagctgttgacgctctaaatggaaagacctttgacgacaaggagtggtttgttgggaaggcccaaaagaagtccgagagggaaactgaactcaaacaaaagtttgagcaaagtttgaaggaggctgcagacaagtctcaggggtcgaacttatatgttaagaacttggatgagagcgtcacagatgataagctcagagaacattttgctccctttggaactattacatcatgcaaggtccgtgactgatacaataaaaagcgctgcttgttactatcttcagcagatttgcattaaaatgtattacatttgaacgtgacaggtgatgcgtgaccccagtggagtgagtagaggatctggatttgtcgcattttcaactcctgaggaagcaactagagctgtaagtgactagaatataaagaagacatgtcaaattttggtgatctcctattctcggaaggatct

SEQ ID NO: 16637 - DNA, 1354 bp, Arabidopsis thaliana landsberg
taaacccggatccaaatttgaggtatggatgatggcacttctggttaatattgctatcaaaactagcgagatttgaaacctttttcaatatttgaaaatgcagaccgagagcacaagatgttatgcatcatccattgttctggaactctgacatgaggctgtcttttcttcgggatgcaagcgatagagtcgaattggaaaaccgagaagaaggctcacagctcttggctgcacttgaaagcacagcagcagttactttaaacgggcggtgggatgagaaactggatagcatattcctagacaatatcgggcgttacaggcgttacaagtttgacagcatccgcgatttgttacgggtcataaggaacaaattgaaccactatagagagcttccaaaagaattacaggaactacttgggagtgtacctgaagggtttgagaggtacttctctagcaggttcccaaaactgttgattcaggtttatacagttttatttgattactgtaacaatgaagagttctttttcaagtactctaagaccactgtattctaggattcttttcttctgttggctctctctgtataatagggatttactaataaagagctacaattgatctgatcaaagaaacatttgttgctgatatgttattgtaactcttaaatactttagttttatagtaattaactgttatgggaaaacaaaactattatgtttcagccatatatttaaaattacccgaaccggagccgacccgaaaaattggaccggaaaccgaacccgaacacgaagatttaccctattgggtcctaaattcccctacccgaacccgatccgaacccgaaaatacccgaatattgaattcaaaaatctaaattttacccgaaacccgaaattttatccgaaaatccgggtatttaccccaaaaatctggatatttacccaaaaattcagatattgggcctgaaaatctatatccgaaccgatccgaaccgaaaccaaactgatattttggatttaccctattggatcctaaacttctcaatccgaaagacccgtacccgattgggttttacccgaacctgacccgcttacccgaattcccacccctattgaaaatcatacatatatttatggttttttctaactaacttactattttttttttttgatgttgtttatctagcaaaccagcataaccatttaaaaataatgttttaaagctatataatgattacaaatgaaaaataatgttttatctaacaaatgaaaataatgataactcaacataacatttttcttaaactaataaaagttttaagcatatatttgtagttaatacttaaagtttg

SEQ ID NO: 16638 - DNA, 1428 bp, Arabidopsis thaliana landsberg
cattttcatatattgaatgctgtttctcggttcaagaactatatttaatagcagtcttcagtttttttctttctatttgctagtctgtgttcagatgctgaataccttttccaagttgtacgaggtgcgatccctcatgcgtattttgagtcgagttcggctatttcaacagctgaaattgctgtgcacgttcttgattacctttacaagaggctagatgaagtatgtcttgtacaaggtggtgagcttgtggccgtttttttgtgttctttttttttcttttttcctttgttgttgctcacttctctaattggattattgaaatatttggaccaggtggaaggatttcacatgttattgcaaatctttgctggaagtttattgccatatgtagagagtttggattcatggttgtttgagggaactcttgatgatccttttgaagaggtaggtgttcttggggttttatttatgttccatgggcgagaaactattttcctctatctttttgatgccaacatcaaagtacattctttacaaggcgagcaaattgaaagtttgatgatgatgaattccttagttgaggtgaagattaacttttgtttcctcgcagttgttctttacagccaaccaatcggtctcggttagcgatgcagagttttgggagaaaagctatctgttgacgagggtgctgggtccaaaatcaaatgtaacttcactaaacgaaaagaaagtaatgagtggacatgacgccaactcatctttagcttctgacaaagacaaagagcaaaatactcgggtgttatgtcccttattcattaaagacatctgtaagtctattgtttctgctggaaagtcactgcagctgatgcagcatattccttccacgtcttcagaaaattctggaaagactcagttccatgggcgaaatggttatgggaaatctagcgttggtagtctcctgactaaaatgagcagctgtagtagcactgcggacttatccttgtctgaagtcttttgtttgacactcgccggccttataggccatggtgatcatgtctctagatatctgtggaaagatgaggcggatgagtgggagatttctccaactttagcatcatatataagtggagagcttgtgaatgacatggataataaagatcttccagttctcacatgctcagagcgaatgtggtataagttgttggtcggtgctgtgcaagagaaaagagctatggaggccaaatcagaactccagagtgcatgctatgctacaggtgttaaggatggaaatagtggtctcactgcccaaaaggcgttgcaggggttattctgtaaaaaaaaccttgttgtttcagtatctaaaatggataatgagaggaatagaaatgcttggaatgtcttgaacttgtcgcaaagctattgtct

SEQ ID NO: 16639 - DNA, 565 bp, Arabidopsis thaliana landsberg
gaacacgatgatataaagaatctaacttaaaagcaaaagcacaagataatcacaactcaaagcaatgtagtgttctgaagtcaagagtctctctcacttgtagaggtgttccatgacactcttcagcctgaccacatcaacgcctacaatctctgctttcttcacgccacctttgaagaattgcagtgttggctgcattcatcaaattatcataatgctccattagatggatctcaaacattgataatattagagttcatatagatgcaaagctagctcgtgcttgatcctaaaatgtaaagtattttttgaaaggaacagaggatgttaccacagcagatacatttaacttcccaatagcatttgatagaccgccctgcaaatatgtaataagagatatctttgtcaacggagcttacaatgatactcataacaagacagcttatttgtgtgtggctcaaccacaaaacttctctactaagtgacttatgccgctcttgagaatgtgatttcagtttccagctacaggatgcttcatgtcgcaacatttttcagactttacatt

SEQ ID NO: 16640 - DNA, 629 bp, Arabidopsis thaliana landsberg
  unsure (1)..(629): unsure at all n locations
aatgtaatcctcttacaaccaacctctaatcgatttcatccctttctgggtccagatccgagggatcccatatcattaccttaaccgtgaagtcatctctcacatagggagatcgcttggaaacctcctcgatgtggactatgatgcagaaacggcggctcgggtggaatacgtcagagtccgtattgactgggacattcaactccccctgcccttctaaaggaattttcagtttcaggctggagacaacactctgctcaggtttcggtacgaaaagctgagaggcttctgtgaagtctgtggaatgctcacccatgacaaagacgcttgtgtgatacagaatggtggggaggaacaacactctgagggtgacagtgatgatgaaaaccttccacctgcggggcatcaaaattagggtgttatcattcgcgaaatataaagatgatgaggagaatggaggtcctgaccgtgaagaccaaaatgctgaggtagaagaagatgaaatggatgtgcctcatgaaactttggcagagtttcaggatatggaggcagcacgttactctatgctccagggacagaaggaaaccagngagctttttaatcccattacttcctttgagaatggtaca

SEQ ID NO: 16641 - DNA, 673 bp, Arabidopsis thaliana landsberg
gattttgttcttcttctaccaaactacgtacacaaagcaattgcaggtatattattacacaattttcttttatgcttaactatatatttatttatatctaaacattttatctttctctacgcagctattattgtgttctttcgatatttatgcacaagaacacttactccataagggatacaaaggttggaacaaaatataccggtgatcttatgtaatcttgagaagatttttccatcgtctttctttgatgtgatggaacatattccaattcatctcccacaagaattagcacttggcggtcccgttcaatatcgatggatgtatccgttcgagcgttacatgagtactcttaagaagaaagtgaaaaatttggcaagagtcgaagattctattgttgcacaatgcatcaacgaagaaacctcacacttctccgaatattattttccaaaacacgtccaaacaaagatgcggaaacatgctcgacatgatgacggtggagagagatctttttacccggttctagacccaaaattatttgccaaagttggtcgattaagtgggaaatcgaagagccgttgcttacagtggaggagcataacacttgacatgtacattatactaattgtgaagagcttaagattatgaaggtacaaattttagctttaacatg

SEQ ID NO: 16642 - DNA, 1017 bp, Arabidopsis thaliana landsberg
  unsure (1)..(1017): unsure at all n locations
tgcccgagctacaagcgggataatcgtcgcgacatacatacctatcaatccatccatcaaaccagtcaataaaaatagcaaatcagctcaccgttccaatacctgactcgaatccgcgagatcgataattgaaagtcgcctagagggagggtggataggcggaaactaaaatttacaaactttaagcaaacttcaaaacggggttagcattagaataaaaaaactaggtccaggagagagggcaaaaacaaatcaaccaagaaataaagcggatgacacggtgatttgttttaccgaggttcggttccaaataacctagtccctgttgaggtggtcacaaagaccgggtctctttcaaccctttccctctctcaaacggtcacctagacctagtgaggtttctccttaatcaaatgggtcacttagacccacaaggaccactacaaccttattgtctcttgctctgattacaagtcacttagagaacaagaatgaggaagaagaaagcgatccaagaacaagagctcaaagaacacgaacaaaactctctctctagtcactaggtgtatggagtgaatttaggacttagagaggctttgattttttgaattgtgtcttctattgattgcactagctcttgtattgaatgagatgtctgaaaaacttggatgcttggagtggtggtggttgggggtatttatagccctcaaccaccacatagccgttagggaggctgtgtgtcgatgntggcaccggacggtccggtgcgccagccacgtcacccaaccgttagggttctgaagattctgaccgttgaagcgctgaatttatgtcgcaccggacagtccggtgcggcatcggacatgtgctgttcactgtctggtgcacctctgacgcctgctctgacttctgcgcgcactgttcacgcttttgtagacgactgttgcgctggatatccattcgtccgctagtacaccggacagtctggtggcacaccggacggtccagtgaattata

SEQ ID NO: 16643 - DNA, 615 bp, Arabidopsis thaliana landsberg
ggagtcaaaccactcctccggggcctcgggggctacacccggctggtgcgctcgcgcgcacccaccggaacgaaacacaaccgagaaaggccggtccccttgcaaacaagtgcgacaaaagcctccaagcgagtactaacactcccttcgaggctcgggggctactgttggggaccataattaggggtacccccaagactcctaaatctcagctggtaacccccatcagcacaaagctgcaaaggcctgatgggcacgattaaggtcaaggctcagtccactcaagggacacaatctcgcctcgcccgagcccagcctcgggcaaaggcagccgaccccggaggattcacgtctcgcccgagggccccctcaagcaacggacacacctagggctcgcccaaggcccagtcttcgcagagaagcaaccttggctagatcgccacgccaaccgaccatatcgcaggagcatttaatgcaaggatggcctgacaccttatcctgacgcgcgctcttcagtcgacagagccgatgtgaccgcagtcacttcgccgctccactgaccgacctgacaagaaaacagcgccgcctgcgtcactccgactgctgtgccactcg

SEQ ID NO: 16644 - DNA, 880 bp, Arabidopsis thaliana landsberg
ctctcgtcgttttttggattccgttattgatatagtcgaaaagcacgaaagttgttttggtagaaaacttttccgaggaaaattttgacgcataggaggttcccctcttctagtccccgagggaggttcgatttttgctgaggcaaggccgatccttacttgacggttagactttatttatacacgtaaagaaagcgaggtacatgaacgacttgaaacattttaagggtagaagcgacgtagctgttggatgttccaagcgttgctatagacttcgcctcgatcgttggccagcttgtatgtcccgggcttcaaaatcttggcgatgatgaacgacacttcccagggaggagtaagcttgtggcgccctcggccatcttgtcgcagccgaagtaccaagtctcctacttggaagcctcggggccgaacccttcgggcgtggtagcgtcgcagagactgctgataccgcgccgagtgtagtaaggctacgtcccgagcctcttccaactggtccaatgaatcctctcggctggtttggttgttttggtcatcgtatgcctttgcccttggggaaccgtattctaagtccgtgggtaggatggcctcagccccatagaccaggaaaaacagtgagaaacccgtggcttggctcggtgttgtcctcagactcaaagcaccgagggtagctcttttatccaccgcttgccaaacttgttgagttcgttgtagatccttggttttagtccctgcaaaatcatgtcattggcgcgctccacctgtccatttgtcattgggtgagctacggcggcccagtccacacggatgtggtggtctgcgcagaactctaggaacttttcccagtgaattgcgtgccattgtc

SEQ ID NO: 16645 - DNA, 809 bp, Arabidopsis thaliana landsberg
  unsure (1)..(809): unsure at all n locations
tatgaacatatagtacctcataaggacttttgctttctgtcagggcagtggtaggcaggagattgatgagaaagttggcagtgaagaacccttcaacccaatacttcagtggcattcggctgtgacacatcatagccagagctaactcaataaggtgcctatgctttctttctgctaatccattttgttgtggtgtgtatggacaagagataagttgttgaataccatgttgttgtagatgattcaaaaacctagcacttgtgaattctcctccaccatcacattgaaaactgccaattttgttttgaaactgattttccactagagcttggaatatggtgaatatcttaaagaaatctgacttaaactttagtggataaaaccaacaaaaccttgagtaattgtctacaaaaatggcataataactaaagccttgcactgactttattggtgcaggaccccacagatcacaatgtatcttctgaagaggcttggaaatagtagagcaagagctagaaaatggtaatcttgaactttttccatactgacatgcttcacagattcccttagaacttttactgatgttgactgctttattcttgtgtaggagctgaaggatttgttgatttggatgtcccaacctcatatgccagacgtcttcagatgttgtttgttgacgagaggaatagaaggcatgaacagatgaatccttcagaacatacagaccattaaagttgtttcctgagccagaagcttctntgtggccttatcagtaacacggacataatcacagtcaaaatcaacagagc

SEQ ID NO: 16646 - DNA, 2045 bp, Arabidopsis thaliana landsberg
aggcaaaggtagtctaacaatcttccaagcaaaagagtccatcagtagaagcagcagtgacaaaaaaagcaagaagccccaaattaatcccatatctgattctgcatattgcaaaaaaaggcaatgtcaaaacaaatgaaagtacttgttactacacctttcatacacattctagtggataaaacgaaacatagagatggtggtaaatgatgcttaagagtagagaacagtctgtcataagactaacaactagaaagaatctctagggaacaaaacccagatcctaaatttattaactcgatactaaacttcatctacacacacattctagatggtttatcccaactccaagtggatcaatggaaacagatatattggtcaaatgatgcttcagagcagtgtcataatgattctgaaacaatctgctatgatagtaatcaaatgactcatagcctcctttcacttgatacctacacttcacttacatacacattctagtgggttcaacaaaaagtagagtcatggttaaaataaaacgtgcctgtgctttttgcgacctcttggaaactttcctagcttctgtgcagtagtttcggtaaccacattcaaagcataatccccatcgctctcttcgccttcactcgacgaaatagcataagtagcagcaaatatgtcaccggtatagaaatcaaatgtatcctaaggcaaaaagaaaagaaagaacaatataaactttgatgctagacatggttagtcaaaaaccaaaagtatgtcaaagaatgcaaataaatctgaaatggattttgaatacttacatcatcaaatgctttaaccgagacagagctatgtctctgcaagctcggcgcactgaactgcaatgaatccaaaatataaattagaaacgagaagaagctatcaaacacgagagtttatggattcgaagtttgtaaatacagaacgttgaacgcttctgccttctgccataggtatcatcaatcaatcaatctccggtgaagagaaaatttcggtaccttgaaagaagagggagatccagattcgatgcgataacgtgaatttgaaaggggaggaatcgattcaagagatcgaaacgggtttgggtaatgaaatcggtaagaagtcggagttaacaaggaacatctcatcgcatcgtttccggggacagtacagaaggttggtgatgaagagtaattgaatttagtgagagacgaagaagaaagaatgtggagaaacgtaaatggcgtcgttgatgaagaagaaacgatttgggtcaagctctctgtgggttatgtgattggtgactccggattttttatgtcgcaaacaaaaatatctgtatgaaattgaaatccaacacatttattccctcattattcattagtctctaatatttggttagatgtcgctcttttttcggtagatgtcggtttaaggtcggcaatgtttaagtagaggctatttttgtcattcacgctacatctctatttcggtccatatggaaagcatcttggcgcgacaaaacaatccaaagcacaaacataacaacaagaacaataactatgagagtacacataaaatccaaactattatctttatatcaactcatcctctaattaggttatctaagtagtctctcatatatataggcattgttgggtaaacttcaaagttaacttaaagcccaagtagtctttaatgaggaggttaaagaataagaaaggcctagaagtttctattaggtttaggagttatctaaatcctagttgtaataggattagcaaagttatgccttctataaatacatctcttaagttgagttgtaaccttaagagttgtgagaacattaagagagctttggtgtttagtttttgagagagttttctaatcatcaataaaagagagttattcttttaaagcttgttcttgtgttcttaagaaactttagtcatgtattgtgaacaaatgtgattaacctatagagttgttgtaatttgaagcaactcccctcttttacattttcatggaaa

SEQ ID NO: 16647 - DNA, 785 bp, Arabidopsis thaliana landsberg
  unsure (1)..(785): unsure at all n locations
ttagtcccttcccttcttgagatggaaatttggaaagagtttggcttaaaattcaacaatggtaggatttggttgtttgctctaatgccatttcattttgaaaacaaaaatgaaaaacaaaacaacgtagctttggttcatacagcaatccgggtgataaaagaaaccaaacataagctgataagcctggaaacctgaatagagaatgaataaaccagtagttacagaacaacagaaagcaagcttccttattattttacttcaaccatcttacaacactagtccagtcaccaacatcaaacatggaacatcggttttaataatttgaacttaaaaaggttttgggaatcgagcaacaggagtgcacttaaggggatgagccaaggtcaggttcagtcctccaatggcctctttcatgtcaaccttttctccattgattctccagtcaaagcattgcaccatcattccaatcgcggttcctacaaagatataagctacatttgctcctgggcagcctctccttccactaccgaaagcgatgtacttgagggcttgctctcttatctcgtcctcttgcattaatcttgaagaagctaaaaacctctccggcttgaactcctcagggtcttcccagacatttnggatctctcatcacagcataaccattaacaacaaggggttgtgctcgctggtatgtagaaacctttgaccttacacccttcttggaactcccttaccatgagaaggcgtaggccgggtgcaatctaagcccttctttgactacc

SEQ ID NO: 16648 - DNA, 2477 bp, Arabidopsis thaliana landsberg
ctcctgtaggctcacactggaacaaagcatcttgctttcctttcagactcagataaaacggtaagcctacgctcagcgttaaacagagaatctggttgagttttgctgaacagaacaaagacctttcctttgtgagcatctggtaagttcttaaccccaacaatctccaagataacttcaatgactttcacctctggatattggattacattctgggactcttcctctttcgcaattgatttctttccagaacaaacataaggagaagttgtgactggctttggggtattaccacggttcatagcaccggctttccaataccttcgaccaaatgtttcttcccattgagcagtagttccagagaaaccagtatcaagcttcttacctttgctacggtcagagtctgtatcatcatgctccaagaccttaccaatcatcttagtcaaatcattgcaataagagatagcatgaagctgatgtgtgtgccagataagatcaatatcgtaagtcggaacacagaaaagtttgatcgatctttctcggttacccttgatcaagtagagaaatgctttgtatctagccacagcttcttgcagaaagacgtcattatctacatgagctcttgaaacctgcaacaaagatacacaaacaaaatctattacaaaaccttgcaacaaagtggtttgagacaagaagctgaccatgatgttacctggtagaaaaatgggctttgtctcttgacagctaaaacaagatcataagtggtacatttctcaagagctgagacatctgctggctctgagattgcattggcaaaatcaaggtcataaggctccgtaggatacaatcttttccatagagtttcagtttgtgatttgcagtttccatttacggaagatacaacgccagaattgtccagaactctcccatagaattgctcacaatcagtcttatacctcacctgaaatgattaccaaaacattttgagctttgtatacaatctaaagaagaagaatataatcggattcggatatagatataccggattaagcctgtggcaatgccaaacccattcacagtcaagaggagggactaatggtccttgacagatagaagaagactcggtgtattgagcaagcaagggaagccaataagcattgtatctacagatacaatcacccaaatttgagagttttgaaacaaaattctttattgcgatggaaagaacacaaaaccaggattaaaaacgaattggtgatattgatttaaacctgtagatggctctttggagtgcagggccatcgtagagacaacggttccgatcaacagctccgaggaagagaaggtgtttcttggctgtaacaaagaggaaatttctgtctcaccaagtttgttgcagaaccgtttgaaggagctgaatcacataatttgaggagtccgggtcaagcgtagagtctgcaagagcgtaagctttgaggaaaacgcttcaaaagatctttgtatggaaatggaggcaagagagatagagacagaggccgagagataatattaaatattaggataaaagaaagggatcggcgtgtgtttttacgggtcgggttagtgatcggctcggatcggctgcgaagagtactgatattaacgattttaccctttatttatttttatttcttgtaacgtgtttttatcaaacggcttaaatggcttgtaagtttactgtctctcattctctcttaatagtatagattatattatcggatccaagcccaatatagttgaagacttgaagctatcatggtctggacgaataagccaaactaaatgtaccgaatcgaatcaaagtgaaaattgaaaaataatcgaatggatactagattctataatcaaaagaaccaaaactgaatcggtattgaatcgacatattttgagtaaccgaaaatatcctaaatataaatatattttcaaagtattagttatttctagattaaataattaaaaatacttgagatatatatataaaatagtaaaaatactggaacataacaaaaaaatatctgaaaatatccaaagaagaccgaaaaatatctaaaatatccaaaataactgaaatatccaaaaatattcaaagcaaaataaccgaatagatattaaattttcaaacaaaaaaaatccggaactgaaccgaactttcaaaataatcgaatggatactaaattttagaaccaaaaaatcgataaccgaatggatactaaactttaaaaccaaaaaatcgatatccgaatggatacaaaccaaaatcgaatggataaccgaacgcccagaacttagcattgatttattttcaaaatatgtttgaattcaaaaataaatactacaaaattgttttcttcaaaattgtaactacagattcattgtgttgttgacttttttttaatgtcggctaataaatcattgatacttggaataaaaattaaacc

SEQ ID NO: 16649 - DNA, 936 bp, Arabidopsis thaliana landsberg
agtcgagttcaccaattgaactctgttctgtttcttctcgaggtccagatatttataataatttatcggagctgaatctatgcctggaaacgaatatggagagaggatccacaatttctttggacaggagggcctatcccaagacagccatcagcctcaggcaggagatggaagctggtccggttttagaaatggtctagtcagcaaccagaggcagattgacccatcacttattgccaatctgaagacgtatagcactcaacaatccggtatgcattttgtttcctttgtgactggggcttccccaacttatgctctacatatatcatttatgttccattcatagcttagagcctagtatgctggattatgctttggttttccgagtttgaacatagcctttttgcttattccagttgatcctgagagaggacaatcttcaaattcacagcatggtttaaattttgcccagcagccaatgaggtccgattactccagaagtgtattgcgagaacaccagcaatccacaactggttacatgcatggaaaccttatgttgcaggcatctccaaatgagggaagttttgtgggagtggatgtagaatctagtagggataggttatcagggagtggattcactctagaccgtcataaaactcctatgaggtttgatatgggagaatctccggttaactatgatttctttggtggtcaacaacaattaaacaatcagctccctggcatgatccaaccttttccaaggcagcagatgacattcaatgatatgcaactactaaagcaacacgctatggctaagcaaatgcatgaatatcaaattcaacaacaacttcaaaagcaacagctagaagccaggcagctcaattctttgcattcaaacgcagtcaatggaagtctctcaagtgataaccaatcaca

SEQ ID NO: 16650 - DNA, 894 bp, Arabidopsis thaliana landsberg
atgccggtcgttattcaacacgcaaagcttcaggcacacataggaaaaaagtatgttaatgattttagaggcaacgatccagatgcttagtactgtgtaagtagatcttgctccagctacttttatgatcagcattcatgtgctggtggtgcatcactgagctcaaccataacgtagtcctgcaaatacacgcagtgtaaaatgctaagatgaagctgaaaagagacaagatatgttgcaagacgactcaaacatctacgacctgcaaaacagagaaagatatgatgcaactaattttttttaacaattttggatgtggaagtgttcctcttctgatgagttctgaagtgtgctagactgtttgacatgtaaaagatagctacaataatggtcataaatgacaaatgttcacaggagaggtgatagagtagaaagttgcaacttaccccgaattttggacaattctccacttccaaatccagattagtgtgagttgacacttcaactcctacaacaactttctccaggttctcacaatgctttaaattcaggactggtaggctggcaggcatctccgggaaaatcgttttgatattcgggcagcaatctaagcttaggtccttcagattctccaacttagcaataaagcttatagtctccaatgagagaaggtttgtaatcgacaaagtctccagtgatttcaagttctcctcatccacaccatcgaaagggtcttttatgtaaaagcacatccttagccagcaacgcttcaccaatttggccttctcaaagatagatttgaccctttcaggagtacagtccacaaaagacacaaactcaacattagctagtgctttctcgtctagcttattagtttcattgatctccaagact

SEQ ID NO: 16651 - DNA, 397 bp, Arabidopsis thaliana landsberg
  unsure (1)..(397): unsure at all n locations
aaacataccgtctgtgtgaaaccgtctgctgtaacaccatttacngttccattaaacgattgtccatccttgacatagtggaatttgatgtactgaatgccttcatgatcacctcgtatgtaaacctttgctacattatcatggttcgcaccgtcatcccaccgtttccctcccttcccaccaattgcttcgatcttttgggccattgcaaccccatctgaatctttaaacatagaattgatttgggttatattttgttttattttttcatagtcgttagtattattttatgttgggactatgaatattcaaaagaaaacaaatgttttttttatccaatcatcaactttattctaaacagaagggaagtatcgttctaagctctttggaaatttat

SEQ ID NO: 16652 - DNA, 1178 bp, Arabidopsis thaliana landsberg
ataagtactagcgaaagtacgtaaaacatgtgactactggctattgatttgattaaaaaacatatagcctttgaatgttgtgtagtatgattcagacgagagcccattgaagacatgtaccgtaggtgctgaaatacttcgttcaaagacctaaaattgtttttagttgtttgagttttgatcctttatctaaggcccaatatttttgttaagagtttttattacttaagaattttgggttagcagattttatagctataaactaattgtattctcagcttttctccctatacttttcgctcttgaaatttctattataaactttgataattctttaaattacaacatatactttcggattcatccttaaaaatacatttccaattgaaccggtcattaaaccgggattaaccacaaatccgcgtttactgtaccgcgattgtgatttacccgattaatcacctatattcgttaagaaaagggttggcttgattttatagccataaactaattgcattctcacctttccccccacactttttgctcttaaaatttccaccacaaactttgataattcttaaaattgcaacatgtattttcagattcatccttaaaaatacgtttccagttgaaccggtcattaaaccgagattaaccataaatccgcgtttactgtaccgcgattgtgatttacccaactaatcacccacaccgttaagaaaacagcgttgttttgtaagcctacaatggagcttcaagaaacaccacatggagccgatacagtcacactcacacagagaagcagtctatgtgatgaatgagagtagttctagttttttattgatttagattgtcattggaacaatcttcaacctcttttgtctattttggatgatgtattttcggaagttgattctctttaggatgttattgtttaggttgactgattgatttggagtcttatctatccttatgattaggagttttatctatttcgatttgtcattttccttaccaattaacacaacacataacatatatagatagattcacattacaaaacaaagacaaaacgacgtcgttttcttaacgggtgtgggattagtcgggtaaatcacaatagcggtacaataaacgcggattttgtggttaatctcagtttaatgacctgttcaatt

SEQ ID NO: 16653 - DNA, 577 bp, Arabidopsis thaliana landsberg
  unsure (1)..(577): unsure at all n locations
gcattgaagtgacaacactgaatacaccgaaatacaaggcacactcgggggtagactcataaataagagaggagatcaggattgataacgccaattgaagnnnnnnnnnnnnnnnnnnnnnnnnnatataatataagggtattttcgattctaaaaaaaaaagaggaaatttacaaatctaacacaatataaaattataattaagaaagtagcatcaaaacaaaaaagagatcatattctctatattttgtatattattcacaattttgccccattcctctctatttctcctactctacctctctccttccctctctccctctccctctccctctctctctctccctctctccctctctctctccctccctctctccggctctccctctctctcactctccctccctctctcttaatgtctcttacttctattttctatatgtactttctattatattctaacttttttttttttatacatttttttttttataatataactatcatctatattattacactattatctctactaccaaattaccattatccctatcactggctcactgttataacc

SEQ ID NO: 16654 - DNA, 571 bp, Arabidopsis thaliana landsberg
tatatgtccaaactcatcagtagttcagtaccatggtattctccataaaataaaaatgccaaaaaaacaaaaactagacatactgtgaaagtgaaaacagacacaggaaagctgctttctttgtagttgtgaggtataaagggtgaaacttgacgacaaacaatcctaagctctggatcaggttcacctatagaccatcaaatattaaagtttcaggcttctaccatagacacatcaatacttacaagtgtaaagctgtattcaaaagcatatatatattaccctcatacatcgtccaagacctcggatataaagcatggtatgtagacttgtctcctttcagattccaatcccatgaaccaattcctgattccgagtcttgtctgttcgaatatataaatttcaatcatcttaaaaaagtaatattcactgctagctaacaagcagcggagagtactgcagtggcttacttgtcaagctttgggttcctaggacataacacacttgagtactttttaccattagcacgtggaacaaatgcctgcattaaacaaattcaccaacttagtag

SEQ ID NO: 16655 - DNA, 1443 bp, Arabidopsis thaliana landsberg
tggcctaatcgaactgtatgcttcgccagcattgatgtcgaagtatttcatgagattgtaccatttaccccgaccgcaagaaggagaaggaagtcaagtagcgagaacttggaagaactacccgaggaattccaatccaagagagcttgcctagggaggagcaacccgtcttactatgcctagtaagacccaaaggtcgagccaactttgttaaacaagcgcgctaagttggaggcaacccactaggttactttttccttaggatttgaattttgcttttgcttttgatcttttcagtatttgtttcagctttttataacaaaataaaaaaataaaaaaaacagaaaacagaaaaacccaaaaagaagagaaggaaggagggtcacgtgaacccgtcactagacacctggcaactggcccggctactcatccgagtaaccggcgccgcatggagaagtcggcccgaccgtgtcaaactttggccggagctcgccaatgcgcaccgacctttggcctgagtccgcccgactgtgccacactttggccgagttgcccaccggcctgggcaacatactaccaagcatgccggtctggccaaacccaaaatcagccggccaagactcggccaacaacggtcacacgtgaatgaataagggaagttgcaccgccacggccgatcggctcgcaaatggattcgtttaatcagcgaccattccgctcatcctaacaaccgacgaccccatccaacacctggtcgcttattgcccacccaccaccctttcggccaagcaccacaactgcctgccatcttttcacaccatctgtcaccacgattttgatcttattcgtggccatattgacaaaaacaagatcagttttatcttaggtatgtttttatttattttgttttattatagctattggttgttttaggttttagtttaaaggaagatgcgaatggagattaatatcatggaattcgaccatactaagccgagtatggttgatgttaagcaaggagagtgatcatccggttggtcaccacaaccaaggtgacattgttcttaacctatctttctcacggattcatccctatgcttattttcccactggggacggtgtgaagtaagtctggggggttagtgaatccgttactactaatgctactctctattttgttgacttgaaacctttttccacttttaacattaatatgttctaacaaagcaaaaggtttttctttaatatcgagtaatgttttattgagtcaaaaccagtagggaaccgtgatcttgttatatgatgattattgaccattatgtgttgagaattatatcttaaggaacacttaccaggtcgaaaggaacggccaatcctgaacactaaacaaggaccgtcccccaaaagtttaaccccgcggaaattaatgtggatgtgacgtca

SEQ ID NO: 16656 - DNA, 1903 bp, Arabidopsis thaliana landsberg
taaaagtttttaaggaggacccggtcctctggcagcttcattctagattatcttcacttttcaccaccttggtacaaaaacaacacaagtttgttgtctcctcacctaaaaacaacgggggaataaaccctgagtatgaaattactcagcaagtcttacccgactaaggaaaatactctcaagggtatgctggttatatggggggtcaaggtaaggcctttcaataatcaagactctgtttgcagaattgcttactaaaatggatccttaaaatccaatttattgtcaggttaagtaaaattaccttcagctagagttctttctaccctagttcaatcacttgacctgtactagccaatttcttatcaacccttcatcttcactggattgctacgtgtaagtcagtgaccaagtcttcataaccgcgaaggtacggcgatccgaatcgattatactcagctgaggatctccaatcacacgacatatgtagcacttaacccttgcatatgtcaactcgccaccggggttcttaagaccagatcaggttcacgccaaccgagagcacagatacaccaccgtccagcctcttgccacggagggtacacgctactctcgccatctctccactcccattgcgtgttatcttattctggtattagtcttcctgaggcaaagcttacccatgatgaggcatgtgaccagttaaaaggtcctcggtcagcagacccacatcgataaggtccttaatcgactcagacggagacactacaccgagactttcttctcgtgcaagtcacccgctcggtctcagctttatcattttaaacccaaagtttggtacctggcagaggtacatcttttttgatgttgaacccatcacggatatgatggatccaccatcaagtttttattttgaaaacagcccacccacttgaagcatcatcttttgtcaaaacaaaacattttgtttttctagagcaaagctaagcataagaaagacctttttgtaaaacaggggatcaaggaaaggtaatcaaattatcaaggaaggaaatgcatcaatttgtttagcacacaattcctatcacctaatgcatcaagcaagtgagaaagattttaaaatagcaaggaggtggcaaatgcaccggggcgtgccttgtgttataggtgagtcaggctctactccacagatgtcaaaataaaagcagttcccggcctgtggtacttcagctggtggtgtagcccttgcttcttcaacttctatctcttcttcgttttctatatataaccatatatataatcatgaatgctcatgtaatgctcatgaaaatgcaaagataataaaagtatattatcttaggtcttgaatacaattttacttcttggatctctaggaaactagggttttttgagtcataagtgaagttcctagggcaggcattacttagaagattagggttttggggtttaggtaccaaacattgtccaaaccaagccaaactttacccaaggcttctaaatattattttagccttatccaaaaagtttagtgatttttggagttattaatcaatttctaaaattccaggagtataagttttggctattttaaatatcccataattccctatttggaataaaaatcataaaactatttctattaaatactatagaaaattaggaacctagcaaaattggtctcgcatttttaccgtttttctacaattttctaggaattctctagtcctggcagaaaaagaaaaagagaaaggttctatagtattgggctgaaaccggcccaatctggcccatgcccaagtaaagaccgtggcccacacccggctgctggctttgcgaataggtccctgctgatttgaataactggaaaaggggtcgcagcgct

SEQ ID NO: 16657 - DNA, 1986 bp, Arabidopsis thaliana landsberg
gataaggtaaggatgcataccggcccgttatagggttacatatcacacgcacttcagagtacatatcatagaaataagtcaaaccagaggcataacagcaagatagttttcggttctcactagaagaatacatctgtattttgtttggaaggaacttcatatgaaagtcggccgctactacaagagatgacgatgaattatcatacggactctgatgcttaggcaaagagaagaaacaccataaaccatttcttttgatggcgaataagagacgcggctgagttgaggaactggtgagaaacaattctgtgaaatatggacgactaagcattgatgcccattgcttcgacacgcaatgaaacctcgcgattgactttgcaggcaatctcaacattatctcgaggatgagttctttagggatggaatctgaaatcatgattgcgtgataataaaaatacaaaagtgtgtaaatacatataattgcataatagagttttcacttttcattggtcgctattatttacataaaaaaggtctttgtgttaaaaaatatcagaaaggattaaactctaaatctctttatatagatttctttgcttttgtaaccaacacacagattaggtaaaatttcctaagctttgaaaaatctacatatacatttttttgccatcattttagcaaataaatcatgtacttgacacttatttacaatggcatgccattagcattaaatattttctgttgataattaaatacaagatattatattcaatcataggttccaaaaatctctcaagatatctaattggtattaattattcagatttaaaaatttaaatattttatattgcgctcaacaaacgttttcaaaaacctctccaaaaaattctacacgggtttattcacatatttataatccgagatttttttcatcaactaaatactcccaacatacattttccgagatttcttctctacgatatatgttgaattatatatcttttaaattgatttgaattatatatcttttaaattaaaatattattagaacaaaaataacaaaataatatttaatttcattgaacgtggttagatggtcggacggatttgggtcgatagtaatacgtgacagtatagcacggttaaaattcattagatatgtttagtttcactgaacgggattagagggtaggacgggtttgagtcgatagtaatacgaagcggtataccacgtgtgaagtcctaaatataacaatcaaaatataattatattatcttaaatactaaacaaaacaattataaaataaaaatataattaaattttaaattatttagttataatctagattttaacttaatgaactgtacgttattgttcttatattttaaacagtaaaagttaaacatagtaattgtatactaaataatatacagatataagagttgtatattcagaaaatacaaaatattaaatcatatatatttttaatcgactaaacaaattatatttttattcttaaaagaacaaaatagtcccgcggtgtaccgcgggttaaaacctagttaatcatattttacgaacgttcagacaaaaactttcactagaagttaagaacaacaaagatctccaccttcttttatcactcgtcgccatcgtcagatatggtaatcttcttacctcctctttcacccttgtgtgttttaaagtgagagtatatatcctcataagagccagtgtaattgcaactacgcgcagggcatgagcataatgagaaagtacattccttctcatgagttatttcttttccataagaaaacttctgtgtgcaaccaaacttggcgtttggacataagaaaacttctgctttgataaccctctccattgctctgcagcgaatatggccaatgggaagagcacactaaggacatttgttcctcaatttgttacagcatgtcgaacaagccctatgtccattgtccccctga

SEQ ID NO: 16658 - DNA, 841 bp, Arabidopsis thaliana landsberg
catgatgaaaacaagcgtttatgtcaacaaaacattggtctagaaagtatttcaatttaaccagactagctagatcaacccaaatacatacattggctatatattaggtctttcgaccaacatatatatcaaatatttggccttgaatttaaaagaataaaaatatgacttggaatcatcatcaacaactgttgcaaaatttatttacaaactcaaatttttaatttaagaaaaacaactgcaattcagtaacaaactaacaatcatacaatgtaccatcaaaaaaaatatttaaaatgttaaatgttgaattaaacaagataaatacaaacaaaaatagcaatagattagttgatttctcaattaaattcaagaataaaattacacaatgagatcagttgattttccaattagaaaaaaaaaaatcaggggttttattattgacagatattaaatatttcttttttttgttgaaattttcccaaagttttttttgaatgagattacatcataaagaaatcagaatattcaagtgcatataaatggtcaattttgtattgatctgtttttaatatttgataaattcaaaccctattctatctttaacgagacaattaatgataattttctctaaataacatttgtagtaattattatatataatgaagaccattttctcattcatatctttcatttattaactaatatagtgatgaaaaatataatggtacacttcgtgttcctaatttggaacaattagataccacattgtattatttttctaaagtaaatagatattccataagtgaaaagaaaaaagatcccaaaattaaaaaaaaaa

SEQ ID NO: 16659 - DNA, 1836 bp, Arabidopsis thaliana landsberg
gtgggtgtgcacgtacgtgtgtgtggtagcatacgtgtggagaacatgtatacatgtatgcgggagtttgtgctgatgttgtggtgcatgtttttggtacagctggaatcagtatgttgggcccaaggttcattcatgtatctagttcggctgcatcttctggtattattataagtatatgataatacgtttgctgcatgttccgtgatctctgatggttaggtttacttaatgagttgattcaaccttagagatttatttgtgcatagacccagctcaggagtaatgttagattactcatgattctacttgtcttacaggaaaccatagtgggatgaccatggcgggaagacgaacactaggaaatgccgaaaataagatgttttgcgttgcttctgaaaaattacttgttattatgtaaattttaacaaggattcgatataatgatatatttttgggtaactctttgcaaagtataagctaaatactatgtataaagtgttttcatacaagcaaccgagtgtttaatgatataagacctagtctgggtttctcaacactagaatatcaagagggttggcaagtgtaagtggtgttcctagtgggaagatggtagattaaaatctggatgaggatccgtattcatcggaaacctaggctgagttatggtcgatcatcttcactctagtgtaactagggtcgcccatggcttgtccgccaatagggcgattcaggggcgttacattatcctaatctaatccatcctcaagaaccctaataactactcaaacaacaaaatcaaaaacataaacccaaaaattactctaaacatatcaaaatgtagatctaaacaatataaacaactttactcaaagaactaaatgcaaaaacgaaatagattaagagtaattaaggtttcaagattcttaaacacaaagaaaaactacagaataaaagcttcgtcttttggacaaaccccaaaagacctatttatagtaaaattccgaaaaccctagattcactagaagacaagagactttaggcggtttagaggaatgctcgatcttggggatcgagtaaaaagggtgctgcaaagtctgcacctttgcctccatgctccgagtgatcaattggtcgagtagatgcttcttcctctcctattcttatgctcagctgtctggtggagtggggaatgaggaggatccgaagacgctttgaacgatcaacaagtcttgtagagtagattgcccttgatcgagtaactggttgggtagaggatcgagtaggggatcgagtagattctgttgcctcccctgtagctgccttgatcgagtaaactggtcgagtagattgctctgctgcttccgtcctggtttgatagagttgagggtcgagtagattccttgtaagctccttttgcacctgaaaacacaccaaaacatgcaatatgtatgcaagatgatcctaaatgcctaagtgtgcaaaataagctacatgtgatgcaaaatgatatgaaaaaatgagtgatcactaagctaaatgatgataaatacatgcctaaaatgagtaaaatacagtgttatcattgttcgacacaccgatgtgagggttaaccctgactctcatatatatacttgagtaaagacgcaacccttcaatatccccctcggaagttacgttataatataacaactgacttttattattttgtaaatggcccgcttttagtaagtggttttttttagagctttgtttgatattaatagtatttccccatccgaaactaattattacccctataaccatggttcgtttccgaacaggagcacccaaatc

SEQ ID NO: 16660 - DNA, 3077 bp, Arabidopsis thaliana landsberg
  unsure (1)..(3077): unsure at all n locations
gtcgatatatatctttatatatacaactctatatcatatatatgtatatacctgaactcttcatcggtggcttggtcggattaagcatcaacggaagacttggccgaggcatagaaatcgggaccggacacacgaaggctttcaacgaaaggcgatgcgatgaaacggggagtgtaattagacgctcccattttcattttctcctcatcttctagctcgaaaactccggatgagaatctccggagtttcttgtacatgtcgcgggagacgccgcggttggttacgtataagaaaccccactccttacacgcatcttgtagtgacgtcaatgatgactcgcttagaggctttgaaatgtcaaacaccggaagttccagagacattaatgacccccaaatgatgattatgaatgttgcattttgtgtttggggatacaactttagtttcgtttagttctccaaataggtttaattcgtgtgtgtatatatattgcatcaaaagtttataatactagtatataacttccactattcaatttatataatttggttgaaactcttgcatataaatctagtatttatttcgtataataatcggaaactctagatgctattcctaattaatctgtgtctttgcaataatcaaaaccaactatttttacatttcaagatgtttggcccggcccttaaagaatgttatgaataatttaaaagaactcgagattcttgtttacattttagtgggattatatatcgctaaagtcaggggaaagtgcttaaatattaagcttttgaaaatggttactgcatcagcttgcgtgcgaaaatgagatcccatcacccttgaacatgaaggtagtaagtcacctttttaaccccaattaaaccgatcacattcgaaacagtttgaaaaaccaaaactatggaagcctaacaaagatacaacataagtaacaaatatttttctttacaaaaattttagagttacatttcgaaattgtagttagtatatcatttatgcacataaacgctaggcctagctagatagatggtcatctgactctaatttgataaaatgatttatatttgataaaatgaaaagaaattgagtggtgggctagcacttaaaaaaacatctaaattaatcacttctcataaatatttaatcatagtttcttatgaatatattaacaatgttaagtaagatagatattatatgatacaaagtctttaagcaatgaaaactttgtacatttgcccctttgacacaaagcagttntttaattgtcactaaggccctgttcgtttcaccagtcagatggatcatctggatggagatgagttttgatgttcgtttgatgccaaaaacggttcattcagatgatccatccaaatgaatcatctggatgagttttaaaatttaggcttaattttgaaactcatttggctgaactaaattggatcatttggatggagatgattctgtccaaaacaaaaaatgacaaaataccctaattattttaattgattatttagatgtattttttagataaacaacaaatagacttaaatcttattttacaattatttttaaaaaataaaataaaaaattttgatagaaccgcagtatcgaatttttccgttaaaacagtaaaattccgttttccgccaaaaccgtaaaattctgttttcccgcccaaaccgcaaactcacgttttcccgccaaaaccgtaaaatcgtgtttttccgtcaaaatcgcaaaatcacgtttttccgtcaaaatcgcaaaatcacgtttttccgtcaaaaccgcaaaatcatgttttccagccaaaaccgcaaaatcacgttttcccgccaaaacgtaaaatcacgttttctcgcaaaaaacgtaaaatcacgtttttccgccaaaaacgtaaaattttgttttccgccaaaaccgtaaaatcgagttttcccgtcaaaactgtaaaatcacgttctcccgccaaaaacataaaataaatttataaatataaaaaactaatatttgaaatttatttacttttaaatatattttagattaaaaattaaaattaatatgtttacaagtaataataaaaatataattagatgaaagcatgagtattttaggtatttgtattattacaaatcatttggatggagattagagataagcaaacgaacatcatctcattcggatgatccagtcaaatgaaccgactaaaaatgaaacaaacaagagtcggatgaatcatctagatagacatgttgaatcgatcagttggatgaatctgtcaaatggagaaatgaacaggccttataatgtttctatcctcaataaaacttatgttaattataatctttttgtctttccaatttttcattgaagtggtctttattatgaaaacggtagatcaaagactctggagggcgagaatcttttgtataagagatcgtggccgttaaaaggcaataagcactaggatccaatggatgaaatctcgaagtataagtactatgtagtatatcgtgtagccctgacctgtaaaaaacatgcctttttcttgttctgtttggtgtttgagtgtttgactctgcaatactatccaatttcaatgggttctcacaattaaaagcatattataaaaagccatagatgcattttataactagcatatcaaatataacaagaaacagcaataagttcataagttttcttggggatgaagaaggtactactaagataaagcctaagaagaaacataagaacactcctaaacaaacaaaagccataataagaagtcatgtcaaagtactgatgataatgataatagtgatcgcgatgatgagaacggcgatagtgatagactgagagtgatggtggtggtggtgaatggtgagaggatcangcatctctacgcaagacatggactcggatggaatgaaccatcttctggtcatcatgaagaaagctcgcattcgacagtattttggtgctttttgagccctgtccttctgcaaaacctgcccatcctttgaaccaaaccctcttatcagcccattttcctctta

SEQ ID NO: 16661 - DNA, 647 bp, Arabidopsis thaliana landsberg
tcttctggacgagaaaatgaacccgaaaatatcagattttgggttggctcggatgtttcatggaaccgaatatcaggataaaactcgcagggttgtcggaactctgtaagaaccattcttcaataacatattaaactagattggtaagtcatatactaaaatgggtacaactatttgattttttgaacagaggttatatgtctcctgagtatgcatgggctggagtattctctgagaaatcagacatctacagcttcggagttctactgctagaaatcatcagcggagagaagatctcgaggttcagctatggcgaagaaggaaaaacacttcttgcatatgtaagtaagagtgtaagactttatgttttcatacacttgcagaggttttaaaaggttcgttgccctcgtattcttaagatctgaaactaacacaggcatgggaatgttggtgtggagcccgaggagttaatcttttggaccaagctcttggtgattcttgtcacccatatgaagttggaaggtgtgtccagattggtttgctttgtgttcaataccagcctgcagacagaccaaacacacatgagttgctttctatgcttaccacaacatcagatcttcctctgccaaaacaacctacatttgtag

SEQ ID NO: 16662 - DNA, 1361 bp, Arabidopsis thaliana landsberg
tgatattgaaaatggcgagattgatgaatgtaattttgatttagatgagaagatgttacagaagaagaagaagtagccatggaagaggacgaggaggctgaaggagcttgggaattagagtttcgaaatggaagtttgaatttgccccaacgtcgaccatcggaatctgatttgtcctccgttaaagccatcggagaatcggacgcgagagagggaaggattaaagtggatttgattgggttagtgtttttttattaagcgagaaagtcatcggaaagtggagaagaagatgaagagctaaaacgcagataaaaatagcgtttaacacgatggcgttttggattcgctttaagcttactttttggttgttgttgtgattgcgttctgaaaagcaataaaaacggttgaattacactaaaaaaataaggcttgggttttcaggttttcaggttttcgggtcgaggtcggatcatgttcgagtcgatttttttgggttcgggtattccgaatttagaaatcaaaaacccgttcggatattttaagattttgtgtttgagttagatttggatcggtttttcggattcacccgagtatccgaaatcaaaattttgtatcaaaatatttaaattacttaaaattacataaattattttagtaaaacttgactattttttattcaaatctatcgaaaagtaagttaagtatccaaaatatcttataattcaaatattttaggcacttaagttgttgtaaatatgattattactaataaattatttctatgtatatttttcagatatgttcggatacttgatcggtttcaggttcacatcgggtttgagtttagattttcagattttgaagtttataatttgtttggtaattttaaaattttggattcaaattcgaatcgaatttttcggatcggcttcggttggattcttcagattcgagtaatttgcctaagcctatcaaaaacaattaaaaatacgtcaaaaatccgctgtaaatcttcgcttagcttgataaataattgtaccattttaacgttatagcttgacaactccaaactatatgaccatctcacgacaacaaaaaaaagaaaaatatgaccatctcacatcttacaaaatatcttgttatccattattataatcgtaaatgtagacttcaaacaattctagtatcaaccaaaatggaccaaatctacctatttcagcatttttatgtaggcatggtatgacaatttgctgagtttagaatacaacttttatatatcgatttatttaacgatttaccaattatacatactaacatttagtatccgtatatataaaatattaaaactaattttttttgtg

SEQ ID NO: 16663 - DNA, 847 bp, Arabidopsis thaliana landsberg
cataaaatgttacgtgctggtactaacaaacatagtttcaattcatttaattttaaataatgtaattttcatcagaacttatgctagcaaaatacataattaaatcataagaacataataatatcatcagacagaataataacctcagaacaaaacgagcatgtatccatcaatgcacgtcggaatggtacaactgcagcattagtcgacccaaaccatatactgacagaatatttacataatatactcgatagagatgctggcccctaacgaggtgataaagaagtacggtccacggaattaaccgacctcaatcccactaacaaaatacataatacatctgttggcgatgccgactaccacagattgcacaatagagctataacaacccatcccgtgggacccgcccacgtggacatactcctccacgtggcatcatgttggctctgtatcgcatcgatcctaacctctctccttgggccacctaagcccacaggtaggttattggtgcgcttggcgttccacgaactcaagacctcaccctataacaacgttcccacaagacaagctgttaccaattgatctaagtcgacttttatataacaacccgtcccgtgggacccgcccacgtggccatagtctgccacgtggcatcctgttggctctgccacgatatattagggttgagagatagagatttgagttgcaaaaactatccctctgattttggaacgatgaactcgagttgcctcattttttttcgtttttgcagtttagtctctgaacctttctttatttagagattttgtcttggacttttgaacaatcagaaatctccctgaagtta

SEQ ID NO: 16664 - DNA, 640 bp, Arabidopsis thaliana landsberg
ttgatatgtacttggcctaagaaacgaggtaacttcattatatctaatactggtttcgatttcttatcttcaaattatttggatttgtttttaggataatcttaaattctatttcgattattgaaacatgattataccattatactaaacttggtctgaagacaataaatacatacatcatttacaaccctaaacatatcagcctactaagcatcataatagcataaaacacaaagttcaccatcaacttttaaacaaaatgaatggggccatggctacgacttaccttactgatgttaagcccttcaagaccagctagcgtgtacaaatcaaaattctcaacacctggaaacaatacacatcccagtcagtcgaaacactcgtaatggtactagctgataagagggtacgttcatgttacgccatatttaaaaagatcatcataatcttatatatatttcttgatgataaattagaatattgtgttcaagggatgcaagattcacgcaagtgtgaaaaagggattggtgaaaaggtatgaaaggcacgtatcgcttgatcagtggagagttattgagaaagggattggcgtaaaggtatgaaaggcaaagaaggagacaattctgagtgactgatcatc

SEQ ID NO: 16665 - DNA, 5485 bp, Arabidopsis thaliana landsberg
ggtgttttgcccaagatccagctactcttggatacaacttctaatggtaactttctcaacaaagatgttgcctctggatgggaactcgtggaaaacttggctcaatctgatgggaattattgcaatgaattcgatcgatccattcgaggtgccactgataacgcggacggacacataaaggagttacaggctttgcatgccaagatcgataagttggtcatttgctctaccaagaccaattgttgagagacctattcactacatcaccgacgaggagcaacagcagattcaagaagggcagtcctactcatatgaggaagtgagctacatacagaatcaaggtggctacaacaaaggatacaacaactacaagccaccttcttccaacaacccctaccgaaacaacaacgtggttcccccacatcctccggtttatcctctgtatcagcatcaacctccgccctatgttccattcccaaatagtttcaaccccggtttacaccctatcccaactccaccaataccaaccccacctgttcctgactttacagctctacttcagcagctcatccaaagtcaaaacagcggtgtttcggtaatcgaaaagcatttggttgaaataaataccaagatggactcttctttagttgatctccaaaggcagattgacactttgacatctacaatcaaccctgaagaagggagagttgtatctacttcagcaccaacacatatcacccaactcaaaggaaaatctatccttcatcaccaggagtatgcccatgctatctccacagttcatacttctgacactgaggactgtgagattcaagagggggaggttttgagatcaagatcaagacaggaaattgaactcgacttctttgctcggcttgttgaacgagcacatgacccgagtaacccaatccctattccaccttcctatttgcctgaactgccatttccaggaagaattgcacagattaaagaagggatcttcaagaaacacaagatgatgttcatcaagtgcatcaaagagttagaaaagaagatacccttggttgatactcccaaggaagtgattatagaaagactctaagaagttcaggaaatagttgaattgagctttgagtgtagtgctatcatacaaaggaaggtgataccaaagaagctaggtgatccaggttccttcactctaccttgttctctaggacacttagtgttcaacaagagtctttgtgatttgggagcttcaattagtttgatgcctttgtttgttgcaaagagattggggttcaataaattcaagcctatctgcattcaccttattctagctgatagatcagtgagagtgcctcatgggatggtagaagacttaccgagaaagattggattagtagagattccaaccgactttgtggttctagagatgaatgaggaaccaaaagaccctctcattcttgggagaccatttctagcaactgtgggcgctcttatcgacgtgcaaatgggtaagatcgacttgaaccttagtaagaatatccatatgagctttgatattgctaagaagatgaagaagcccaccatagaagggcaacttttcttcattgaagaaggaaatttagatgctgagttgttgagtgggttggaaaattctatttcgtactccattccgactcaccacctaggagagcccaaggagcttcttatgatagaaggaggacctagcttagaggttgagactgagaggaaccattttaatgttggtcctattgctagagagcttatggagctcaggaaacagtatggagctcaaggagaaaccatgaaaaatttggacctcaagatggaggagctgaactacgctatcctggagcttaaggagatgattaagggttacccaggtcctgagatagatgaatacttcgatgaacccgatcttggagaagaggattatagtactgatgaaaaggagtcttactttgaggaaagatccaatgtgtattccacactccagctatcgagagaaaatgcggagtatgattcagactttgaggattcagcaaatgaggatgaggacttctcagttcctctcctcaatctcttctctacctaaacattgtgagagtcaagcttagtgactttaaacaagctcacttgggaggaagtcccatgtctatctttgtatatattgctttcttgttatttttgatgtttttgtttaagtgttttgatgtactactcggctacaggccgagtgtgggcttcaattgaccaaaggcccaagattgaatagtactcggcccacaccactcggcccaaggtcgagtatggacctcactgttcaaaggcccaacaagatgcagcactcggcccgaagccgagtcagaaaaagaagcccatcaggcccaacactgtactcgacacgcgcgtcgagtatgtcggccgagttcacacgtgcgaggtcaacacaattcaaattcgaatttgaattcgaatttgctcggccccaccaatcaaatcatgctccccaaagcccttcaaagattcttctgcaaatagtgagacatgtccccttgaccaaatgaagggtgaggatctaaggtgtttggagggctaggatcaaatcttcatgtctataaaaccacactcaacaagctaagtcactcacactctctctttgctcaaaaatttcgaattttacttcttctctccaaacatttcaagtttttactctcacttctctagatttctcagaaactttgccaaaatctcttgttacaaacctttccaaaacctctcttacactctttgttcacttttaaacaacaatttctcttctactttgacctacctttggttattttgtggtgactacctgccgtaaaaatcatcccaaaatcatgaatcccgaagaatcatttaggagagcctctgctcgagccgtagcaagagggtttgagatgattaacgagaagaatcagtcaaagaatcagaaagctgcgagtcctggttttactcggatgacaggccgagtacaatggccgagtatggccccggagtcctatgagggtcgttctgcggctgctcaagaggaaatagcaagaggcaagagggtctgggagtccgagccagttgcagaagaagaagtgcctgagatagagaaggaagcatctgaggaagatgtacaagttgatgaagaggtcccgatagttcctacaaggagaagaaggaacaccatgaggagaaagaaagaacctaccattgaagagcactaccaatatctcatggagctgagttttgaggggacaagatatccccatagacctaccatgcaagctttggggatatgtagggatgttgactacctcatggagatggccaagctggagactttcttctcctacaagtgtgaaggatacaaaacttagagctgccaattcctagccactttgaagcttcatttctatgctgaagaaagggagagagagctgcataagggagttggctatatcacatttatggtgtttggaattcaatactcggttcccattaggcagttggatgttgttttcaagttccccaccaagtatggaatccgccaaaaattcagcaaggtcgagctccttgatctatggttgacaatcgccggtccactcccctacaagtcatctagggccaagagttcgttgataaggagcccggtgcttaggtatctccacctttgcattgcaagtgctttcttcccgaagaagacaaccggccatgttaatgagggagagctgaagttgcttgatctcaccttatgcttcattttggggcgcacaaggaatgggatagagatggaaggggatagggctgatacatccctttcggtggtgttgattgatcacttgattggttttagggagtatgcagccggaatccaccaatccggctatggaggaagcttatgtgctggaggagtgatcacgcccatcctaatagccgttggagttcctcttcataccccaactcacacagcaacctacatcgatatggagtatttgaagaggaagtgctacttggataggtctgctccagcggatcaactctatttcaagttcaagcactccacgctagggctctctaggctagcactcccttgcaagaagttcaccaccattaggattgggaacaacattgactttgatcctcctcaatcgatcttagtcaatgtccttgcgcccctacaagcagagccgagcatagggagtgagtctcaagaagaaggagcagagtggaatgaagaagaagctgagcaggaagcctatactcggccgagtaactttcagcaggccgagtatggccaggccgagtttgaacaagctgagttcagtcaagctgaacagtttgatgaacaagaagattcgtgcgaagctgcagcggagcagtttttctttgaggattatgctgagtctgatcaagagagagatcccggtcaagttcacaagaagttgggaatgctcaaaggtttgggcaagtttcagaggaagttgttcagtgggtgtaagagcttctgagacttgtgctcttgatttgattgaagctacttatgagagagaggtttatcctggtgaggttttagttgtggataaagatggtgtcaaatgtcagtgtttgatgcctcatcctgagccaaagcaatgcattttcgaacatatttacttctcgttgcctaattcgattgtctttggtcggtctgtgtatgagtctaggcatgtctttggtgagattttagctactgagtcacctgttgattgtgatgtggtgatcgctgtgcctgactcgggtgttgtggctgctcttggttacgcggctaaagctggtgtagcgtttcagcaaggtttgattaggtctcattatgttggaaggactttcattgagccgtctcagaaaatcagagattttggagttaagctgaagctatcgccagtccgaggagttttagaagggaaaagagttgttgttgttgatgattcgattgttagaggaacaacttcgtccaagattgtgcgtttattgagagaagcgggtgcgaaagaggttcacatgaggatcgcgagtcctcctattattgcatcttgttactacggagtggacacgcctagctcaaatgagttgatatcgaataggatgagtgttgatgaaatcagggattacatcggatgtgattcccttgcgtttttgtcgtttgagacgttaaagaaacatttgggggaagattctagaagcttctgctatgcatgcttcacgggggactatccggtgaagcccacagaggataaggtgaagcgaggaggagattttatcgatgatggtctcgttggaggaatccacaacattgaaggaggttgggtacggtagatagcagatattcaagttctgcattatgatgatcaattttgggtactaatggagtaagatgatgacgatatcttgttaa

SEQ ID NO: 16666 - DNA, 955 bp, Arabidopsis thaliana landsberg
tgctgctttctcttccggtgacttcaccaccgctataaaccacttcaccgaagccattgctcttgctccaaccgatcacgtcctcttcttaaaccgttacgctgctcacgtgtcgcttcaccaatatgctgaagctctctccgatgccaaacagacgataaaactcaaaccgtattggactaaaggttatagccttctcggagctgcttacatagggctaaaccagttcgagttagccgtcactgcttataagaagggtttagatatcgatccgaccgacgaggcgttgaaatctggattggttgaagcggaggcgtctgtctgattaaccttaaacccggtttgttccggtttctatctatctatttgtatcttttcatccggtttgtcccggttaagtttttatctatctatgtacgaacatttcccatttgggaaaaagctaaatcgaataattttatcatcttcttctttcttacttgactctgcttttcccagtacgctttcatcatcatccgtagaatcacaagtttctcttgctacaaatcacctttcaagctgttgttacttatttaatcctaaagaaaactacttataaacaagtatacaaaaattggatcattaagttcaaaatgcacttccattaaaagaaagaataaaaaaaagacaaatcaagctaagtggaaaaaggtgtaaatgttttatcacctccttgggccggagcctggctaactgaaacatgggcttagggccccaaaaatttgattctatttgtaacaaaattaggccctcaaaaatattatttgttgcaaaataggtttcaaatttctgaaattttaagatttagttcaagccctttacaacaactatattatccttgggcccgatattttgtatagtatttcacgccttatgaccaatgtgatttacgctttttaaagtattttacattgtt

SEQ ID NO: 16667 - DNA, 1934 bp, Arabidopsis thaliana landsberg
  unsure (1)..(1934): unsure at all n locations
gattttatagctctcgtgaggcattttttctctaggttctcggatttctggacaaagctccttaagttgtctcggtgggaaacactctcaacctgtgaaaagttccattcaaacagataaattgagaaagctgcagaagaaaattgacaatccccagaaggtactacattacatatcaactacttggaagatgaatcaccatttgttcaataattggccctgaatcaagttcctcggtaacaaagtgactagtggctccaattagtttcacaccagcgtcgaatgcctgtaaacagaatctagaacattaagaggcaagaaaaaaacagacaacaatataaccaactaagagaaggtagagccatgacaaaactcagtgacctgttttgcgggatatccacccttaaatgatggtaagagaccatggtggatgttgattacatcctttccataacctttcaaaaagttacccgataaaatctgccaaagggaaaatgctatgaattaaattttgctattcttagttggaaatagaagaagaagcttaaatagtacgcaataatattcatctgaacatgtaagtcagaatttgaccaaagaaagaaaaaagagctcatgcaaagactaaaaatgtgatttcatctacctgcatatatctagcaagaactaggaaatcagtgtccttaaccaattccaaaatatcatcttctcttttattctctttagttgtagatacataatgataagggatgccatgcctctcaagaaaccgcataacgtgagtgtttgaagctctttcatgattgctattaaccaaaaaaaaacatttcagcatccgagtcactagacatataaatgcttacataatatacagatccaaagaactattagctcaccttatcacacaggtaatatccacagggagtttcccgtcctgccatttatgcaacatttcgacaagacaatgatcctgtatataatagaagcacatacttttgagcaggaaatacaaagagtatcgaaaatccaaaaaggtattgtgaatacctgttttgaaagaagaagagctatcttatacttaggatcaatagaaggcacacgcacaactgaattcaaggcaccgtatctttgtgcaatagtttgaaaatcttcatccacttggcttctcggccatttaaccggatcaaagataaactcgctgtcaaaaggaaacatcagaaataaaaccaatacataatatttcactcgattcattatcaaagcttcgtacacttcttaaagtctattgaacgagaaagttactaaaaaagggaagattttggagtaaaaatggagacctgcgagagtagaagacgttgttgttttcaggaacaaaaacatcgtagccaagaatgttgccaccttttgctgctatgcaatctgatagtttagctacaatcccaacagcatcctgacaatggaagacatggacgccgggaatgagaacaggggagacggaggaatcgagggannnnnnnnnnnnnnnnnnnnnnnnnnnnnnnnnaatattcttagcgaaaccagaagctctctcggtgattcgtcgtatcatggttggtctctctcaatctccgcctcagcctcagcctcaccgtaacgagagagaccgaccaatcacggtccgtcccgattccccaaaggatcgcgctccactcttccatttttttaatctttttttttttgtcgtcccgtaaatattgagcaataaaaaatctggatttttcactcgggtgaaaatatcaaaatgggcatttaataaacaaatcaaaatcaaaatgggcccaataagaaatgggttttgttaaaattgatagcataaagtaccaccaaatttacatattttcacaaaaattgatttaactgtatgattttagcttattaaaagtcaaaactat

SEQ ID NO: 16668 - DNA, 1805 bp, Arabidopsis thaliana landsberg
cgctttgtgattctctcgtcattgaattgttggctgcgtcttaagaaactcagaattgttaaagaaaataatgttagaaatagtttcttgggtcacaagcaataccaatgctgaacactagacactttttaagttatagaaagctttcactcaaatatctaaattttttggcggagctaaaacataaatggatatagtaaaaatacctgcgaaacatgtaacttattgcaagatacttgactacttgtcaaatggactggtaaatcgacttgcctacaaattggataagatttttactttttttttttaaatgtaatgttaaaaattatattcctgaataataacatttgttacatcaaatggaagttttctgaataatttgagaaggtaaaaaaattgataaaagaaaaacaaaattaaaatgcaaaccaagcttggaggcatggttcgtatctcttgtcgtccgtagcccgaatcattgagaattggtttcgaatttgtttgtctatccaagtgatgagttttgtggctggagttgatgtctcaccatgtctccttccattgtgctctctccattatgtgttcctcgcaattcctatatgtatgtttcaatgtcttcagacttccttgatccaaaaaactttaaaacgtattctctatattttatacctactctatataaaaaaaaggaaaaagataggtttattacacctaattcataccctttaagaagacttcgacaagttacaaatattttaagtgactttttgtatttatctttgttttgacttgtgtggctaagtaatatgcatcttaccttcgtatttcattgtctaactaacgtctgcaattttggtttaagattgatgatcgctcctgtttcagcgttaaaatccttttctaagaaaatatacatgattaaaaattataaaccctacaccattttcgttccatcttctttgaaggttcctttgtacctatctctataaaagcattttccagactcaaccaacgaaaaagccttttcaatttctttttacagattgctttctgaatagctttgagatattgattttctctttatcatactcagatggattcttcttttctctctggtttttgtgctgctgccataattttcttcacggttttgggtacaatatatttcatgttttatagaaaagtcaaatcccatcaagaaaacaaaacagtagcttcttctttaatatctatttcatctactccatcttctttacctcgaaaacggaaacacgatgtcttccctagcttccacggggcagatgttcgcaaaacctttcttgctcacatcctaaaagagttcaaagggaaaggagtcgttccattcattgataatgatatcgagaggagcaagtctatcggtcctgagctcatagaagctattagaggatcgaagatcgcgatcgtcttgctctcaaggaactatgcttcttcttcgtggtgcttaaacgagttggtggagatcatgaagtgtagagaacaattgggtcaaacagtgatgaccattttctatgacgtcgatccaacagacgtaaagaagcagacaggagattttgggaaggtcttcaagaaaacttgtaaaggtaaaccaaaagaggacattaagagatggcaaaacgttttggaggctgtggcaacaatcgctggggagcattcccgtaactggttagctttctggatttatatttgctctgattcataattcattaaaaaatcaaactaaagagggaaaattaccgaaaaaaacccgatttattagaatctcc

SEQ ID NO: 16669 - DNA, 411 bp, Arabidopsis thaliana landsberg
tgttgcttttagtgcgaagggcgacaatgaatcaagtagtgaggattctgagtcagatagtgatgatacacaaattacaagtgaaagctatcgcatcttgtatgatagctggttactattgagcaaggacaagctgagacttacaaaggagaatctgcagctgtcagcaaaactggatctcttggaggaagaaattaaggaagaagctgttggtgaaaaggttctattgcctgagaaacagataatagaaagaaagatgaattgtcttcttgagagtcttagtcaagaaaaggagaaatctcttttgctagaaagagaactgagtgagaatcacaagaagatcagaatgctgaacaacggggtaagaagcttgatcaattctgtctatgggaatagttgcgtcagatcacc

SEQ ID NO: 16670 - DNA, 2353 bp, Arabidopsis thaliana landsberg
tcatcactttctgaatcatcactgtctgaatcactcgattccttaaatgattttaaagtgtaaatacacaaagcgagcaaagaaaaacacatgagtaggctaaaactggaacggggataaattaaggaagaaattagtagtatcattccattgtgatttgaagaaaagaaacctttttatcttgggactgcgaaatgggcacatgcgtctttgaagcttttttggattctgcgtttttgcagcctgtcatctgcataacatacaaaaaagagttaacaaagagagacccaagtcttctgattaatatttttctccacacaaaaccttcttccaggagcctgatgcatataaggcgacatcaaatgttgtcttagatgctgggtttccagcaatatcatccaacttctgcaggaaatcaaacaacaaatgttttaatcagagattttcaaagggagagaagaaagaaccataatgactaaccggagaacgtacctcggcttccataatggtttcagtgtttctagcaggtgaagcattatcttttacagcctctaactcattatcttccatatcattgtcactactatcactgttatcaaaaaggttgtctgattccttttcagactcttttggagcttctgcaccaaatactcttctaccaacaacattagtggactttttagaggtttctgctccaccaaatttctccaactcctcaatatcacgtttaccttcttctttagcttcctcgtttttctttttcacagcacgagcctaaccaaaccaaaaacatgaatgagcgggaaaagaaaaccagaataaaaacattcaaaagtgttttgagaaaacaaagcaagaattaccatgaaaggtaatgacataagacgagaaatggggacttcatcatcgtccacagttttcagtatcttctcctttgcttccgctatcagtttagaagtatcctgatctgaaccatcattcaaatcttcctcatcactactactttcatcttttgtggagttcatctttctggacaaagtagcatgaatttgaagttgtttagatagagctgcctgagtcacatcgtatttcctattcagtccacggcttagcatgcgtttggcccattgtcctgtgtttttgtgctttaaagtcatacgttcctgcacatataagcacataacataggaacaaataagacaattatcactttgtttacactgtcttgatgaaaaaatcagtgaagaaattatagactcacctttactcgcctcgcctcctgcttcttagcctcttctttagccattgctggctccatgaatgctccaacacccgattgattcaggtctttgtttttaaggcgatgatatgttttagacttaatctgcttgattcgtttatgtttcaggtcaactcggaagagcatgctccgcatcttagcaacatggttacgtctcttgatgtgatcttccatagatacctgcaacataaaaaaacagttacatcagatattcatacaagtcaagtaagctctgcgtgcagggaattatgaactagatcacaaaacttacctcgttgaattcaagaagcctagctccatcttctttgtgagcctccaaaatctcatgatcatcgagtagagaagccattttcatctcaaattcagtcctgggatgaaattgtgatgctatagcaccaacggtagagtatccaacattgacatcttggttaaagtaaatagttggtgcctctctgttcctttttaccagaggcacccaaatatcaaaccccttgtaaaccagttcattcgctacattccgttccaggctttcttgttctggctttggcagaggagcatgaacaagagactgcgtatcttttcgcatccgggagatcatattgcttagttggctatttccatgtaatccttgaagaggctccataaagtcatcaattgtggtgagggatttaccctccagaacatcacgggtaggattgaattcagactctggatatggttcagtaaagactacacgtttgttcttactctctcctgaaaaaaaaaagaagagtataagatcgagcttaaaaatgcactgaagagaagataaaaaaagcaaaactctgtctcaaattttacttgtctcaataccttgaaaggctgaaattggcaattcagtgacatttttcaacattcgtgagtgcctatcatcatcatcatcatcatcatcatcatcatcttctgactccacgttttcatcctttggttgaaaaagagacaatttaaaacaagttttagcctagattatggcgtgttacccaaacaacttaacttgtcgattagcagcgtctt

SEQ ID NO: 16671 - DNA, 1168 bp, Arabidopsis thaliana landsberg
cgcggttaaaaatttttttaccttaaaatcatatgtttaaaatgttaatgtcatggaaaagtttatccttttactgagaatcacttaacttacgttataatcttggccattcgattgaagtgtttgtgtccgttcgatctctcgccttcacttaaaaaacacgcggatccttttgacccaggtttataacttttgggttatacgttataatcttggccattcaattgaattgtttttatccgtttgatttccaggcttcgcttaagaaaacacgcgcttctttttttcctgttttaaaaatatgggattctccttttaatcctggccgctgaatagatttatttcaagccgtccgattttgtagttacatgcataaattcatccgactatatttcaagaaactaatcgtattaatttcattaaatatttggcgtatcttcgtcgatgacgatgaaacagtaattcgtgtggatcttctttgagaattatcttacattttgtccataattatagtacatataatatttcgtttggatcttcttttggaattatcttacattttctccataattatagcacatctaatatttctttgcaatcttcttttggaattattttacatttctccataattctaacacatctaatatttcgtttcgattctcttttgcacttatcttacatttttccaagtattccctatattcatacctacttttacggaaatgataaatattttcctataatcatcagattcttgatatcgaataaacttgaattccaaggataatatcttttgcgcatgtttttttgacctaaccactgattcttataaatatcggacgcctcatttcaatctactcactcacacagtttcatttccaaattcatttttaaaaatgatgctcgccaatcctcttccattcactcccttgaagtcgataaaaccttacaagaacgcttggcgtattcaggttaaattgcttcatattttgaggcaatattctgtaaaggctggtgaatccatcaaaataattttggttgatgaagctgtacgtattatagtttcaactttatattttcgtaaaccttatagtgtgttcaagcatcatttttctttactaattattatttaaattatttttgtcatatagggtgataagatgta

SEQ ID NO: 16672 - DNA, 1979 bp, Arabidopsis thaliana landsberg
caatacaacttgtttgaaatttttgcctagtgaatgcactctaggtgtatcaaacatatgcaatgccaatgctatgatgtcatgctcaagttttagttacagtaacaccaggggtgttacatattaaatccattttaattccaaattgagtcattctagagacattaattttgttttaatattatttatcacttagtaaatttgtttagccatgaaactttaattaaaatggttcatttgaattaatctgttctaggtgctaaataacttcagaaatccataacttggtaaccgtaactccgaatttagaaattcttgttcctgcgatctcgttacgcatcatagaatattattacacagtttatgcttatgtttggtgtgctgttaattttgcctataccatgtttggctgtattgctacgtttagcagtgaggacacgtgtcatctgaagagcaagttggtacctggaatctcaagtcccaggcaagttgtgcccctgaccactttttacccaataatgttctttaatatcactcatccatgcataggttaattttgatgggacccaataggtcaccctagattgttatcacattaccttgtttacccctgaatcacctgggtagtttgctattgctttacatggttttgggataatcatttattatatctatgttccaattattcttgttattctgtttatgttcatgtcaagttcattaatgttaattggaacatagagcttaacttgagaaccacgtgccaccacaagggtttaatgggacgcccttggctgactaattaggaaagctagtggaagactaccttacccgaaaggggcaagggcagtaggggggtggtcagtgtaggggaggtccctggttgattttgctgcgatggcggtcagcaggaaccctgcattggaacttcctataaactgtagcgggttttcggaagctagtggaactttgtaaaggcctcgtagtgttgccctgccgcgcttcctaggtagaggtgtatgggattcgcgaccccttggcagatgggtaacatgacttgtgggtaaagggtacaacctctgcagagtgtaaaactggtatactagccgagctcacggtcatgagcagctcaggacactcacatgattaaattatggaaacttaaacttaattttgtcatttgcattgcacctgggattatttcattattacttttatttattatttctaaggtttggtatttacttacacttagtaactgctaataaaattttgaccaacttataaaagcaatgctcagcttcaacctttatttcattgatcagccttacacttcacatgaacccccacctttggtgagttcatgccacattattccccacaacttgttgagctatgaacgtatgtgagctcactcttgctgtctcacaccccccacaggaggagagcaggtggttcaggaggagccacaaggcgaggagtatgatctgatctaggtggcgtttctcagttgacattggcgccgacgatccttagttcgttctatatttattcttttattttgtattaagtcttccgctatgtaataaatactctgatgttttatgacatttatctctatacactttgttattatatatgttgtcttctttggcgcatgtatgagatgcacctagctttgttccttaaagccgggtgtgacattgtaggtgaggaaacagcagacttttgctatttttgcactaaggtggtgcccaaagaagaatctcagcagtgaagccacgggaggaggatggcctcccacttgaaaaacttttatgcgggaggggtttttgcctcccaagtttgtaatattaatatttatgcactcatacccctggtttgtaaaaactataataccctttctatattttgaatgtaaactaagttattgtaattcgcttccgtttattcgttcctccgatgtgttgtaatatatg

SEQ ID NO: 16673 - DNA, 2767 bp, Arabidopsis thaliana landsberg
ctatgaaaagactgaatcagatcgggtcgcaaccgtgggtatgcaagtctacaaaaatccagatactctaaacacactggtaccaagctaaccacctcgggcatgaacgacaaagcttcacccgaaaacgctccaatacattctcccttacaaaacccagtcctaaatagtatcaggccgattacctcggaagccaaaacctagttctaactttacactggtaccgagtcaaccaccttggaaactaaaactcagttatcataaacattggtgctaagcgtttgcctcagctgtataagtccttccgacttagtctactaaaacccagttgtcataaacactggtgtcgagcgttcactttggctaaatacagtttcttatctgctttggcctcaatggttagaaatccagttatcctgaataacctggtaccgagacgatcagctcggaacgaagtatactgaacccagctttgactcgggcaatttgtacccgagccaaccacctcagttcgtctgtagctttcctagctcgaagttcgtctagctagcagctcgtctgcacttcgcctagctgacagctcgtctacagccttagctcccagttcgtctgtagctttcctagctagcagctcgtctgcaattcgcctagctaacagctcgtctgcagctttcttagctccctgttcgtctgtagctttcctagctcgcagttcgtctagctagcacctagtctgcacttttcctagctcacagtccgtctgcagtttctctgactcgtagttcgcccagctaacagctcgtcggcagccttcctagctattgcccggcctaacagctcgtcaacagcttggagttcttcaacaagtctcctagcagctttcctagctcaacttgtcaacagctaacattttgaattcgagatagcaacacccgtcaagaacagaatctcgtagcaccaagaaaaaacaagccttactctcaaaagatacggattagtcagtttagatgcggaagcagctggctcggtcacaccattcataaagctcgtcgcattaactcttaactaacgagctggagggctaactgttggggtcgaattcccccacaagcaagaccgagccaaacagtctaagaataacaatcacctcatggttaaacatatgattggcccctagcctagaacaaagcacctcgggaccttattcgatcaaccgtcatggagagagttcgtaaaatggctcgggtgttaatcctatgaatacaacccgagcctatcgtgagaacgctgcggaaaacatctacaacgcctcgggagacacccaactgagcttaatggacagtcatcaagcgcgcccgagccggtacataccgtttgcccgaagccacctttcaaacgaccatcgagccgtgaagaacacccgaggcaaaaacttgtaaaaaccattcattctcaaaggatcatttccagtaaaataggatctttttatgggactttcggaaatgataaaggacaatctttgaagataatgtcggatcaagaaatctttccgaagcctccgaagaatatggaaaatatctttaatacgattatcctccagaaccgacttaaggataaatggaaatctttcgagaatatcgcgagggaggcggtttaacgaccctatataaagtgtctcagggacttcacaaaagggtcatctttggatactcacaagaaacacataactttatacctattgagaactacgaatggcttgatcctttcacagggtacgtaggcaatccattatggatgcagctatacctttttaaaaccataactctttttctgttgttgagcaaaaccctaatgtatttcataagagattagaacctcttttgtaatcgagtcttggatagaatacctaatgaagagaaattactagatttgttttccctctctaaacaaatctattgtgtgaatccttggttcaacaattggcgccgtctgtggggaacgacaaagaactctcttcgcatatcattcatccaagtattcgatgtacgctcatcaaaccaagacaatcagatccgtctacttgcggggggatttcccgtcaagatacaatgaaccagatgacgtacaacaattccacggattgccccggagatcagcgttccagggaatctaaccgtaactccatcggatatctctgctcagagttatcgccgtttttctgaagtcgatgctgtctgtttcttaacagatccgtccgaatagaccagtctgcctcggaacagatttcccaacaagtcacaatgaatctcgcaacgaataatatgttcacggattgccccggatattagctttccagagaatcaaaccccgtctcaatcagatacctcttctgagagttatctccggttttctgtgtcagatgtagtctgttaaactacaatccgtctgaatagtccagctcgtctcggggccgatttctcgacaaatcacagatagtctcatgaggcgtaatatatcaacgaattgccctcaatgtcagatttctgaaaagcccaacctcggctgaatccaatctctgtgctgagagttattgcctattctttgcagccttgaaaactcagaccaaccgacttcacgatcaattttctaagctccagacgagctaactcgcagcacgagttcatgactaatctcccatcgattcagaaggaacccgggattgatctacatatcatcttgaagccttgagtcttatctttctagcgag

SEQ ID NO: 16674 - DNA, 517 bp, Arabidopsis thaliana landsberg
gcgtacgttcaacatcttcattttcaagcttttcaattccccctaccgtcttgatgatattatcgcaatacgttgcaagaatttctgcactggacactccaaccactgccttgttacagaagacttcaaatgcctccttcaatgcctacaatatattcaaagaaactatgggcattaaataatatagtgtggaaaacaagatagacatgtgaacacacacacatacacacaccttatggaagaggctgcgtttctgaaaacactcatcgacgtagaccatgaatttatcgcgtaggtcaattaattgtctgataagcacctggtcctgcaccttcacaccactagtacttgcagcctggggaagtacgtaattctcaacaatcaaaaaaggagtagactaacatctaatattccaatgagcaaagaatataaaccttatcaagtagctgccttggtagctttgttgataagggcactttcctttaccacaatatgttgcttgaattagcctgcaaca

SEQ ID NO: 16675 - DNA, 1087 bp, Arabidopsis thaliana landsberg
ccattgaagggcagaccagccattggcatcacggaagttaatgttaactcctgctgctaacaccggtttaatggcccagtcatacccaagcgctgcaacaaagtgtaaaataccctgtccatcttcatccaatatgtttggacctttaccctcttcagtcactttatgtatgagccatatatatagttcttcttcaaacagttccctaaaaagctgtccttttggttcttgtttggttgagtctctctgatatgtccctggaaggagatactctttctcctcctttagcaacataattttactgatttgtcttcgtttgtccccaacatcttcgaatatatggtgttcgtgaacaaaatccctgtgagcaagcatcttctcaaaccgcaactgaagtgatgcttcatttgtataggtaccataaacatctgtagcattgattttttgggtagaaccagaaaggaaatcaaattctcgtacttcactgcaagcaaatctgttggaacatgtaacataaaaggggaactcttccagcctcatgcataggagcaacacattggagaataccattagatataacatctgctggaacttctgtttgcccaaacatgcaagaccactcgccaatttcagtctcctcccgagtctttaagaattttccagtgacaaaaacctaaaaatttgcaaaaacaaataagcacaaacctatcttatgactccccgagaagataaattgatcaacagtgcttaccaccacttcacaacccacataagcccagcttggagagaagtcattgatgctaaagagctgttcctttgagagggaaggactcataacatatccatccatgtccctcctagagttgtgaccattggacccatcctcactctcaacttcttcccagtaggttcttgaacttgattgagtaaaggactcgtttgcatcagctataacaccaacatctccaagttctttgctcatccagcgattgaaactgtccatctttttcagaccttcttcgcccaatgcaccgtctaacagatgttgtttcatcgtagatagatatggagctttttcattcgaagc

SEQ ID NO: 16676 - DNA, 1221 bp, Arabidopsis thaliana landsberg
ttcttagcatctaaccttagatggagatgatgagttccactctttagctcttcctctgtatccaagaaaaagaaatatgttaatatattcagttagtatgcataacaataatataaggattactcttataatcagatattatatatatattgatgatattactcagtatataacgtttcagtttctcgagttttggatgttctagaactgttttctcaatgattgcaactcttcaatctgctataaaatagacaattccgtgtttgtgttaacagacttcttttaatttcttagattcttcctctagtttagaaaccgataggagttatcaatctcaatggagaggatgaaccttttatctgacataggtgttcacatcactaaatggcgtgtctatgtggagattcttggtctctgccatcataatccaccgcgagatggtgttgaaaccacgattatgctgatcgattcaaaggtaattgtataaattagcatatcttacactgtgacttgatggaatttgaaaccctaaatttctaaatttaataattttgaaatttttatgtagtataatcgaattgatgctactattcaagaaggcaccattctgtggaagtacaaggatgtactcaaagagggtttttggtattacatgtccgactttgaagttgtggttaataccatgcctgttagatactcattttgttcaaaacagatcaagtttctcagagaaacaaccatgtggcatgttccttcactttcaacaagtagattttttgagtttgcggctccgagtgatgttgagaatgctgcacagcaagatatggattttctatctggtaatttcttattttctatttgatatcatttgttacactgttttctataacttattagaaacccttacatttcgaaagtatatcattttagacaatatagtttgtgtctaatagcgacaccagtgtgtaacatttatctgaacttacactatatttgttgtatcagatgcagtaagtattattataagggtttctaacattaggagattcccatttgtctgtcgtcaaagagagacatattatcaaacaagatatgtgaaattcacgattgcggacaacatgtaaatcttttcttaaggaaccatattgtagtctatttctactcttagaaaataaacattaataatgtggttagtgatgatattgagttttctttctaggg

SEQ ID NO: 16677 - DNA, 1923 bp, Arabidopsis thaliana landsberg
ggctcatgcattatcttgaaggttcttatcctccagctctttcttcattttgtgattgtttggtgaaatcaatgacatacagtcatcccttattttctggtcatccatgactaataatcatttacaccggcattcattacaagacccaagaccaacaccaacttacaacaatatataatgctaatacattcatttgttgtgtagagctcctttttctctttaggtataattaaaatacacccttttcattatattaaattaactatgtctcaaaaagaacaaatcgtaacacagccacacaaaaaaagagagagaacaaaactgacgaagtcatcggaattcgacgatatattacatcctagtacaccttcctactctaagggtccgaatggtaacaccgtatttgaccatgtggaaaaaacggtttggcggtacggtacgatctaactgcggtatacacgggagaaatatatttgcggaacagatgcggtttttataaaataagcgatacaaaacaatgtttgactggtgaaaaaataatgtatggaatacatataaaattttaaaaatatttactattattataacaaattacaaatataataatttaaattttcattaatattttgggtgaccaaataatggatattaataaacttaaactatattattgagtgctaaaacatataaatatattcatatatatatatatatattaaagtataaaatgttattaaaatattaacacaaatttttaatgttaacagattttttcatttaactaaataaagcaaagaaaacaaaatttgtttttgaaaagagaaataccatatattagttttattatattattatatacatgattttatttataaatagttgcaccaacctaaaaaacaaaaaaaatatataggtgtaccaacatacagataaactatttaaaatatatatatatatatatatatatatataattagattttattcctaaaatattaagtaagtataatacttttgttgtaaaaaaaaagagagtataaagcgttttctttggaccacacttgtttgcatatggatagaaaattaaaaagtgcatcacacttgtttgcatatggatagaaatttaaaaagctgatttcatttttgtgaggtatagaaaactgtgcgcgtaaatgggaaactgtgattggtgatttgaaagcatttttaataaagttctgaaaaccgcactgctttaatgttgtcattcacagccttagatttacaagtatttgatgagtggtttgaataaatgttagagaattttaattctgacttcatgatactcgagtctctgattggatagcccatagcaagcttgtgaaatttaatggtttcattctctcttttttctccccttatatatatattttttttggaccgcaaaatactccataaaagatgcgctttaagagccaaccaccccagaacctggaagtttacattggaaaaattaacatctcgagagcgagccccttttgcaagggtgtcagctcaaatatttaacttcctaggtatatgtgatatcgcaaaacatcaaaatctattatgcaaaagattaaaagaatctatgtctgttgcaaatactggccatagatcttcttcttcgacaatttttaaaagttcaatgcaatctgtcgcaaaataactggaatcaaagccattatgaatcgcataatccattgcacataatagggactccaattctgcatgaagaggagataacactctggacttacctcttgatcctagtaatcggctatttgattaagaataaagccaaccccgtaagtgttactgtatgctacccacaaggcatcgaattggcacaagaattgtccctcccttattggggggtgggggtgggtgggtggtggtggggtgg

SEQ ID NO: 16678 - DNA, 5599 bp, Arabidopsis thaliana landsberg
ttattaacccagagcattgacgtgattgtcgtacaggcaactgcaacgtctctctgcattctctgatgaataatattacggaaacacccctataactttccattttagtgtcaaagcccaaaaacccaaaagggtaaactcgtctcataaatatttctttttcgcgcttcatctattttctttctctcggaaaataaattgcagtgttttctgcgatttccagtctatacctttttgttttaactctctctctctctctcatactagccattatcaaatcgaagaaactctaagatttttctcttcaaattccatttctctgtgaaaatttcttcatcctaatgcgtttctcgactgttattcgcaggaatttgagtttctgaagattcggttcgcttcgtcttcttcgtctctatcgttcaggtaaggtcttctcttactctagctgttttttttttttttgaaatttctttgagatttagtggagattgtgctctgatgttgctctgtttgcttatttctaagctcggaaaccttgaatctctcttcggtcgtctccttaaacctcaagtagctgtgcgcttaaggaatctgaggtattattgtctcagcttcgcagatttgttttcatttcgttgtttccgtttcagatttcagtttcgtctcttttagaaaccttcgattttggtttgtcactgagcgtttgatgagaaagaactcatgtgggtatgagatctttcatttttctttggtttctgaagtaggaactgttgtaacgttcagtgattgaagatcctctctgcttagggtttttggaacttagtagacagaacaaatttcatcatggattgctaacattgtctcaaaatgcaaattggtcctacttagagtatctgggagcgaatacttgagagaataactgcaaaatgcttgatgattttggtgacagttttgtgttgacgatttactgtcattttttattttgttacgcttttggttttgacatgtatcttgattctttctagtgaggagcaatgggtgcagggaggaagacagagacctatacattggctcaggatggccaatacatatcaggatatggaaatatgtgtgtgaggaatctgaagaagggagagctttgtggggttatatttggatgcaagttcagcactatcaaagagtgctatgctaagaatttgtttggttagttggctatacaatctttgaggcttaaactttaatgacgaccaggattttgaaaatgatgcttgtttgtgaacaggcttaccagccccgcacatggcgtatatcaagaacattgaccctggtttgacgctgttcttgttcaactacagtgacagaacacttcatggcatctttgaagctgctagtgaaggaaaactgaacattgatcccaaagcttggtctccaaatgggacagatccaagtccatatcctgctcaggtccctttacttagtacagaacgtcttttttagttgattcacccaaatgtcctctaaacagaaatgtatctcgttctgcaaatttttgccacaggtaaaggtacgagtccgagtgcggtgtgagcccttgcctgaagaaaagttcagcccagtaattactgagaattacaatgacgacaagatgttttggtttgaactagatcgaggtcagacaaacaagctgctccgtttgcttaaaccatcaccatctgtaaggccaccaacgatatccagagatgttgtaccaccacccagaaagcctattccggcatcttctcttgcacagataggtgactcgggagcaacgcgtgttgataagtggagcaatctgttcaaatcttccgatgagtctaccaaaaacaaagaaaaagactcgaaagaaggtgcactcggagcaggttcgagattaatcaatcttggaaaaactaaagaatgggaaatagcttccaataattcagatgagcgaagaactcaaccatcagtgtcacagtctggtacatcgtactcatcggctctgagacacatgaccgcttcttcaactctggagaagacaaatcctttgaaaaatgaaggttcatctcacgcatgtaaaggtgttgaaaatccttggacatctgctgctcgagttccatctgtacgccaagaaagtgaaggattcagaaatgctgcaaaggaatgtgaatatgtcaaagtgaatgcttatcatcatcagcaaaatctccatccaacacaaaagggaacctctactacagctaactataggatagtacctagcattagcaaggaagatcctgctgaggatacatattcagtcatcgattgggatgcaacatgttcctttcaagtccatctggatggactgaacaagattttggaggatcctaaggataaggaatgtttcaagagcttagcgggtaacacaagacaagcttcttcatctatggtacctaacagttgggaggatgactttgaggaaagaagtatagctaaatcgccttgtggatcctcgtacgtttctgccgctacaggagacgtggttgatgacatcggacgtatggataatttcaagatggaaattggatctcccactgttgtggatatattgactgaggtaagtttaaggtcatacatcgttctctgaactataaaaaacagtttagcttgtgatcctctaatgaaacaactatgaatatgtttttctctgctagctattggcggaagtcaaggagttgaagcatactcagctgaaacaagctgagaggatgattactttggagatggagctggtaaaaacactttgcaaaactcgtaaattgatactttttctttttctttttcttacctagcttcaaatgcatactctcttatcttttgtttgggttctttgcagcttgaaacaagaagggatatacttcgggtaaaagggagcaatggaagtttttaagcatatggtaactagctactttctttcttttgaacaaatgcgcttaaaggaagaatatggaaatgatttgactcaaagttcgaaactggctcttagggaatactctttggtatgcttcagtttcagattgtattgcagaaaactagtatatggttgtttttttttgagctcacttccatcgttctacttcttcgccataaaaaggtttgattctaactatctcatgaaacttacattgccattaaactaaaagctttatatcactccaaatgtacttatggttcactttttgacaagcaaaatgaaagttattaactagacatttgagagttcttagacaaaacaaaccataaatgcagatatttgtatataagcttcatttctctcatacctccttctctgttgttatctttagacaccctcagagcaccataggattgtccctataagaaatcaccaaattccaaacataagagttgtttacactttttaaaattttcagcggtttaatcaccgaaacagattttcgattgcttctgggtgctatgtgcgaaaaacgaaagatcaaagagatatttcacaaatttccgtctcaattacggacctatattcaaaagtttgtccacgtaatttattctaatgtttgctaacaaattcgttttaaaagtcagaacattacctctctagtgagttgttgtgtgtcttttccgtctacgattgtttcggccaaaagggttcatgaaccactctggtttataggaaacgagtatgtatccaaacatcaaaccaaaggcaataccaggtccgaatcctattgcagctgctatccaactaatcagatcttcgtcttcttcctctgtttccggcgtttcaaactgttgatgtgatgctggcgtgtgaatatctctgcaaacttcttcaagagaagagccgaaaagtcccatgttatcttcaaaggaagagcaacgctgcgttagaaactgctggcctcctggtactaggcctgcaagctggttatgagagaagttcatatacgaaagcaacgagaggttccctatctcttgtgggatttccccataaagcttgttctgggaaacatccaacgactcgagagctgtcaggttccccattgatgaagggatgtggccggtgaaagcattgtttgacaagttgagcacgagaagctctttcaatagaccaatggactttggaatctctccttcaaatttgtttccggaaaagtcgagtgctgtaaagatttttaggatacgtaccatctccatttctaggactttattcatcacaactattgaatcactgtaatagcttgtacccatgtactctccattagaatgatcttcattttctccaagtaaaaccattgtcgtccaatttacaaagaaatctgatggcaaagttccgttgaagtggttatgggatacgtcgatgattcgcaacttagaaaacctggtttgttgcatcggtccatggaatgcatttgaacgaaggacaagaacttgtagctcttgtagagaactcaaccagaaaggaaatgtatcattgattttgttgctttccacattaagaacttcaagagaagagatacgaaccagagatcttggaagctttcctaccaaatggttatgaccgacgtcaagcgactttaaactttcagatatattctcgtggaaaacctccactaaaatgattctttcttagatgtagagcttgaagagcactactgaaatttcccatgcaacgtgggattgaaccattgaatttgttgtcagataaatcaagcattgctagagagcgcaatgcacatatgaaagctggaatatttcccgtgaaattgttgttggcgccagaaaaataattcatagatggttgccaggatgaaggtaccattaatctttggaatccggtgaaagtgttgttggaaagattcacgtagtccaaatttggtagagtccataaccagcaaggtacttgaccattaattttgttgttggaaatgtctaaaatctccgttgtttgttgggttcttaggaactcagggaactcagtgacaccccatccggacaagttaaaccgcgataacaatggaggatttgaaactgaactcttgtttgtgactgaaacatggttgcctgagaggtccaatgtagcaagtgacttgaaacttgataagaatgtattaaagtcaactgtagttgttgtgttcagatgggataagcgaagatccacgagcaacttgagatccgagaagatgctaaagtttactgagccttgggtgttgaaatgagaaaggtcaagtgtgtaaaggttgactagtttggaaatggatttgtggattgaccctctgaagttgttattgccaaggagtaagtctgatagtgatgaagatatattcccaaactcaagatttccattgagttggttatcactcaagtcaaaacaactcaaagaaggaatgttgaggagatatgaagggatagttctagtgaaagcgttggcgtctgcgtaaaataacaccaagtcggagagcgagctcatgttaggaggaagcttgcctgtgaactggttgcgggagagtgattaatttgacaatttagtagtataaggggaaagtttccactaaactcgttggtt

SEQ ID NO: 16679 - DNA, 2139 bp, Arabidopsis thaliana landsberg
gggcagataaaagaaaaagtctgaatgcttatagttttttcaaagtaaagccgagtaaagtagacaaagtatatgatatgctggttcataagggaataggtgactcaacatgactcatagcttcatggtcctaacatgtacttctcgaacatatattagccatgtaaatataaaggaaggtgatgctgattttggttccacatcttgttctctgttagtttcgacaacttgacaatgtctgattgttatgaccttcaaaggctgtttcagattttttgatacaacgtttaaactgaatattgtaatgccttaactcatctgattccttcaatttttgttatatgagatcagaaagtcttgagacattgcatcagttttcaggaaaaacctaaataaaaccagattctttggttacaagaaactacactggatcagattgccatccaacaacaaagaaaaaaaaaaaacagacagaaatccaaaaacttaatctacatgaagccaaaagctttaccatttctaaggttgccaactttgagtcttctcccaaggcttgaaaacaccatcatgagaaacatatttcaagtaaaagaaaaagccacgcagcaacttcaaagctcttgccttatcaacaccaaccacaagcttgtattctttttcgaaatcagggaaactttctagataagattgtcccagttcgtcagtctcataatcagatcctcttccctttcgtagttctctgcatcgagtcatttttttatggattgatacgtaccgatggagctgcttcatctctccttcatcatatggatttttcaaaacatccattagctcctttctaaaccaactgctactactttcattctctttgcttccttcatcaagatcaaccactttcttggacgccacaaacggtgtacactcctctccatccaaaaaaggggaatcacccatcgcaattatataatcagaccaatcatcatgtggttcaaccttcacttctactagtggatccaatgcaggtaccatgggcgattcttttagagcatccatatcatctttctgaagattttccattggctcagttgtcgaatcgctaagagaatctacaagccatgtgaggtacctcatgtaatccttatccacaaccgcttcactcccctcattcttcttccttctccctacaaaaacttctttgctccttgaagaagtctcatctacatcattaacctctgtaactctatgtactcgctctacgtgatcaatctccgcagcaaccctcttgtcttcttcagttctaaccaatggaacatcttttattaaagcatcgtcacatttcctctttcttcgttcagcaactctgatgtctctttgaatgtcttcttgagttttaaccaatggaacatcatctcttcttaaagtctcagcctttgactcggaaagtttcttaactttgttgtctcgttgttgaatgtcttcttgttgggtttcgagtgaaggaacgtctcttgaagtctttgcagcttctaactctgcgatcctccgctttcttcgttcagcaactctgttgtctctttgaatgatttctcggattttaactctttcaacctcaactccaacagttttcctcttgctctgttgattaactctgttcttcactggattctcattcccaagcttagatctctttgaatcacaagaaaagatctttaatctacgaatgtcagatgctccattgtcaacttcaaggcgagtgcttgaacttttcttatcacctcttcgaagatgatccaagaagacgttgtactccttatcaaccataagatcatcatcatcatcatcttcgtcaagacagataattggaacatcgattttttcagacatttcattcaccataaaccttgtatatccatcatcaatcacaatggctttcttcttcatcgcaatcaacactctattaaattgattaaaaatagaaaaaaataggaaataattatggaagtaaaaaccctaaaacgatcaatccgttgtcgctgaaaccataatgcaggaaaaaaaaaactatgaaagctagaaagataaaacatagaaggagcaaaaaaaggacgcagaatcgagcataccgtttagagcgactct

SEQ ID NO: 16680 - DNA, 148 bp, Arabidopsis thaliana landsberg
tggggacggttcgttcggatcaacacgattgcccatcttctttgccagaatttatatattgacaagtgggaagcactacgtgcttttatggttcaatcgtattcccgcggagcctcctttcttttcgggccgtggagacatattgtgc

SEQ ID NO: 16681 - DNA, 237 bp, Arabidopsis thaliana landsberg
gatgattacccagactcaaaatggttcttgagagtgctcgcaaagattaagggttatgtggatgaatgcaaactcgaggctattcctatcttctacaaattggatccatccatcgcgagaggcatgaggttacggtttggtgatgtattcaaagatgtgaggtcgattttatacaaagtgggcatcaacaataataattacatgaatgctttttttttccactaggtagaaaccata

SEQ ID NO: 16682 - DNA, 1799 bp, Arabidopsis thaliana landsberg
  unsure (1)..(1799): unsure at all n locations
tgatttcttcctcttcagctttcagagactgcgatggatgctcttcagaggctgcttctgacaggttcggcgacggtgtcacagatctttgttgcacgagccgttaaagtccacaaaaaatcgcattcatcttcaagaaagatttcaacttgattctctttgagcgaaagtcttcgaataaacgactccctaggcaggtttaatttgacatgagaaaccctaactctttttccctccaacctagacattaagtaatgggcttaatttgttcatgggccttcaaaacaaatgggcttaggctgaatacctaaaataattagagcctgaaacactaaacaaaaacattagtgcatacttgcaaataatcccattgattcatatcatcccattgatcaacatcacatgttagcatagttcagattaaaaatcatttagcgaacaaccattcactcatgaacagagtttagtgacccagaaagttattgaaacatgtgagtacagtaagttggattcagaacatttttatacctttgagatctgttccgtgttccgtgccaaccacttgttcagaactcagcaagaagctaccataaccactcagatctttgatagatcaactctggatacagtggctagtctttcacactgtcatgccttcaattccagtagatcggctcaacgtataacaggcagctggaattttcctttggagattgctcaaagaatcaggagtgtgatgtttttatttccacacttccttagatttagatacaacagggttctccttttttttcttttctttttttaaactttggatcccggttgatctatcagtttcatattagcagcatcacttgacttctcaactgctgatatcagtgcatgatggtcacttgacaccaaattaggctttagatacccttagtttggtttgcacaatacattgatcttctcagcgctttgacctttgttagacgacaacgttttacagctgactatagaatcaacatgacaggcagctattttccacacacctttattcacagagtgttgatcttctattcatccttggatttccatagcctgttcttgcattttttgctcttgtcttagatcaacacatctcacgaaacaaattagatctcacgcacaccaattaactttctcagatcactgaggctattaaagtccaagattttggtacacaaatcagatagttgatattcagtactcacatgatcaactactatcagtttcgcctcaacaagtttacagatgaaatggtgtagaatatcaatatgcttagtgcgtgaatgttgaacaagattatttcctatgtttattgcactttgattatcacaataaattagtaaagaatcagagatcataccatagtccgctgccatttgtttcatccacatgatttgagtgtagcaactccttagagcaaggtactctatttcagtaatggatagagacacaatattctgctccttactctaccacgagaccatgttgctacccatgaaaacgtatccaccacttgtacttcagcgaaacttccacggatccagcccagtcaacatcttgcactgcatcagactcttataatgatattcaggcactgcgactcctgatatgtacagagactcatccactttgactccagatatgtacaaagacatgtacaaacaccattagattcagttcctgattcatccgccaccagcaggcttggtaactntctcccccgaatccttcccatagcttcatgtggggatgtgattgatacttactag

SEQ ID NO: 16683 - DNA, 1507 bp, Arabidopsis thaliana landsberg
actgaattttgattgggaccctattcatagacatagttaggtactaaatctacaaaataaaaagaagtataagcagtaaaataaacagaaaaatttgtaaaaagctcaaaagagatactagagagacagcaaaaccgctgctttattaccaaagaggctttaagtcctaagaaaagggtatagctcatacctaagattacaaattgtacctacaactctcgctccttgtttaccatcacagcacttagaaagctccttgatactccattccaaacaatccttacaactcaatatgtccttcgcacattgcaccattgcaaacaatgtttgcttcccaagcctcatttcccctgccgcgtaatatagaaagttgatcccgtccacgtcgagtctatcagcttttccaatcagtttgtagaggaattccgtcgtctttttgttgaatgagtttacattccctctcacgttgtttgggttgtgcatagaaaaaatattatcgtagttcatccgtcttggggaattgtcattaatcatactaacatcgagaaaacattggtcatacctattattccacctttgtttctcggacacctactacgaaactgtaatatacatatacatattcataaatgtttttgtaggaaccgtgagatgtacacgagatcagttgtatgcaaaatggcgaaatgtacctaaaagttttttttgacatatgtacctaaaagttgtcccgtaataatctaccaaatgatatgatatagaagatatgtctaactggatgatatgtaaatactaaataccaatcataataaatgttttgataaataaaatcaagttaaaaagcaatcttaacatttcaatacaagataaccttgcacctttgttgttttcacctaacgaaaaatcaaatagttgtgacttaaagagagatgacttaatatataaatatatattaacaagaaagttttggacgtaaataatcttttccaaatgggtaaataatcttgccaacaccaagccaacacctagcacaccacaaatttggttgtatagtgtatataacagttatgttaattgttatcggttgatgtgtataaaccaactcacatttgtttcagctaggtaattctaactctaacctgaattttggtttcttatagtcaattttcttttggctttagttaaggtagtggtttatagcgaacgacaagatatagactacacatatgcaaacatgttaaagtggcattaccccggcgagggcggtagcatagcaggagttgcacttggacctgtaagagtcaccacgacattggaatatgatggtgacagatttggtatctctactattggaccggtgtgtgaaaccatctgtaaagtcaagggtagcaactctacggctgagagtgttgagttctttctcgtactcacttcctggttggtattttccttgatcaacgcgacatttgtggttcagatactcattagtaagattcaaggaagacgc

SEQ ID NO: 16684 - DNA, 2080 bp, Arabidopsis thaliana landsberg
caacagccgtaaacctaccaattcatgagcatcctctttttccttcagctttatgcatgataggtgaatgtggcggctgccatgtaaatggttacatctacaacggctacttttgcaatgaacctttctgctttatttggttccataaagagtgtgctgaggccccagcggagatcagccatagttcccaccgtcaacatcctctcctgctcaccaatgactcgaatgatggccgtccttgtgatctgtgtggacagaagctattgcctccttgttataggtattccacatgtgagttcaaggtggatttgacttgtgcgatgaaaccatcaccgcctgctattgaacatccgctgtgtcatcaccattcacttgtcttcttgaagaaacgagaggagaaggttccttgtgacttatgcaaggagtctattgatggaccctcgtattcatgtcttgaatgcgatgtgtacttccacgtaaattgcatccagctctccaaagaggtaaatcatccttgtcactctgatcatcctctcatgctcgtcgaatctgaatcacttacagataatgataagaagacttgttttctatgtgggcaacaaccgcatggtattctttatcattgttctatctgcaacttcacactgtgcattggttgtatcaaatcaccaccacctcttgttgtcgagaatgtgaagacgcacaagcatcctcttactttctttccaagaggagtctactgcacttgtaacgtttgtggggtaaaaggacttatactctcttatatgtgtcttcagtgtggttttgcggtccattgtagttgtgtagacttacctcaagtcatgaacataaatcgtcatgatcatcgcatttctttcacacagcatcttggtcctgggtatttgaactgtggagtttgccgaagaagtgtatgccaattcaatggagcttattcttgcttagtttgccccaactatgcagttcattcacggtgtgcaacaagatatgacatatgggatggtgtggaactggaagggaaagctgagaatattgaggatattgcgccatttaaggtggttggggatgacttgattcgtcattttagtcacagcaaacattctttaagactccacaagaacaatatcatttatgatgatagtacacgatgtgaagcatgtggccatccagtcgaatttggtcgaatatacaattgtgaggaatgctgtttcattcttcatgaaaagtgtgctaatctccctatgaagaaaaggcttgtcttttctaccttaccattcctattactgggaccgggtaatgatgtttgcaaggttttagattgcaagttatgtggaatgttttttactggtttcgagtacaagtcccaagaaaggaggcaaagcgatatcgatgtacattgtggttcccttacggagccgttcgtccatgatggccatttacatcccttatattttgatcaaaagcaaaaggagcttccttgcaatgcttgtcaaaaaaccataagagattatatgctttgttgtgctgattgtgacttcaatttgtgtttatggtgcgctagtctgccaaaaaagataaggcatagcaacgatgagcacattctcacgctatgttgtggtgaagaagcaaatggaaaatattggtgtgatatctgtgaggcagagttggatccaagtaaatggttctatacatgctttggttgtggaggcacattgcatgtggaatgcgtactaggagatttctcacgtctcatgccaggatgcaccattgactaccgggtatataccgtggaggtggttttcaataatcacaacactcgaccaatgtgcaggcggtgtcactctcgatgcaaggtttctgtaatccttaagtttcgtgagggtaacattgtatattttttttgttcacgttcatgttttctgatgcatttctcatattatctgtgaggcattgctaccatttttcatgtgagaggaaaaggctttgatgttttattctaaattgatgaatgtatcttttacggtggtttttcaattcttccccctatttaatcttattaaaa

SEQ ID NO: 16685 - DNA, 743 bp, Arabidopsis thaliana landsberg
tactaaaatacaattgaattcatttaattataaagtttaatccacctcaaaaatgaacttttatatcagtttgagttgacaaaaaagagttagggtttagattttatgattaaacaaagtgaaatctctgtttgagtttataaacatttagattttataattaaacgaggttaaatattggtttaggtttagaaagaattgttagggtttagattttacattttaacaagtttaagtatcggtttggagtttacaaaggagaactaaagttagattttgtaattaaacgaaattatatatatcagtttggattaataaaagagtggttggattttacattttatagattttatagttaaatgtttttttattcatttattagctggcatattccgattggctgaaacaaaaagagtgaataacattagtagaagtgaaccaaagtattctttgatttcaatttcttttcctttggtctcttctaatgaaaaattgttactactatgaattgaaaattttacttttttaaaattctacttttgttttcactaaatctttatactggtataatattacacattattctaattatatttttactctattcaacagttacacatacaatattgtcaattaattgttaagtgaaaacttttaactaaatctaaatttagcccatgggccttaaaacttaagtattattagttaaaatggcctcgatttcaattccttttatatttccc

SEQ ID NO: 16686 - DNA, 2419 bp, Arabidopsis thaliana landsberg
aagttgtgaatactaagcataatccccaggttaggctttaagctgccaatcaagtggtaatttccttcttgtactcgaaacatgtttggtcctttaccttttggcatagagttatcaactcttccaccaagggaagtcattgcaaaaatcatattgtagattcagatgttgtctcttaaatttctgcttagtacatcatcacctgtaagaagcttctttataagcgcaggcgaatctttaagaagtggtagcttaacacttccttgtcaacaacatagtgtaaacgtaggaggtttgtttttctgcttcttatttatacgctcggcaaaccacatcaacgccccacaatagttgcacttgtatgttgcatcaccatgatcaaggtaagcttgtcatgtaaatagaaaatcattagggaaacaaaagtaactctaaaatattatacatacttgttatactgtaaagtccgcattatacctgatttatttgtattcccagccaaacaggttgtatctttattcaatcgtggccttcctcttttctttggctgcgacaaattctgattttgtgctgcttttgcagccgttttcttaagagtagcaatgaatttttcatgttctgcacatttggcgatatgaggcgttgtaggttctgtcgggtttgcattattctggcagatgtcagatgatgggtcagcaactggaatagaaatagtagattcatcatcagtatcatcttcagttggactgagatagtagtgttgatcctcatctgttgcattggttgatgaactatcatagttgaaatcaggcatggattcatcatcagacatttcacaatgaaagtcattattgatggtggccgaactttgacctaataattcaaaacagaatgtgtaaagattagatgactaacattgtgtgattagacattataaattgcacttcataggtaccttgagtaataggagagtggaaggcattttcaaagtcattttggagatttttccttgggaatctgtctttttctgtctgcaaagtagtctgtttgtgaaagaacatgcaagaagtagtactttcgttttggctcgcttgaaaacaaagattgcaataattgtgttagacttttgtttaaacattgatatttaggttttgtcattgtatcttaattaaaaatctgttcaaaacactaaccttttccttttccagttgcagacgaaagccccatggagggaaggttggtcatgtctttaaatacaacagcttgagattgcttcatatgtctggagtttgcttggaccattgaagcaagtccagaaacagcagtggaccctaacatttggtaccgcgaatgattaattcactcttctaactaagagaaccaatgcaattagttaaattcccaaaaacagaaataagcgtttacctatatttgttgagtgatttttttttgcagaataggattgttgattgttagatggtgtcaagaagctgccaacagagctatacccaaggtttgtaatatctttaaaaactttagagaatgctgaagtaagaggaactgttgcattagtatccgcggtagtactgtgagttatttgactttgtggtgtttcaatgctctgaaaacgggtcctctttgatggattagaatcaatatttgtttcaggagaagaagaaacttgtttgtttttcatggctgacttccaatgaaaagaatgattttgcgtttaatgagtatggcgtctgctagagataaagtgtgtttttttttttgcgaaaacctaaaatcaattaagccatgattttaggcgattttatagttccacatatatagaattcggattcacctatagcttgattttatttttatatttttttatggtggctatagacatttaagcatctttttatttttgcagcccaattttaaaatctgtcgtaccgtgattagttggctacatctggacaaattattgtttccaagttatgtcttatggttggcgcatagaccgacagactcgatattgttataaagctctgattatattaaaaccccatatctgccaatgatatatttagtcttgtctagactatcacaactcgcgtccgcggtacgggttgcaaagccttaggccatgttcgtgagaaacgggactcgcggtcagacggctcgggcgaacggatttgttctgggaatatgggttggctgactacgggcgtccacgtgacgctctcattctatcctaggcctaggacggagtaggagtgttacagttactagctgcaagtatgcttcaagagaaatttctaaagtggacgtctcaaagatcgagctagctcagcctcaatttgaggcagtagagtccaaagagacgtcacgcccgaacaagaaataaaagagcgactcaactcccgtg

SEQ ID NO: 16687 - DNA, 1111 bp, Arabidopsis thaliana landsberg
caagcaaataccacagtgtacattaaatcatataaatgagaataaaatggtcattttatcctagcaattattttagtacatagttcccaatggatgaagttttgccatttagttcagctagtgactaataggataagcataaaatcaaaaccagttcagatttgtagagaaacccttcaattacaagcacacagaaattgcaatcgaagagaaaaccattacctgtgaagccatgtcctatagtaaagctcctcaagagatttaaaacctgtaaagtgcagagtgatgatgtcaaacgttatatagtcttaaaactagataattagatgattatttcccttactctcatctcatttaaataaataatcaaataatactgtttggaatatacttcaaaagtgataaagatgaagagtacattaccttgttccatgaatagatcaaagaaattttcaaatttattaaagaaggcaccaagaatttcttctcttttagtaggtttgacggaggacaaacgtcttttagtaccgcatttatttacgtttttggttgctcgttgtccacattcaatgggacacgggcattaagaaacaccagcttcaataagactaagagcagtgctacttctaaaagatacttattacaaacttctaaagagtaatgcttattaccaacactgacaaggaacttccttgatctatatgtagaggtacacaaaatgcctccaatcttaaggccattcaagtatagatcatttggccactttattttaacatcaatatacgacaaaccctgaaaacaaatgaacttcaaatttctgatacaagggatcaaaacacacaacaaaaaggttattttcaagaacataccttcttgtcacaaacatctttcactgcctcagtaacagcaagagacaccacatactgtatcaaaggcactactcgaccatctaccatttctaatgtaaacgaatacataagacaaccttgtggagactcccaaacatactgaagtctaactgcaacaacacacacggagttcgggtctcaattatcaattctacatgcttaactcttatctaatccattattgattgaaaaaaaacacttac

SEQ ID NO: 16688 - DNA, 607 bp, Arabidopsis thaliana landsberg
acccatccaagattgctccaagtgagcactcttaactttgaggtctttcgaacatgcttccaaaaagaaaggcgaaacatgtttgtttggtacaccgtcaatcttataaaacctggcccaagatagcacagcccgtccagatgagaatatcacagtattccagctgtttgggtgctgccttactcttgtccgacaacagagaaggtaggaacaattgccaccaacataagtatctgctcatgaacattccagaaataattcatggcactttgcttccaaatatctctaaatattctaattttggaatattcttggaatattccttttcccttttccttttatattcctatgattataaaaaccaaaactcctttgtccagtctctgattttgacagttctgatttctaaattcttatcaaattaccctctatccatccatgtaattccgtaagcatggttcatattctagaaaactccaaaaatactcttgtcccatatttcacctataattctctatccaaactgattctttcaccacaattctcataaacagtaaactctaccatactaaaccatacgcacccatctataaatacctccagagag

SEQ ID NO: 16689 - DNA, 1566 bp, Arabidopsis thaliana landsberg
  unsure (1)..(1566): unsure at all n locations
aaggctttgaataaatctcttaattcatcttttgtcaacctcacactcctttggacatttccacgcgtctctcacacgctcttttggggatccttttgatttgattttaaatagtgggaaaccatactttcgtactagtgcccactttttatcgatgcgcacaagatgaagtaaacaattcttaaatctttttacaccaacgattatggaattggaagttgtcaagattaatttagacaaaaaaaattataatgttaagggataagaataaaagtttaatttgttgtgagctttcgacattacaaaatagtcaatctaacaactgatgtttataaaaaaagaaccattcatggataacacatatgtattccattttatatttttccaaaaaatgtgcttaaatgcaatataaaaagtatgtagatagaaagatagtgattgtcacttagcaacatannnnnnnnnnnnnnnnnnnatactctaaacatgggatactattgtatcattcattaccttttgagaatagcaacagcaaagcacatgtaggtaatgttataaaaaataataatatgagtagtgtgtttatttagttcttcccattctacaactcattttaaaaaaagaaaaacaataacataaattttgaaataaacacacaaatttactaaacattttattttcggaaaaaatattattctctctgtttcacaatataaattattttagctaaaaacacgcagatttaagaatatttattttgaaaaattttaactaattattatgtaataattataaatataaaaataaaatataatttgtatagaaatttaaaaataatttgtattgtaaaagaaaatttggttcaaaataatttatatggtgaacaataagaaagaagaaaagaaaaaagaattttacgagtgaagcagagtgtgacacacgtgccaaacgaggggagcgcgtgatctccgcgagtaaaaaaggttgacaaatttacataaaatcaacggttcacacggcgagtaagataagatgacgtggagtttgctacagctgtcgagaaaaatgcttttatgccgttgttaccattatctctcgcctcgtgatgttgattcctctttgtgttagtcaatcgtacggcttataacgaatcacaatctttgtagtcattcatcggacggtcaaagctattataaatgcttcaactttgatccacggtcaagattctcctgacccagtcaggggtgcatgagccacgtgaaaccttcgaggacgagtttttttagcaaaaaacatatttagctccaagtggcctgcacgaggcattgtatcacaaaaaacgcgtggacccaaacccaagcattcttttattattataaagatacatacaatattactaaaaacgagttaagtcaacattaatttaaacattgtgtgtgactaacccaatttttttttaatttttatattctaaatcaaggttaattgaattacctttttaatttcctaatttttggtttggataaaattcaactttttgaatttggttttcagaccaaaaccttt

SEQ ID NO: 16690 - DNA, 2302 bp, Arabidopsis thaliana landsberg
gacatatccaatgtacaatttctcttaccaagaatcaatgaatctaatgtatggccatgttttgtttactagatcaagaaatgtttttctttattggaactccgtgaaattttggtaataactcacatcttacgacaagtgaatttaataattctatcagttttgtcggatttttgtaatgtagttcccatgaaaaagaaagaggaatccgtaatgtagtgtttgaatagcacataaaaatacaaatttcttggaaagttgaggtgccgtgccccctttgttaccaaaatgtaatagccttactcaatttggaaaagtttgtaaactgaggaccacaatcattataaattgttgtttaaattggttaatttgattttgtttttttaaccactaaaattagattgtatgtgatctttggtttcatatcatatttgaaaattttcttaagaaaatagcatttaaaatcatcaagatatctttgccattagatacaatttctcttatcaagaatcaatgaatctaatgtatggccatgttttgtttactagatcaagaaatgtttttctttattggaactccgtgaaattttgctaataactcacatcttacgacaagtgaatttaatattctatcagttttgtcagatttttgtaatgtagttcccatgaaaaagaaagaggaatccgtgaaagttttgtctgatttttgtaatgtagtacccatgaaaaagaaagaggaattactgaaagagagatatttaccaagtgagattatggttgaatgaagatattgaaggctagcttggagcttgtgagttgtgagagtgcgttgatgtcgaggagcttgttctgatgaatatgcgagcattggtttgaagaaatttgatgagtttgccaggaaaacgttgtaaatccagggagccaagaagccgcaaacatcactacttgaaagcgcattaaaagaagaataattactgcagaaatctccgtaaagagctttaatatctaaattacaaaaaccctacacaactgaaattttcttcctttcgggtcataaattcaatcaaagtcacagaaaccacacatgagtagcatatcataggtggagaggacaaatataaagaccaaaacatttctcaaatctactgcaagatcttaagttttccctcccttccctgaaacatgaatggttcgcaaaagaaactcatgtgattgcaatataatgtctatttctatgctactccaactggcatccttcaaatccattgaaccaagtaacatgaagaagctaaagtttgctgctttcaagataaccccatatatgaaccaatccacaaataaatccgaataacaacacaattgtttacggtttcacacattagccaaactaaaccagttaactcagacacggtaacgtaaaaacaaggctacctaattacttaccaaagattcatgaactccggttcagtggattctgagttaaggggactagggttcgaggaacaggagtgaccttaagaggataagccatggtcaagctcagtcctacattagcctcttccatgttaactttctcttctttgattctccactcaaatccctgtaccatcactccaattgcagttcctaaaaagatatatgctagattttctccaggacagcttcttcgtccgcttccgaaagcaatgtacttaattgcttgctctcttctctccttttcctgctctgatcttgacgaagctagaaacctctctggtttaaactcatcaggatcttcccaagaatcagaatctctcatcacagcataagcattaatcattaatgttgttttctccggtacatagaaccctccgatcctacacccttcttgggagaaccttgcaaagagaggccccggcggatgcagtcttagcccttccttgaccaccgcttgcaaataagggaggtttggcaaatcagtttcttgaatcaaccttgctttcccgaccacggaatcgatttctcctctcaatctctcaagaacattagggttattaatgatctccgccactgtccactgtgttgtttgcacaaaggtgtcagtgcttgcaaataagagatcctgcagttgcaaaacgttttttcttaggcaaaaaagttatgcattctcaatgaaaccaccttatgggaggaacatttaccgcgaaaaacgacttgatatggtcctagagatcttatactctgcatttttgtccgacaagctgcaacaacgcgtcactaagtctgtacttgatgatcatgccagtttacgtcatgtccacaag

SEQ ID NO: 16691 - DNA, 1455 bp, Arabidopsis thaliana landsberg
ttattgatgtaccaactccagattcgttgttttaaatcctacgtggacgcctttaaaagcaaatagcttcaacttttatatagtatcaaggttttaatataggaaaaaaaagaaaatttactaggaagacccatatgttaggtttaattactagaatgatataccaaaaatatgagttatatgagttattaatatttgctaatgggaacaattcactgatgctgtgagatactttgaataacagtatcagtgaattgttcccatcctttctttgcatgtgaattaggctgtttacaccttactgaattagaaagcaagttaaccgacatatttgtgagaagaattttaggattttgacagttttatacatataaggtcgtcacacgataagagacactacctgtaagaacaacattcagcagcaacacaccctaaaaagaaaaccaaaagtgaattgctttaccttctccaagtaaaactgagaattgatggcaccaataagtagagatgttccatttacctccacaacccatttctaaagattaccgtgacgtgggatggaacagccaactgatagactttagtggtattaaacttatttgggacataaaattagtcaatttcaagtcacttggtctcagaaccctatacgagtggcctgccctagtcgaaacgctcccagacacaattaccaaggcttcttctttgctcaagttctctgacgccggtgaagccatggctcaccggcgtcgggtttccttcttttgtttctgcttttccatttttttctctttagttacaacttggtttcaatttagaatcattttctgtgatttgactttcgcccagatcctacaaagttggttcaccgacttgttgttcggcgtctctttgctctcatctagggtagatctattcccggtgtgttaccagaggccctttcaccagccgctaggataccccagatctgcttttcacgaggttagatatgtcgctcttctcttctccttcgtccccctggaatcgcttttccccgattcagggatgttctctggcgcctcctccagaccccccgccgaccaccatccttctcatcctcagccatcctcacagttcccaagacagttgacgatggaagaccaacacgggacgtggtgacgctttctccaacgatgaacaattcctcttggatgggccatttttctgagatgggcctgggcttctacatctattgggcctatggtgcctagtaagtgttttctacacatgctttcgtctaaattttttcaagttggttgcttctttgttctactcaagtggccatgctgccttgtatttcttcggcttgttccgaatcaaccttttaacttcctccctggtgtagagatcaatttccttaccatcctccattttggagaggcatctagccactcatttatcctccttacttgaaga

SEQ ID NO: 16692 - DNA, 899 bp, Arabidopsis thaliana landsberg
catgctactccgtgaatcccttaccattagagcttcaaacatatttttagtataattagaattgtctttaagaatgttatagtttggataaagaagataaaactataaattattcaagaatagaacacaaactcttaccaaaagttgcagtgtagaacgttcttctaacattcgtagcgcttaaattgcccgtgatgatggttgaatcttgaccatcacctataagagttaaattgggtttcgtattctcaatggcgacgatttcatcataaatgcctgtctttatatagatgatgaatctcttgtggctgtgttgaggtgccgctgcaatggccgcattcactgtgttgtactttccggtcccatctttcgcgaccacaacatcgacaatcttttttagagcctgctttataaaaaacagaagaaattctataagcagtagaaagaaagagaaaaatgataaaaggtttgttaagagatgcaaagatatcgatttacgtgaccttaaggtctatatttatagaactggtgatctctaaggaaaaagaatttatctacaagtaaatacaataaaaggtaaatatacaaatcctaaatatttgttacttgagtatcaagtctatccttaatttgtttttcacgattatcaaattataacttaaaaatattagggtttcgttttattacctcaaaattgagatatagatctttcttgtcaacatgagataaccaagacgggctattgggaaccaccgagttaagttcggtgttgtctctcggcgaaatggagataaaaagagccaaagctacctttgccttagaaatcaggtcttgaagttgtggctcgccccgacgtaatataggcaccgtcaccaatttagtcgatacatgtgatgtag

SEQ ID NO: 16693 - DNA, 1623 bp, Arabidopsis thaliana landsberg
cacgagatgaacacaagggggaaaacgcgctcgtgtaccccgcgccagggggtgtgctcgtagtagggttacaagcattcgcgagagggagagagtgagcctgttcgtcagctcgttcccccgcgcgaccctcccgcatgaaggccctagaccttccttttatagatgtaaggagagggtccaggtgtacaagtggggggtgtagctatgcgctaacgtgtccgacagagaggtgcatgagccctgtgtacatgccaacgtggctgtcggaggagcgcttgagccctgtgcacgcgataacgtggccgttgaagaagtgtctgagccctgtagaagcacagctgtcgatgctgctgggatcctgctgacgtctccttgcttccgtagggggctgagaaccaccgacgtcatggacgcacgcggggaaccatcattacctgttaccggggcgagccagatgggacgccggtcttgttccctcgtagcctgagctagctagggtagggtaatgatgtatcccctgtggcgcggtcggtctgagcccaaggtcgggcgaggcggagacttctcctaaggccgaggccggggtcgggcgaggacgcgattcctcccaaggccgaggctgaggccgaggctgaggccgagccctggggtcgagcgaggcgaagacctccttccgaggccgaggcctaaggttgggcgaggcggagcttcctgttgcgccgaggctgaactcggctgttgtcagtcttaccccggtgggtggcacagcagtcggagcggggcgagcggcgctgttttcctgtcaggtcggtcagtgaaagggcgaagtgactgcggtcacttcgaccttgccgactgaggcgcgcgtgtcaggataaggtgtcaggcgatcctcgcattgaatgcgcctgcgatacggtcggttggagaggcgatttggccaaggttgcttctcgacgaagcctgcccgagttgggcctcgggcgtgccgagggtgcgcccactgcctgaggaggccctcgggcgagacgtaacttcgtccgggactacagttcccgcccgaggctgggctcgggcgaggcgagatcgcgtcccttgggtagacgaagccttgacctgaatcgtgcccatcagtctctgcagcttgtgctgatggtggttaccagccgtgtttaggagtgttgggggtacccctaattatggtacccgacagtaataataatactctctctatattggatgaatgcaaattaaattattgtaattgtcttccgcttattctttcctccgatgtgatgtaatatcggcgtgacgggtgaatcgctcttgggcgaaatgatgaggatatagttaccgaacttgtcgagtgattatgtgcatctacaaggttgtccaaggtccttaggacaaggacaactgtaggtggtcctaataccttgggaggttccgtcacagctggtatctgagcgaaacccatctctccagatattacatagtacttcaaaagaattttcaaatactcaccaagaaatactctttcattcttaccttaccactttctggtagtcccttatcttgtagaattgggtaagagagtgcaatatgtaggaagttggggat

SEQ ID NO: 16694 - DNA, 1719 bp, Arabidopsis thaliana landsberg
atccccgattgaagttcatggcatgagtctcggagagtaactacctcttgatgaaggacatgagctcaagtaattttgtctcacctgtataaaatccatgtaatccatcctgtagaggtgatctccagaaaggatcaatacatcctctatgtccttgcttcttgcatcctatgaaaagaatgttggaccgcttgtctattgatgtgatgataagctagtttaagtctgatttctacctcgaaaagccaatggaattgccgaaccgcatctgctgtaccttggaaccaccttttaccagattctcctggcgtttgagtggccgcaagaacctgaattttttcaaacaattgcctcagatgcatcaaaccagtttggctcgtaatggatgattaagacagaatatcaaacctcaacatagccatctccaaagccaagtccattggagttgtaagcacgggctaaatgcctgttcaatgatgctgagttatattgtgtgagtatgtagactttgttgattccgctgttaatacaattgctcattggtacatctatcaacctataggctcccccgataggaacctgcaatacatgcacattaccgattaattatactttctgctgcaggttattcagcaatattggaaattttgcaacagagaagcaactaacggcaggcttggcgcggcgttttgtgagaggaaagagtcgagttcctgctccacctccaagaataatggaagcaactgtccttggatcccttttctcagtctcaagttcttgtacctggaggtggttgacataaacaaattaatgcagtgcagggcacttttgattagcttgaagaatcgaagaataagaagcagaaccagaaaaggttgaaacttgttaccttactctccccagctacactatttagagacattaaaattctcttctgagagaagttagtagaagatcgaagacgaatgtttggaagctgagacaagttgagcttcttccccatgagctcaccattgcagaagctgccaagcttaatgtgcctagtcaatcccgtggagctactacgtatgcagctaggggcagagagggagattctgcagtcagcagagaccaccattttcgcaggaaagattgtctcttgaagggtttgaagagagggggagataaaagagaagaggagagtgttgcatggaattacattttagttgatttttggaaggatttggtccaccctgtcttcatcaagtcacatacaccaccagttatcattttgtattcataattttaagaaattgatcttttgtcttgatctgtcttgcaatgacatatcctactggagacttgtatcaggaaaattcaaaattgccggagaaaatagtgttaagctttttttatttatgatatatagatatactttccaatttagaatcttcttgtcgtctcatgccatgcaagtataattgatgaatatggtgtaagaaaaaaaagagttaaaacttagaagtctttgctgaatttatttgtatttctgaaaaaataaataaacgaggaataaatgttttgtatatggttgtgaaaaaaacttctatccatatattcatatcaatatcaagtataaatggtcataattacacacttaaatttgaatgaagaaaaatatatccgattaaaacgaccgcgtttggtaaggtagttaattggctacgcggatcaaatcga

SEQ ID NO: 16695 - DNA, 702 bp, Arabidopsis thaliana landsberg
  unsure (1)..(702): unsure at all n locations
ttcttttattcacatcagaaccaccgtctcgggcggagttaatcctctccggctaaacatcttccagaaagcggcggcgattgcgatcgacgcggctgagcgtgcattaatctcacacgagcaagattctccacttcccaaaaccgctgatccacgtgttcagattgccgggaattattccccggtaccggaatcttccgtccggcgaaacctcaccgtcgaaggaacaatccctgactgcattgacggtgtttatatccgtaacggcgcgaatccgatgtttgagccaacagctgggcaccatttattcgacggagacggaatggttcacgcagttaaaataaccaacggttcagctagctacacatgccggtttacaaaaaccgagagattggttcaggaaaaacgattgggtcgaccagttttcccgaaagcaatcggcgagcttcacggtcactcgggaatcgcacgtttgatgctgttttacgcacgtgggctttgtnnnnnnnnnnnnnnnnnnnnnnnnnnnnnnnnnnnnnnnnnnnntttggtttactttaataaccggcttttagctatgtcagaagacgatttaccgtaccaattaaaaattactcaaaccggcgatctccaaaccgttggacgttacaatttcgatggtcagttaaaatccgcgatgatagcccaccgaaactcgacccg

SEQ ID NO: 16696 - DNA, 1500 bp, Arabidopsis thaliana landsberg
gggattggttttacgatgatgattagcaatgatggttataatttttatttctggtattcctcttggagggagtactgctaggtaataactgggtttattactaaaacttggctctacttttagtaataaaacttaaccaactaaaagcaactgcttaagcttaactccacatatagctagtccactttagccaaacgggacatttgctgagtacgttgatgtgtactcacccttgctttacaaaccaccccaccccaggttgtcaccactgtactcagtgctcaggaggagatgctagcaacatggaggacttcgaggagttccaggattacgacgagttctagtttacttagtggcaaaacccccagtcagctgcctgtgtaggcttatcatctacgtttcattcctccgcactttgatagttatgttgaagacaatgattatgtaatagactctgttgatgtcttggacatcttgatgtaattaagtacctttctattatttaattcgagcatggtgtgatgatgtccaattatataatcactgtgtacgtgaataactgatcctggcacgtacatggttcgcattcggtttgccttctaaaaccgggtgtgacacttgttctcaactgctataaatcaataacaaggcaacacaaaatattaaatgtgaaagtccttcgtccttcgaagcattatttcccttaggatataacgatcttcggacgaaggtcatgaaggacgtaccttcatcatcacggttataagataatgaaaaatgaaacacatgaaatatgaaagattatacaaacaaacatgtaatgtcattcatgtgttatcattatataaacttgaatattaaatatgatatttaattacatttataccttcggcttgtcagaaggcaaagatccaagtgttgtgcgcgagcaattacaggatagcgtgaacagtacgggggtactgttcacctatttataggcacgagacacaacccgtgagatattacattcatgccctttacaaaagattacgattatgacacagactctcatggatcaatcggtcatttcatctttaagtcggtgcaatccttcgtcttgagatatgccactatgccgaagctttatggatgataacttcggcactgcttttgaaaggatccgccgaaggtgtctcttcttataggatcttcggcgacgaagcatacccccaatagtgtcattgtacaccaaggcccccttcgggtacttcagttctcgggcgtagtgtttggcttcggcgatttcttcttcagataacctttttaccgaagcatgacgaataaagtcaagatcttcggatgatgcttcgggaataggagatttagctttttcgggtgcgtcgttcttccccatagccaggccagcatatggagattcttgttcagttccttgcctagttctagcagactctgcctcagcgggcactgagggccagcttcggtttcagtgcgacctgt

SEQ ID NO: 16697 - DNA, 521 bp, Arabidopsis thaliana landsberg
caataattgaatcggacggctgagaagatgcgaccatcggctgttctgatgcagctgatatcgtgcggtgtgatgtcgtttaagaaatgtggtccgacgctaatgaatgggaacacgagatctacggcggtgcgaggaacagggaattataggctcgagagggcagagaaggaattaaagagttttggaagggtaaaattggaagagaaagagtattttagtggtagcttgattgatgagagtagtaagaaggaacttgttcctgctttgaagaggtcctcttcttacaatattgataggtacacaaaaacatcaacaataatcataataacattataagttgctaagtaagtcacatctaagatgatgaatttggtatttacgttgttctaatgggctaatggcgattttaatcaactaatgttggcttaggaaatcaaggatggggttgacgatagataaatattgggaagagttggcttgggctacttttatttcgggaaaccctaattttgtggttg

SEQ ID NO: 16698 - DNA, 416 bp, Arabidopsis thaliana landsberg
acggaaaggtgcaccaaatttagtactttgaacagccttattttgcaaaccttgagatagtgggattttaaaacgcgaattattaaaaacatgcatgggctctggccattccggaagaactggtttggtgcagcagcccaaatgaaagctcttttacgaggttgagatattccatatgcccctgcctccaagagtccaaatctcacctacatgtttcaacaaacttgttatatgaaaaccattgctttgtatcatatgtagccaacttctactaaagagcaatcatgtataagaacgaccatgacataaaaaataatagcattaggaaattaatattacctggtaacccatttcaagaagagaagccaaagtaagctgaaatgtatgtccttcattgaatgacacaaaggtcctca

SEQ ID NO: 16699 - DNA, 726 bp, Arabidopsis thaliana landsberg
aatccttcgccggcaaatcaagcgacttccctcccgtgaaatgaaacgcaaccgtcggtactttcacagtggagagagacgagaaatcgtaacacgtgtcgaacagagagatgctcgaagatccttttttgagattcacggtgagtttaagaaacgcgtcacgcagcgagttataagcctgcgtctgaagacgagtcacggcggttccacaatccaagatcactcctccgcttcccgaagcatcgacatcgaagatcgcatcaggcagcacgactttttcaccaccgacgctgaatccactgagtccgacgtagtagaaagtgtcgatctttttgttacgtagaagcggcgccgtcgcgtctccgccaccgagttggaccgagttgaaatcaagacttgaggactttcccgagtcacggtcaacgaggcagtaagaaaacgacgtcgctttcatttgattggttatcgataaaacaccaccgcctaaaccgagtaaaccggctgctccggtaaagagaccttcgttgtcgtgaccacaacccaaagcgacgttgtttattttaccagagttaccaaacgtgaccgtatcggtagcgagttcaccgacggtgaaagatccgtctccgtaactaacttggtagagacatttgtttgaccgacaagcggaggtttcgagaagagagcactgtggagcagagcaagtgagagatttgtatgtggaagacg

SEQ ID NO: 16700 - DNA, 811 bp, Arabidopsis thaliana landsberg
tgcatataaataatcttcgtcttcttcctttgttccttgtaacagaaaattcttatttcaattcttctcacttataacacgttcttgagttctgggttttgagtttgagtaaacattgattcatagtggattgctggattgaatccggccccagacgtaggataatcacaccggtgatctgaactgggtaaacaatcgtgtgttcgtttcgttctttgtttgattgcgttcttgatcgatctattgagtgttccgcgaattgaagcttgatcgagttgtgttgtgattgaatcgagttgtgttgaatcgatttttgagtcatcggattgtaacaaaaagaatagttgcaattttctaactttatatatctctatcatttcaccaattggctattttcaatttttacatcggacatacaaacctgaaacctatgtaaattggaaaaatcatttgtccggtgccactgatatatatttttcttcttaccaaaatcggatttgttagtaacaaacctgtcaatcaaagtgtttcagcttctccagcttaaacatcagaaaatgagtgtgtttttagtgtgtcagacaaatccccgtgaaccttgccttaaaataaaataaaatcactccaaaatagaaattatttttacaaacaaaaaaatgaaaaagaatgcttattagtattttccacaattgaaatttaaaaagtatattttcccattatttttcaccctaaaaaaaagcatcttaaaaagaaaggatttgtttttgggtcctcctcttttttaaagttcggatttttttttttaaaaggt

SEQ ID NO: 16701 - DNA, 1928 bp, Arabidopsis thaliana landsberg
ccatatatcctcacaatacctaacaaaaggaacaactttccccgattcagttccccaggcgtcaggttcacatccatgagtcggaggagtaaggaaacaaggctccatcgacgtggatcgaacacacggcggatcaggagctttgttatcatttggcagataaagtaaccatggctttaatcctccaagactataagcaacatatccaaatgtagaccttgcgcgttgtggcgtattttatcagttagacttagaagatacatctcggcgagcgccttttggtcgtgtagcttcttgtctgtttgttgaaccctttctccacttggctgataaacttcaatgatctcccctgttgaactcggtcgttcccaatacatgttctttaaggtttcagagtactctggatacaaagatgtgacaagaacagctttaagtttctggcttcttgatatattgacttttggttcttcttgtgcagctggttcaggcaaaaggttctctcttcgtgtacaagctacgacctgatccattacatgctgaaaatatccagctcgatcgctgaatacccgtatctgaataccaagcgtctcgtctgctcttgataagtaggcattgtaggatcttgtgatcaagccccagacttgattcgtcgggtgaaaaagataccgagcgagatggtagaagacggtgtctttctgcgggaatagcttgattagttcggtttgaaaactaggattcagccatagagatggaataaagtaaaggttggatttgtcaaccagccaagggactttgtcgactaaagactgatccttttggcaaaagaacatcttgtcttgatccctgtaatcatggagaagatgaagatagagatgtgatgggattgttgtcgagttaatggtatgattcttcaacattgttccgtaacaatgcgagtattcccggttgaaactatctatctgacccatcaatggaaaatcaagaggaagtaaccatgaagtaccaggataaggctcacagaagagatcactaatatccttgcgttggtccacaagaatgattctctctgtcaagagagcgtagaggaacacagaagcaagagtaagtattctgtttccaagcccataaacagccacccacacaatgtatttgcattcaccatcagagctatctccaacattctcatgatcatgaccaagcttctctgttgctctcttgtaagcatcagtgcctggaccgcaacgcttgtgaagcatctcatagtttctaagcttagagattagatattcagaagttctgtaaggcgaaggtttgcgatacaaggaagactgatacctactcaagcaagaatcttcatcgaaatcagcggttaaaagtcctcctaacagtctatccctcggttttacagaatcctttgaacttactgcaagaaaatgaaaaaattaagtcaaaaggatcatttctgaataaggaacccaaaaggtgattgatcataccgttgattgtagcaccaagaagctggtgtttgaagatgttggagaatgatagtaacaacaacatcgaccaaagtagtaagcaagtgaagattgttatcatgagctttgtcttcatacttagagaccagaaaaacttcaccagagacttgatataattgctgtattcatcaattattactaagagatatcatatagtgaccaagtcaaagaaacttgtctggctgtgaaaaattgacgaaatctgaaagcgactctaatattaatctaatgattacttcctatatttatcttcctttgattactataaaacgaatgatgttggtgtctatattcgatttgtagcaaataggagacttgtgtttaattagcaacaaacattgatgttgaaatcttaacaatacattattctcgaattgtcttgtggcagatcat

SEQ ID NO: 16702 - DNA, 1465 bp, Arabidopsis thaliana landsberg
ttgcatttccacaacgacccatgtgtatgtgtacatacattttccatgatatttgtccttgcaaatatatatgattcgttacaaaaccaaatctttctgttatgcacatggtcattaattgattctttttcccattctagtaatcttggtacctatgattcattcaaatttaaatgtctatgtcattgattgttaatgacgtaagttgatttattttgtatgaaattattgaattgtaggtattagcaccattgccaattggattttccgtgttcatggttcatttagccacaattccaattactggcaccggaataaacccggctaggagttttggagctgccgtcatctacaacaatcaaaaggcttgggatgatcaggtttgtattttcaccatctgatattcgttcttgtgttttataattaacatattaatgagttttgttttaataactacagtggatcttctgggtcggtccatttgtgggtgcagccattgcagcattttaccatcagtttgtgttgagagctggtgcaatgaaggcctatgggtcagtcaggagccagcttcatgagctccatgcttaaatttgttatttcgaactagcgaagaggtgaagaattctttgggccaggaagggaggaaggaaaaaaaaaagggacccaaatcatataaaagaaaaaacgaatattatttaagatggtcggcgagtgacatttactgtgtcttatttgtggctttgtgggggaggtttgtgtgtaacaatttgtaacgtacaagcaatgtatgtgttatttgatgcatatgatatttatatatctacttattgatgattctatctttgatcaatcatcattataacttaaatttcatagaaaaaaacacaaactccaaaaccataaactactattgttcctaaattctcaggaatgtcaatgtcgatcacaatcttaaaatttcatgctaaagatcctttgggtcttttccatcaacggtgcatcctatcaatcactgaaaaataaagggcacaaacatttgtaatcgtctcaaacaaacaaataaaaaatgttgaaatgataacgccatggataaaatgttgaaataaaaataaatgattcacgacacatgtttagctatgtataggagaaaaaccaaatcctctcacttttctcttttatctggttcccctcagatttctttactatcttgttcctcttactttcctctatttctttggtattgccatctagtgagatcttaacatctcacaacttatatggcaccttcctctattttctatattttttcaaccgcataatgaacatgacaccaacaatcagaagtagaaacccaaccaatatccacaggtgtgaaacatagaattaccagatttagcatcagtctgacacatcttgtatggatactaagagagagggtagagtctagcatgattcttagaatagg

SEQ ID NO: 16703 - DNA, 1556 bp, Arabidopsis thaliana landsberg
aggttttcatgtcatgcgttgattttgattttgattatgtccttccaccaaaattataaagctaagacaattaaacattaatttttacgacatttagccattaattgtccaactaaaacattaacatttaacgttcaatcataagctcaatgagaaagactacacaatgagtctatataccaaaattaagaagggtgcattcaatcttatattttaagtgattggagttattttgagttatttggtagtttaagatacattgaataaaaggaaaaaatctagaatttttaaatgattcataattggatggtagagatgaatctaactaccatcattcttcttgtaaaaaacaacacatcatagtatcctaattgccttttaaagagaggattatctttactctcttcttcactcttcaatatcacataaaccattatagttttactatttcatcctaaattttctctatattcttggtttcttacttgtttccggtgttctctcctattctaatctttgttctttttagaattctaggtctcatttttcggtttgcttaggtacgtgctgaacaaaccaagaaataaaatctataattctaagaaaacaaggattgaaggaggcgagaaaataggtaacaagagataaacaacgaataaagagaaaaattacgaatgaaaaatggttgaattagcaaactacaatgagtttatataatatttgagcgtgaagaaaagcataaatataatctctggaaattaagatgatgtgcatggtactgaataataatgagatctgcctattgtgtatggtactgaataataatggcacatttggtaaggatgatttatttatgtagttttcttttctcttccctcacctaatttttttaaaaatttaaatgtttcactcacatgtgctattagagtaacttttcttttaaaaaagtcaatgtttacgttttatagaatgtctatgcatattgtatcaatagttactaacttaatgaaccaaaaaatgaacaagcttgtggactagttgagagagacacgcaccttgtaatcattgaaactttgacgaaaggcagaaccaactgacgaatggcaaactcaaattccaatttttgattaccactcctcttccgttccatccactgataactttgtagctagtttaattgtatgtctaagcttttccgttctagattcattcgttcgacgagagtttgaaggatgccacaatgtattcggttaggattctaacacgatcatcgctgaacagaaagataacgtgaatgtggagtaaccacaaccgggattttgtgaatgcaccagaggaacatgaaggcgagggagaataggtagggagagaacgtatttatacttaatatgtggggagatttactattgttacgttattgttctattttctactactataataaagggttttggttttgatatttgaacttgattctatttttctaaaaattgctctgatgaaaagatgaacatgtaaagaatgacaaaaggcaaagacaaaaacgtttggaagtg

SEQ ID NO: 16704 - DNA, 1965 bp, Arabidopsis thaliana landsberg
agtctccttttaaaacttttatcaaaatcgggtgtgagttcgggtcatgaatcatggttcaacctggtccgaccggttagacgttttctatgttttaataataagtaatatttcaaatatagaaatgtttagaaaataactcaaaatctcaaaaaagtaaacaaaacataccgaaaaaatgtttgtattcacttaaataagacttattcagagatagggtttgaagatatttctatactataagtttagttaggagaaggaagatctttgtcgtgtgtcgtgtggagaaagaaagagggaatacgaagatagattttcctcgaggaagggttgagtacaaaaccggatttgtctgcgagtacttgtttttataaataagactctattatctattcatcaattgctactatatatacgtacgtactgagacgactagacaagaataacgttgcatgaggattgaatcgctgctgccacatgatgtagtagagcgaatcctggagagacttgcggtgaattctctgcctcgattcaaggctgtatcgaagcaatggaaatcaacaattgaatcccaattcttccaaggaaaacacttgacgcatcgtcagcaatcaggagatccagttgttctcatggtgaccgtatataatgacgactcctcgcacgtgggatccctactccttgggagcagaaggacaaggaaccctactacattgatcatataatagctgtgacggtctcgtttgtctctaccatcccaaagaaccgggttttgtggtcaacccgcacaactagatggtatcgtcttcttcctctttgcgaatatcaacaaatcatgatcgacatatgagaagttttgtacatattaactcggactctttaggcttggatttggcaaaggcatattcgcggcaacatacaagcccgtttggctatacaactctacagaaataggcatagaagaaaccgctaccacctgcgaagtttttgactttagcaccaacgcttggaggtatgtcactccagctgctctttatcaagttattgatttccttggtcccctctttgtagatgggtcgcttcattggttcactgagtgccaagaaaccaaagttatatctttcgatcttcacaccgaagcttttcaagtcatctctaaagctccctttgtcaattccaatcctcaagagatcgtcatgtgcaatctcgacatggtcgttcaattcaggcaagtgagatgaagtggcccacccaagtgatatggtcgttcaattcaggcaagaagacatgggacaaaatctattctatagatatggtagtaaatattgatatgctaataccctaagatacgctgtcgtacgtgccactagcaagtttgaagtagaagttgttgttttatgatggtgtggtatgtccaaaactgtttacacatgaccccgaaaccaaaccagatgatgttgctttctcggtggctacatccattagaattcctgttttgttatttcccgagtttaatctctattatataccaaaaaaatccaagacattagtgacttcactcattaaagaaatttataaagtctgtatagggcacgtgccccactacctctctacgtagatccgctactggtgccaatgcataatgtaacatttgctacttccgtcaactatatttgtttctccaactttcaagatgtggttatggtgttaccttgattacttgctgttatgcttttagtttaactcactacgttggaagatggcctttttttccttccttgcttccctttaaatgattaccaacaatgtcttgaattttttggtgtttgtagctaatcgtttgctagattgatgatgagaagatgcattttttttttaactcatatttcaagtcctcttaaggtctcaaagttcaatggatgtcgacttaataatatacgatgtgattatgactctttaggtttg

SEQ ID NO: 16705 - DNA, 811 bp, Arabidopsis thaliana landsberg
cattcaaacacaccagctagtccaatggatttgagcattacttgagactgtaagtgacgattatgtcacagatgcagaaggtgagtgcgcagatggcgatgcatattccgcggactcgagttggaaaaatctctgaacagaggatgtttggagcaggaccgaaacccatcacgaagaagcagaagtagagcacaacgcttacggttgataagaccgcgtgcacaatgctgttcatgtgaacaagatttgagattactaaaaccaatagagatgctatcaggattggtatcgtggtgagaagcaaggtcctgcaaatataaaataaaagacatttcataacgcattttagcttgtttcgtttatgtgtattgtaagaacaaaggaaatttaagttttaatcaccttcgaccagaaagatccatgagcctcattgcaacagctattgcaggtaacatcacaaaggttgtcaatgcacttataagtaaggatgctgaggaagaactaatccccatgttcgatagtaggatcccgacacccgcctgctcaaggatttgcggtgtgtagtaaagaactccattgatgcctgagaactgcatttccaagaggaagcaggaaaacatagaattagcataaaccgcattatttcttctgtgattcactaattttgatgtggctatctagactacctgctgaagtatttgaagtccaactcctacgactaatgcacgcttgactccaggatcatgaagatcatgccaaattgaccctttagttgtttcggatggatgtaccatagcaggaccaattgtat

SEQ ID NO: 16706 - DNA, 1361 bp, Arabidopsis thaliana landsberg
agatctatataataagttccatgttctttcattgtcaagactgatatttttaaacaagttctaaaatttgttacgaaaccgatgatttatatacctaaagttctgtatgtactctatatcactaaaatgggtggttttcagtaatttttatacatagattggatcaaaatatgtggatttcaaaagtttgtgttctgaagttttccaaaacgtcacaaaccagtcgctctttgcaacttatttgcgacgacaaaagaaaacagtcgcactttgcaaccaattacctacgtcgtaccaactctcgatttttgcgtttttaaattttaaagtttggtgtgtttatatgttttcttagacgtggatactttaatttgatcgatattagatataaaaacataaccaaacacttcaattcggaaatttacaaactaaaaattcaaaaaaacctaatgtatataataagttccatgttgtgtcattgtcatgattgatatttttaaacaaattctaaaataagttacgaaaccgatgatttatatacctaaagttctgtatgtactctatatcactaaaatggatgcttttcagtaatttttatcaatatattggatcaaactaagtggatttcaaaagtttgtcttctgaagttttccaaaacgtcacaaaacagtcgctctttgcaacttatttgtgacgaaaaatgaaaataatcgcactttgcattcaattacctacgtattaccaactctcgatttttgcgtttcgaaattttaaagttttggtgtgtttatatgttttcttatatgttgatactttaatttgatcgatattagatataaaaacataaccaaacactccaattctgaaatttacaaactaaatattcaacaaaatctaatctatatcataagttccatgttctttcattgtcatgaataaaattttaaacaagatctaaaataagttacaaaaccgatgatttatatacctaaagttctgtatgtactctatatctctaaaatggatgcttttcagtaatttttatcaatagattggatcaaactatttggatttcaaaagtttgtcttctgaaattttccaaaacgtcacagaacagtcgctctctgcaacttattagagacggaaaaaaaaaacagtcgcactttgcaaccaattacctacgtattaccaaccctcgatttttgcgtttcgaaattttaaagtttggtttgtttatatgttttcttagacgttgatactttaatttgatcgatataagctataaaaacataacaaaacacttcaattctgaaatttacaaacttaatattcaaagaaaccgaatctatatcataagttcc

SEQ ID NO: 16707 - DNA, 1362 bp, Arabidopsis thaliana landsberg
ctcatccaaagcctattaccggctatgaaatcggtttacgctgttttttccaatcttggtttagagaaacaagggaccgggacttcagctcattctttagacattctttcaacatcttatcctccttcttcaggatcattcaaagaagagtttattcaatatcttcaaccacttcttgattttcattctcaaatcgaatcacctttcttgataaatgcttatcccttttttgcttataaagatagtcctaaagaagttccattagagtatgttttgtttcaacctaatcaaggtatggttgatccaaacactaatcttcattatgacaacatgttgtttgctcaagttgatgcgctttactctgccattaagactttgggacataccgatatcgaggttcggatatcggaaaccggttggccttctaaaggagatgagaatgagattggagcttcgccggagaacgcggctttgtataatgggaacttgttgaagttgattcagcagaggaaaggaactccggcgaagcaatctgttcctattgatgtttatgtgtttgctctgtttaatgagaatcttaaaccgggtccggtttctgagaggaattatggacttttttacccggatggtaaaccggtttacaatgtcggtatgcaaggttatttacctgatattatctatacttcaagggcaactacaattaaggtaaattcctcttttcattttttatatttacatttttaacgttttgtttcattattgttttgagaaaatgttctaaaaacaatagaatttttactttctattgcatagtttatatattatgttatgattaaaattaaggaatatatatatatatatatatatgattatatatgataagatattgataatgtggatgttgaataattgtgcagattttgaatttgtggagagtcgtgatgggtttggctgtggcttggttcatactcgatatgggcgacaagatgaggatgagataagcttcgcttgtgtctttgtctgtccttgtaggatttttgtttgaatatgttagttgattataggtgaggtatacaattctttgtcatgtattggattcacaaaaattaaaaaaattaatttattccttgactggaaaaatgtttaaacaatttgtttgttaaattgtgctaaaatattataaagaatctgtgagtaaatataattttattaggttttatgtttctgcaacccaagtttcaatgataaatagttaaaaactgaacgtatccatctaaatccacaattttcaaccaatttccatcaatatatatatatatatatatatatatatatatatatccctgtttgctttttagctca

SEQ ID NO: 16708 - DNA, 689 bp, Arabidopsis thaliana landsberg
atagtactaaaagaagaaaatttgttagatttccgagtggggtcacgttgtaaagttttaattcattttcgggattttatcattcttatagtttatttttgaatggaaatcatcaaagtcatcttttgcttttccatgtattaagatgaatgaatatgattcctcttttatataaagagtaataatatattccacacacaaaaaagagaagaaatttccaagggaaagacggcactagaaaagttatacgaattaatgtcatcatgatttcgaaattgattgatttgtgggtcggttttcatttgttctgtagcctaacctctaacaatcaacgtctccactatgtatcaaataatccatccgtttcataatgtaagttgttttagaccaaaatttttgttttacaatataagttgttttcaaatttttatgcaaattatataatattttaatgattaattatattatgtaatctcttttctgattggttgaactttttaaaaataaatgttcttaatctacgtacttttatctaaaataacttatattataaaacggagggaatatgtattaaagaaatcaaatatacttttcaaaaaacttggatgagacctcatactcataatgaatggtgtaccatgtcaaccatggaacaactatgatatatattgatggcctcctttctttat

SEQ ID NO: 16709 - DNA, 1414 bp, Arabidopsis thaliana landsberg
gcttcatataatgctcatgatgactgaaatgttgaattgtctcctcatcaatcttcaggaatggcggttcgatatactcctcgggttcttcaggcactccatcaagatcttttccatcccacacgtctctccatgtggcacatctcgaatggatagcatattggcatcccttatcacaagagtattgcccgcagttgacgtcaacagtttggcgacaaactccacaagagaaaacaccaggttgaagggaggaagtgagagagagacgatgtgggtgtcgggtgatcttaatgacacgaggtagatagatacatgttctgtggaccataaggctgcaagggagacatgcgtaaacaagatctttgctgtcgttgtttagaagcaagccacaaacatcacatggcaagtggattcgtataaggaagaggctgagggtgtgctcatgacatttcaagtgtgagatagtggtgggtggtggtctcatcgagcaagtcaagttaagattgaacttgcagatagaacaatgataatatagcttttctaaaggagaagcacaacatttgcatttcaggtgatttccatggaagaacatatagggttcctcattataagcgacatcataaacatcgccactgccactgcgactgccaccgccaccgccatttccatccccataatcgtcatcatcaccatcgtcttcatgaccatagtcaacaacttcgtttatcaattcttcggaagattcctctgaagcggagctgtccctccagttttggtgtatgatagaagcattaaattcaggatctaaggcggtgaaggtgacggggtgagagggatgaaaaggatgtcttatctccggcagaaagatgtgacagcctctatggaattccaaattgcaagtagcacagtaataataataattattgcgctttaattgcttgcctttgcaagaaaagcagatagaaagtggaggatgagatggccgtcgccgtcggcaaagcatgtggggctgagccggatcggaaagacgacatggaggtttagctctagagaaataaggaggtagtggttccatatcgggtatagctagctctagaaaaaaaaaggatccatatggggttgtttggaatgaaagaagagaactatgtaaatataaaaggtttcaagtttcaactcataaatacgattatgaaaataatatatttgcatgattgaatgaactttacaaattatcagttcttaattaatattagtactactagaactcgtgatttttaatgatttcaaaatgaaattttatgagggatactaaactagtacgatagttggcaacttggcaatttcataccattgttggggtgagggcatgtgggtttcgtcaataagcatttgtaaactattatataagttgcgc

SEQ ID NO: 16710 - DNA, 580 bp, Arabidopsis thaliana landsberg
actgtagctttaaaaattcaaccaatcacaaaagagatggtataatctaaaaagtcataaaatcaatacatttaaaatttgtattgaaacttgtaaaatagcttatataatgaaacaaaataaaaacactataacatcctatataatgaaacagagaaagtattagtaatagctatctaccgcgtttaactatcacactaagcttgatcgatagattgagtcagagtggtactaaaatcctaattatatatattggatgcatgagaagtttctttaaagatgtaatctatttcaaataattatttggaatatgggcaattttgttagtacattgaaacgtcaactttttacttgcaaccactttgtaggaccattaactgcaaaataagaattctctaagcttcagaaggggctggcttggggctatgaaaccatcgttttaagaacatggagactggttctataaatggatgaatccaagtatgtagtatggcaataattagtttatggtagctcaaacaaatcatattagagtcctacccataacaaagctttatatgaaacttgagacaatatgcac

SEQ ID NO: 16711 - DNA, 1487 bp, Arabidopsis thaliana landsberg
attgattgggtgcaacatcaatgagcttaagctagctctatcaaagcgtaatatgagagttaataatgatactattgtacagaagctaacactatcgcaggtaggccttttagaaagattttttttttcacttgattctttgtgtgtacttttattctgagtagggttggttttaacactgtaatcatgatctatgccccctcttacttatttggaatcaagccttgttcatttatttttgtggtgaaagtttttcttatttgcttccaggccattgacgcaagagatgctttagcaaagtcaatctatgcctgcctatttgactggctagttgaacagattaacaaatctcttgcggtgggaaagaggagaactggcagatccatcagcattcttgatatctatggctttgaatcattcaatgtatgctggtttttagtctccctttgcgttttactgcatgaacttacataagctatctgcacattacatcttctgtgttacattttgtaccaatgttaatttggtttgctgaataaatactatacatgttgcagaaaaatagttttgagcagttctgtataaattatgcaaatgagagattgcagcaacacttcaaccgtcatctcttcaagcttgagcaggaggtaacgtaaacccctttctgctatgggtccttgtagtatatctaggcagagcatggacatgtacacaccagctaccgagttctgagggatttatatttctgtcttctcttccaggaatatattcaggatggcattgactggacaagggttgattttgaggacaaccaagaatgtcttagtctctttgaaaaggtaatgtgatagctaatttcatctagagtcagcaatcatcatatgttacatatcagtatgtctgttactcaggataatatattaacattttgccgatgatgtctcatcatcaagctgcatagcaactgttgagtttatcgtgttggaacgatctattgttatatcaaaacatgtgtttaaagacaattaagaatcgtttctgtgcagaaaccattagggctgctttctcttctggatgaggaatccacatttccaaatggcacagatttgacacttgccaacaagcttaaacaacatctaaatgataattcctgttttagaggagatcgggggaaggctttcacagttgcgcattatgctggagaggtaatagctctaaaaactcagtggcaccattttacatgatatatcagaacacaagacatgatatagagtagagtttctgggatcaattttgaggtttagaaatcaagaatgaatcagtaacctagtgtgatttttttctaactcaggttacatatgagacgactggatttctagagaagaaccgagatttgttgcattcagattctattcaacttttgtcgtcttgctcttgccacctacctcaggcgttggcttctagtatgctcaattattatgaaaaac

SEQ ID NO: 16712 - DNA, 1032 bp, Arabidopsis thaliana landsberg
ctgatcagcaccgtccatttcaaacggagaatgtaaaaaccaatcggaatcgtacattatttcatctagttcttcgttcttggccacaacttccaaccacatgacgctctttctattccctttatatattcccatctcaaaagttcttggagacacaaaatatataaacatataaacataaacgccaatcagaacttttttacttgtggcggtttacaatgaagaaaggtttgaagcggtcttgtgttatggtggtggttacattcttagccatggttgatatctcagtttcagttccgttcataatgcttcacggaatcgcatctcaatgttctgataatacaaatgctaactttacacagcttctcactgacctctcaggctctcctggcttttgcttgtaagtcaatccacaaaatagtttattcgttttgataaccgaaagatagggccatgtagaagagttgtgtattcttgctatataagacgtgcaaagtgactacttattcttcttttatatagcatgaacaagatgatgtatttggtttggtctgattctttttttttttttttttttggaaatggaatccagagaaattggaaatggagtaataaattcaatgttcttgccacttacacaacaagcagaaatagcatgtgagaatgtgaagcaaatgaaagagttgagtcaaggatacaacattgttggaagatctcaggttcttttttgaaaaccctaaaatagatttcgtgatctttatttacatattgtttcagttacatggatgttagcttaatgattgaacaggggaacctaatggcttgcggctcgatcgagacctgtgaaagtgggccctctgaacacaactatatatccttgcctggttctcatgctggcaccgccaatctacttcagggttatacttgaagcattcatattacctttaaatatcgagattaatgtctcgaatatagtttcagtctattgatggcgagaacaacattgtatctgtttgacgtccttgctttttt

SEQ ID NO: 16713 - DNA, 1460 bp, Arabidopsis thaliana landsberg
tatatttagtattatactttttgctgtattaatctcctaaagtctatatatatatatatatatatatatatatagttttataatgtataacttttgatttagcaaagttgattttgttggtaccctgacagctcctttgactacttcacgtcatatcttacaatcccccccgctctcgaccagttctctctcgatcaaatgtcttataataggcatatgatcgtcaaattttttaatcttcggggattttgacaatgtccacttttatcgttcggtgatgctcgataagactcgatttcagtactcatgtgcaaagctccttaattttgaaatctgtctcggtcattcctccttaaatattcatttacacaataaaattttaatttaggaactttgggtcgggtgaaatttccaattgggcgagaaaatctcattaggggtcggtgcggatcgatcagcgatgtcaaggtggctccggtcaagagttggcacgaccggtccggcttctttaaacggcaccggtccctttgtggaacgaccgtgtcggtaacggtgccaaaatcttattttctattttcttttaaaatttttatgaaaaacctgaaacaacaactaaaatatttttttttttaaaacaaaatttaaatcctaagaaagagtatttacctagtgtgttgcctcccactcaacacacttgtttaacgttgttggctcgacatttagggtcttactaggcataataagacgaattatttgtccctaaacaaactctctttgatttgaacccgttaggttattcttccgagtcgatgtttctcttacgaaaaattgattctcttgtcttctcgaatataatctcgaacgcgattcttggagatataaatttccatgaagagtcgtttcaccgaaaacttctcccaggcttccaaaaacgaagtgtcaagcgagatggctctaactaagtctataaatgtgcaacgcataccgttttcatgtgtagtacggatcatcttctcgatctctaaagcttctatctctccatcttcttcttcaatcgaagaatgggtggctgattcatcttgcgaactcgatgaattgtatccctcttcttcctccgaattctcctcgatatcgatctcatcctcttctccttcaaactcgaagatctcaccatgtcttacttagggctagacatccaacggaatcactgctctgcaatgaaggatgggtctaggctcctccctgttgtcttcatgagagttccctggaattccaaggctcgggatcccggcttccatagagcgatgcagctctgttcacatgaaggtatataaggagattgttgctgtgcatcaaacggatacccaacaacagctcatagagctggaagagaggatacacagaatcacgagattgctatgtatagatcttaaccctggctaatgggactactaactact

SEQ ID NO: 16714 - DNA, 1262 bp, Arabidopsis thaliana landsberg
tttgcaacattcaagacaacatccaaagtttttcaagcaggcttttggtggcctacaatgtttaaggatgtctcattgttcatatcgcaatgcgacccttgacagagaaagggaaagatcagcaagcgtaatgagatgcctcagaaatttatcctcgaacttgaagtcttcgattgttggggtatagatttcatgggacctttcccaccttccaacaagaatctctacatcctagtagttgtggattatgtctccaaatgggtagaaactatagctaatccgaagaacgattcagcggttgtcatgaaactcttcaagtctatcatcttcccttgttttggagtgccagcatagtcattagtgacggaggtaagcatttcattaacaagattcttgcaaaattgctttacagtatggagttccgcatcgggttgctactccctaccatccacaaacgagtggccaagttgaagtttccaacaggcaaaatcaaagagattcttgagaaaacagtgggtaaagcgaaaaaggagtggtcctacaagttagatgatgcactgtgggcttacaggacagctttcaaaactccacttgggaccacaccttttcatcttctatatggtaaagcttgtcatcttccagtggaattagagcacaaagcagcttgggcagtcaagatgataaatttcgacatcaaatcagctggagaaaggagacttatttagttgaatgagcttgatgaaatacgaaataacgcttatgccaactgagaagctctacatggaacgcacaaaagcttaccacgacaagaagatcctcactcggacctttgagcctaatgaccaggtacttctttatgattctagattgacaatatttcctggaaaatttgtcttcttgttggacaggtccctacacagtccactcggttaggccatatagaacagtcattctcaaaaacaacaatggaaaccatttattgtgaatggacagagagtcaaacactattggctgaagccgagattccagtagaaaagcctttggatcttctggactcacctgttgattaagcaagtgcagagtcaagctattgactataaacaagcgcttagtgggaggcaacccactagtaagtatttctctttttcatcatttcattcatttgatttttaacttaggattttttattttataagaattttattgattaaaagaaaaaaaaaccagtgttaccaaaaacgcgatggtgtcgataacaaggt

SEQ ID NO: 16715 - DNA, 132 bp, Arabidopsis thaliana landsberg
ttaattgatacttcaagcatatttcatgtttttaagctttaaggaagaattatgaattttcaagcatttaaggtgtagaagttgatcaaattccgtttcagaatagtttttgggctttattggtttggcatt

SEQ ID NO: 16716 - DNA, 2055 bp, Arabidopsis thaliana landsberg
ccttttcttgctgcgtttataccattagataatagatagcgataagaaatttttatggtcaagaagcattgaataactaccacgttttaaaatggtatgtacattagctaggcacgcaaactaatgttactacacaatagtccatttttatttgtttagatatgtaaaaatcgtgtcccaaatttcttctattattttgtcgtatagaagaaagaaacctttcacgggatatgattggttggtctttagaatttttttaaagttattaaaaaaaactataacctcaaaattgaaacaattatgatatagctttcctattttttctcacagcctaaataatataattttttaattattttggctgtaagtacaagttattctaaagcacaagtttatggtttttagaaggttggtacattttttcttttcattttatttttatttttgtaaaaacattactataattttcatatatatatattaaatttagttttatggacataaatagtaggtaaatatctactttatgacatatatataactcacattgttttcttaatatatatatatatatatatatataaattaaattgatatttgtgaattttcttatataatgtacataagtataatttaccaatactatttttttttgtttaaaaatacatacaactaaaatattatttctacaaccagtttcttcaaaccctaatatttaattaataaaacttacagcctaatttctacagcaataaaatctacagctaccaccatcacacatacagcaaaaattctacagcaaaaaatctacagttacagacaaaccaatcacacacataattcatctatcattttattcattcagagtgatatgtattaaataaatgctatttattttggcttcattaaagaacatgtacatcttttagcatatattaaaagtagcatatattaaaagtagtagcatgccacaacctgaccggaaaaaaaccagagctgtggcatacatttcagttttactaacaatacatacacaagctccaacaagcctaaacatcttttttggcattgtcatataaccatttcattataatcgcatacaaacataaaccatagaaccatgccacaatctatctctctagtgagtgagagccactgcagcttcttgaaccagcggctgagtaacgtgcacaaaatgctcagcctcacgctcaacttcttcccgacatctatgtgagtctctcccttcacccattttcttcacaaacgctacgaattttccccagttatccgcctgaaacaactccggattcatccttaggtaagtaaatgcacacatctctcgaggttctccctcattgttttgatcaaggttcagcgcggagccttgagaatctgctcgtgtgcatagtcgtcgtacctaggcaatgcgttttcaccagctagaggaacttctgcggctagagtggctagagcaacttggttaactagcttctctggtgcacaaagtgcgtcttgaggctgttcgtgatccctcatctcgatacatgtgaagttgaatatggcattgtgtctggctaacatttgggcgatcgggaggtacccgtctctgaaccttgtattgtagtaccctgctgtgagctcaggcgcgtgagagcgggtcccgtagtgccagtggattccagcgattttgaccgatattttgacacccatgttttcgaatattgatttggctgaggataggatccgctcgccgtgatccaacagcatctgggagtaccatgagaggaagaaatctccatactctgagttcaaccacagcgtcttttttgaagaactgggtgtcttctggccagttattgtagtgaccagcatcggttgggccagtactgccccactctggcttcccataagtctcagctgctgctttcaagctgcttaacgagtactgcatcaatcatagcaaggaaaacagtttagtatgacattcgttgcaagatgaatcagagactattcatgtgtgatcggtggtaaatatcttatcatagcactgga

SEQ ID NO: 16717 - DNA, 2349 bp, Arabidopsis thaliana landsberg
atgtgcatatatatattccaccatgaatccactttcttcattatatcagtagtaaccttaactctgttcaataagtaggcgctgtatatatatatatatatatatatatatatatataaagtcttaccaatgtctagctcatctaaaacaatggatggtcagaaatggagtctggttttcatatgtcttgttttactcttcaccacttcctcttcagctgagtttctcattcaacaggtacagttttgttttgtttttcctttttcgaaacacttttttgattgattggcttattactaaaagtagcttattacaaaatccaggtcacagggggcagaggagcagagtacaacggttcttacagtctgaaggagaattttggtacacttgttgtctgaaatcttctttttttagattttcttggtttacaaaaaaaaaaaaactgaaacccatttcttaattttcttggaatttttgtgttgacaggagggacaagagtgttgagagatgagcgaccatcgagtaagattctgacaataacaaacttctctgtgattaagggcagagtagaaccctatgaatcctctgtttttgaggctgctggttacaaatggtaaagatcttacactctttccactttttattcaattttttatatatttttcttgagttttttttttttttgatgaaaaataaataaatcaggagattggttttgtacgtgaatggtaatccaaacgacagtggaaatgatcatatttcactatacgtgaggatcgaagagacagaatatcttccaagagggtgggaagtgaatgttgatctcaaactcttcatccacaatgggaagctaaacaaatatttggctatttcaggtgcttaaaatggattcttactagagccattttatttttgccaagactaatgtttgcaatttctgtaaatattaggatctcatatccgaaagttgattgcgattaggagttttttttttttttgcataattgtggattgtagatggaacattgaagttatacaacgatgcgaaaagagagtggggattcggacaacttattcctcacgtaacattctacaacacgtatgggtacattgagcaggacattggttcttttggtgctgagatcttcatcgttaaaccggctcaacaacaagagaaagtcacattcatatcaaaccctccaaccaatgttttcacttggaagatacttcatttctctatcttggaagacaaattctattactctgacgattttctcgttgaagaccgatactggttagtaattttggtaaccggatctctttgaccgaagtccaaattaatttcaaagtttgcaactgctatgtgaattccacggtgaccaagtataataacggtttttggttgatgataatcaggagactaggatttaaccctaaaggagatggaggaggaagaccatatgcactttcaatctttctatttgctcaaggctttaaggcaaacgcagttgttacaaccacttatgcagcgactaatctgcggttaaagaatcaacgaagcagcaaccacgtaacaacatatagtaagaaaactaacctaagaataaaagtttatctctaggagaaaaaatcatcattgaatgaaactaacagctgatgtaaattggtattttgtgtgttgtttatttgcagctgcagcttggtacccgattggaagcggttatggtgtgggagtgaacaatatcatactgttagctgatttaaacgatgcatcaaaaggatatttggtgaatgatgccattatctttgaagctgaaatggttaaggtctctataaccaacatcgtctccgcttaaatatctgcacttctttgtctacgatcaatcaaccttatgaataaagagatatttgatgagtttgtaataagaaaacgttaatgtttgtgaattgtgaaattatttctgttcttctgagttttttatttcaatgaaaataaaactcttaccggtttaaattgtttgaaatatgttggggaaaatggagtgttagttatatgaataaattcgacttatttggagtcagaaagaaactaataatttaatttacataatttcatttttgtaaccgaattcaaacagaagccaaaagaagataagaattgaacaaaaatttaaaagatactaaagatgtgaaaatcgaaatcgtatgatgctgactagtgatgaagatggccaagatcggtcatgttgaatgcggaatggccaaaaaaacacaccatttgcgactcccatataagttgcaaaacgaaatattaaggactacttgaagactactaatacaatggtttca

SEQ ID NO: 16718 - DNA, 2164 bp, Arabidopsis thaliana landsberg
ttctttataagaagttcgcttctgactacaaatctatacattaattttaacctagctgatctctcttactgtcgggtttggtttcttgtggctttggtttcttctcttttccaacctcctcctttggcttgtccttctcttgtggctcagggtttcattatgaacaaatatcactcttcactcttcaccttctcgtcgtctgatatgagtagtggctcgtcattatctccttctttggccaaagttggatgagaaaacgatagcaaaaccatgatcgaagaaatattatgaacatggttttattctccattttaaaatattttgatcttttattcttagttagttttgttttttattctaccaatgaggatttctgcaagtatttatagtctaaaatgttcataaaattgttatttagtaactttttattagtaaaaataacatttttctatttatctttgaccaacaataatttattagttatcaacataatttacattttttgacgttttacaacgtttataaatattgttcgtttaatgcatttcagtttatgacgatatgaattaagctgaatgaaaaattttaaacgtttcatagatagaaaactgggttttaagtccctctatatatgcatttaaaacttcattgtagtaaatttattgttcgtattcgaatgaagtttgcaaagaaatttaagaaaaaagagtttaaaagtaacgaaataagttatttcaaacttgcaccatagtttacaatttgtgaatataaaaatatatgggcgtattaactatttaatactgactaaaaaaggggttaatttggctccaaaaaaatataacaaaaacagctaagatgtaccaatctgatattacactaaaaccgaaccaagatttacttataaagcaatggtttcatactttcattaattagaaaatcaaaattgaaccgaactgaaccaattttagtgtatctaaactaaacataatcatattatattttaaattttttaatattgtatttatagtaaatatattcgtgttgtagaaatgtaatataaactgtggaagcctcttggtccaatggttgactaaacgttcattaatgattctacaccaagaggtctggggttcgagtctcagctattgcgatttattagcaaatttacagattaatggaggtaagtgtgcatgagatctacaacgaagtataattatagccgtttactaagattctatgcagagaagatattgaaggtgtccatcaagcgcatggaaaaggagaagaaggttatgtaaagtctttatctatatttataaatttatctagtcatggtaatatgtagtgcaaatataaaaagaaatcacccagcataaaaacatttaaaatttcaacaattctttgaactacatccacaaatccttcaattcttatcttcaaatgatgtgacatatttttaccccactaaaattccactaattcatttacacttgggttagacccttcttacatgttccccaccctttcaattcagacataaagcataaccgaatcgttcacagatagagaaagagagaaagattagaagaaacaaatatggtagatcaaaataaagcatttggttgggcggccaacgactgaatcagggcgtcctctctccattttcatttctctagaaggttcctttcgtaactttcgtttacttttgagttttgagagcacacttaattagtctttgattatctttcacaagtgttgtatgttttggtgtcatattattgcagagaaaatggtgagaacgatgtaacagtgaagatcttgttctgtggtgtttgtcactctgatcttcataccatcaagaaccattggggattctctcgttaccccattattcccgggtattctcattacttgccatttctcttatcaatgctcccaaatattcttatttcctttgttggagattttattagctttatagaataagaaatgtctaaggtttggattaaaattatattggctaggtgttgaccctctccgtacgattagggcttagcagttttgagcattggacaagttcggctattattaattaaatagtgattactagcaactattcttttgttaatttgctaggcatgaaatcgttggttgtagcaacaaa

SEQ ID NO: 16719 - DNA, 2160 bp, Arabidopsis thaliana landsberg
tatctttgtcctgattggtgcatcggcaagcgacacaaccgtgtgtcaagctttgtgcagatcagttgatgtggagatccaaaggagtgataagtagagatcgttttcaattggtgttcttgagttatccgcgggataactttgtcgattattgtggtgtttacgttcaagacaatgttaattgggctcttgggtttgggatcccttgtttgttcatggtcatggcccttgctctcttcttgtttggaagaaaaacttatagatatccaagaggagatcgcgaggagaagaataacgcttttgcgaggatcggtagagttttcttggtggcgttcaagaatcggaaactgaagttaacacattcaggtcagttggaagatggttcgtccaagaaatgtaaaggacaacttgagtaagttccaaagtcttgaatcttttgagttttggtttattgtgacttgagtataaagttttctttattttgactaaggttcctagcaaaagcgttgctaccaggagaaggaggtctagagccatgtagtagtagggacgtggaagacgcgatggctttggttaggcttattccgatatggatcacatcagtagtgagcacgattccttacgctcaatatgctactttcttcacaaaacaaggcgttacagtggacagaaaaattttgccaggtttcgagatccctccggcttcttttcaagcactcatcggtttatcgattttcatctcagttccaacttatgagcgtgttttccttccgttagctagattgattaccaaaaagccttcagggatcacaatgctacagagaataggagctggaatggtgctatccagcttaaatatggtggttgcagcgttagtagaaatgaaacggctcgagacggctaaagaacatgggcttgtggatagaccggacgcaaccatcccaatgtccatatggtggttcgttcctcagtatttactacttgggatgatcgatgtattctcactagtggggacacaagaattcttctacgaccaagtccccacggagctaaggagtattggtcttgcactttctttgagtgcgatgggtcttgcgagcttcttgagcggttttctaatcactgtgattaattgggctaccgggaaaaatggcggcgatagctggttcaatactaacctgaacagagcccatgtcgattatttttactggttgcttgctgctttcactgccattgggttcttggcgtttttgttattatccaggctgtatgtgtatcgccgtgtagatcaagtctaagaaaaaaaaagtcaacgtgtatctactttcatatcatatttggttattcataacgtggttagaaactctttaacctattttttattcaacaattttagtttattaagatgaaatctctggaagttagcttggaacacagctggataatatacacgataaggaaaagactatacaccaaacatgaaaaaatatacatttactggtgttgagccatgtaatggtagggacgtggaagatgcgatggatttggtaaggcttattccgatatggatcacatacgtggtgagcacgattccgtacgctcagtacataactttcttcacgaagcaaggggtcacggtggacagaagaatcttaccgggagtagaaattccagcggcttctttattgtcattcgttggtgtatctattctcatctcagtgcccatatatgagcgtgtatttctcccgatagctaggaagattaccaaaaagccttttgggatcacaatgctccaaaggataggagctggaatggtgctttcagtcttcaatatgatgctcgctgcattagtagaatcaaaacggctaaaaatcgctagggaacacgggctagtggacaagccggacgtgaccgttccaatgtccatatggtggttcgtccctcagtatttgctactcgggatgatcgatctgttctctatggtgggaacacaagaattcttctacgaccaagtcccaacggagctaaggagcattggtctctcgctttctctgagtgcgatgggtctttcaagcttcttgagtggttttttcatcagtttgattgattgggctacgggaaaagacggctggttcaactctaacttgaaccgagcccatg

SEQ ID NO: 16720 - DNA, 2867 bp, Arabidopsis thaliana landsberg
ttataatggggtgatttggacagacgaaagttacatgtcaaaggagcatctagacacagttatagattggatcccatcaatgaagaatcttaggttaagggacatccctagctatatacgtaccacaaatcctgacaacataatgcttaatttcctcattcgagaagttgagcgatctaaacgcgctagtgctatcattctcaacacgtttgatgaactcgagcatgatgttatccagtctatgcaatctattttacctccggtttattctattgggccactccatctccttgtgaaggaagaaataaacgaggctagggaaataggacagatgggattaaatttgtggagagaggagatggaatgtttggattggctcgatacaaaaactccaaacagtgttctttttgttaactttggatgcataacggtgatgagtgcaaaacagcttgaagaatttgcttggggtttggcggcaagtaggaaagagtttttatgggtgatccgtcctaatttagtggtgggagaggcgatggtggttcttccacaagagtttttagcggagacgatagaccgtagaatgttagctagttggtgtcctcaggagaaagttctttctcatcccgcgataggagggttcttgacgcattgcgggtggaactcaacattggagagtctcgctggtggtgttccgatgatatgttggccatgtttttcggagcaaccgacgaattgtaagttttgttgtgacgagtggggagtgggtatagagattggtaaagatgtgaagagagaggaggtcgagacggtggttagagaacttatggatggagaaaaggggaaaaagctgagagaaaaggcggaagagtggcggcggttggccgaggaagcgacgaggtataaacatggttcgtcggtcatgaatcttgggacgcttatacataaagttttcttagaaaatcttagatgagaaaagttctaatgcggtagttaattacaaatatcatatgatagttttggtggtagacccaaagggcttagtccatcctataaatgtgatactcgtttcttttatataatcacaattggtctttcttttcggtttgtaaccagtgtaaattgctatagaatagctttagcctcataccttttccttttgttgttgtttgtgtatgtcgatactaacattttgttacactcacaccactaatataaacttcaccaaaaaaaaaacttcaactaggtatataaatttgctaaaatgtactacggaaacaaattttgtattcaagtctagaagagaacacatttcctgtgcaagagaacaagtcctctatacatcttttcgcaccttgccgaccaattggcgaatgagaggtcgctcttgctggaggcggtacgtaggtaaaaggtccttttgggtcagaatcagcgtggcgcccaatatgttatgtatactgcccggcccactctatcctatgggagtcgggaagttaaatagttgtattttaatcatcaatcttatggagtattgacaaagtaaccgaacatatacgcaaaaacgtgtttttatcatcaatctcattaattattacctctaagttttaatagttctatattgcacactaattcttaaactgatctaaagtagatgtatgatctaattaaccggtaaaaagttgtaataatcagctagttaattcaatgtatatattaaaaaaaacttaactttttaacttttggttgagtgggttcatattcagttacttttgtttatatacaaaaattggttttaataagtaagcaacaaagtttaagctgaattgcttggaaaattatattaattcagccataaaacgatataaaatcggaaggatagattgtcacgtgggttatcacttttcacaaaattgacttgtttttttcttaacatgctatcaattagtctaatgtagaagtacaatggaagattataaaaatagtcgaacttattctaaaataatagaaagaatatcaaagtcgacatattatattattccgttaggaagatagaaaaaaaacatgacaagaatggatagatagagccatctttattttggcagtcaagttaagtcatgaatttggttgagaaaataaaaacgaattagcttttttttttttgttgaatgacgagaaagagaatgtaaaaaaaaatgtcaagattgtacaagttgaggcagttgatcaagaagatgacgttaagtctctgatgttcgtagtcgtactttcaggtgcatccgttggatcgaattctccaccttcttctgatacttgttgtggtgcgtgtgattctgaagagaaaaaaagattcatatcgtaaaaccttttttaacataaatatatagtcaatccacacatagaagttatttgtttggtggcccctctacaaataagtttggataattgcttaaatagagagtggtcccttgtgagttgtgtgactagatcttgagaatcaataatataaaaaggtgacagaactcacatgcaaacactattggtttatgcattttacatacacatacataaacatgcatgacccatgatggaggatagacagatgtgaggagaaaaaaattagacagctcagttcacatggatatgacgcaattatatatatcccatgtgcccaatcattcactcttttttggtattccatttaatcttccgtactatataattcaatctcactagctcttgtttcttacaaaacttattgtttagtacttagtggtcgtgaatcttgttatgatgattaatgcaatttgtacaatggacatgcatggtggttataagacttaccagtggaagaagatagtggcccttgg

SEQ ID NO: 16721 - DNA, 741 bp, Arabidopsis thaliana landsberg
  unsure (1)..(741): unsure at all n locations
cggaactcctccactgaccctttttgtctagtgttaagcagctgcctaatcacagaactgcaacgactatgaccgggccttgttcgaaatttcaccttaaaatcactccagtcnnnnnnnnnnnnnnnnnnnnnnnnnnnnnnnnnccaattcactgctatgattgagactacacacgacaaagcttcctccagtttctgatgttccatgacttgattttgagaaaaatatttctccatcctaaataaccagtcatcgggattctgaccttcaaacaacagaggctcaagtcgtcgccctgatgagcccaaggtgttgcttggagatccctgctgaacggactgctgatgaaaactgtatgaaccctgggatgtctccatttgctgggtcgataacgccaacggaggtaagggtaagattccgtcacctttggccttgatcggagcagttggcgtgacacaactgtcctgtgtgttgttactctgagtctgtgacgaagagattggactctcagaaacagctttacccatttgtttttctcgaccccacccttcaatcatctcatgcatccacttacgatcttcgtcttgactctcttgtagtgcgcgaatggaggtctccaacctctccaccagtctgggtaaatttctcatccagatctgtgatccgtgaaggatcgacaccttgactagcttgagtagaacgagccatgatctttcaaacctctcaatgaaagcacca

SEQ ID NO: 16722 - DNA, 501 bp, Arabidopsis thaliana landsberg
tttttgaatcacaagtgacagtcatatgctccctagatccacataccaggagaatctgttctcccatatatcagttccaggttcaaatgataggcctaagttttgaaagttttcagcaagataattctggtcagcagaatatttcagggcaggaagaatttggtcagatggatggttctggtctatctgaaaaatcatttatgaaagtgcctgaaaatataaatacattgcagaagtcgacaacattagatccaacagaggaaaagattttgtttggttcggatgacaatttgtgggaggcatttggaaacagtactgatatgagcttgacaggaaatcttatgtccagtagttctgacctttttgatgcatgcccctctttgcaaagtgggagttggagtgctcttatgcaatctgctgtagcagaaacagtcagtgatgacgcaagtgtacatgaatggggtagtaaacagcaatctgtatgggctaacaacattaatg

SEQ ID NO: 16723 - DNA, 2799 bp, Arabidopsis thaliana landsberg
  unsure (1)..(2799): unsure at all n locations
tcgtctcagtgttcctccaaatccatataagaaaaaaacacctcatttgtcattaaggacaacatccattatttcattatataccttcttctgttcagcagttagcatctttaaccaattatcatgttttgttttcaatgactcacagttgtagttgcgctcatcgaggatcaactgattaaaggcaggttcatcgcctggttcaagctgaggcaacatcttatacctccaaagatctgttccatgcctttttaatattttttgcagctcttgtaaacataatcgaatcctgtcttcgtcaggcaatatgtattctgcatataaattaatataagattgaatgtactaaaatatttctaaaaacatctataaaattgtatatttaatttaaaaataataatttaactaacctgcacgttctaactgatttcttagtttcctcttaaaatcttcagacagtatcttccaagtgtgttcccatacaacggctggngaactcaagctttcggaaataagcataataacaaacaacttgcaaacatacttaggatatacaccaataattagcctcctcaataccggggatatatggcttatcatcatcaagcaaacctagagcatatcatgcatctctgtatgttttatgaacaacaccctcgacgattttgatatcatcaaaaccttttggacctcttatgttgttaataaggatgcgaaggtgatatgcatcatctatctttggaggtacatgatttattctaccaacagcaaaacctggcattttttcttctgcaaaaatccttatctttaccattccacgtatagaaattaggtatttgttcatataaaagttttgccgcttccagatcacgcttattaagctcaaaccatgcagtaaactgagtctcatcattgttcactctatacaaaacagattcaggagtctcaccttccttgacataaataggttgtttgccttctcatggaacgtaagtttagttactgatgtttgtcgataatgtataggataccctctaatcctccacatcgcttcacatgcagatacgtatctattaaacgacatttgagttattttccattaatttttatatttaaaatagtttattaataatgtttacaataaaatgaaataaaataaggaaaagtacctacaatcaaaataatcctgaacttgatttcgttcttgtggatcattatttgtttctcctacattgttttgctcagagacaacttcttttcgatgaggctctacagagacagttacacgatcaggtcccttgttaacatacttgaataagtatttaacagagacggattggttacaccactctacattgatgtgagccctgtatttccgtaataggacagcgttatatggaacaacataccggttgtcacattgatacttattcttctcgatgaaacgaccagtatctctgcgcctatatattggataaccttcattgtcaagagacgtgttctcaacatggttctttggataatacttggaacatttaccattttccatgcatggcaaattaggattaaccaatccgcatggtccatgaatcatacattccgagacagcttgatatagctctggatctttttctttatctggaatttcggcaaaaataatcttgtcaacgtgatcagctgtaggaaacttgtatctaggatccatccaaacaattatgtgagcatgtggaagacctcttttttgaaattctactgtatacatagctggttcaacataataattataagttaatgtcacttgtaagttaaaattcatgaaatatatgtataaaaatatgaaataatgtagtacctgatttggttgtgccaaagatatgattctttgttagatcatccatcaagttgtcgagtttcattttataaatcctgcaaatgatatccggcctgtcctcagcattcaacttccgctcttttacaaatcttgtgatctctggccacttacgattacatgtgaaggttataaacaggtcgggaaagccgaaatgtttacaggtacccattgcatctaagtagttctgttgcatataagctggaccaccggtgaaagatggaggaataacaacactttttcctttattagaaagatcattatctccagcatcagaagcatcttgaactgcctgcttgttggtactgcgcaacttcgtctgattttttttgataaatcttagccgattagactctatcattgtaaaagcgtcaactatgaactgttgaagtaagcgttctgagcgaaggaggatgtgcttctcattttttctctcttgtaaacggtagtcaaaccactgcctcatactaacatctttttgcttcttctttctttttgatgttttggtaggtgtttttgttttattccaagcctatacccatcctctccttttggaagtaacaatggatactgaagtgctagatatgaaacgtgacattcatgtatcctctgtaacttaccaaacttcatctgtaggactatatctcttttatctagattctcgtcgaaatctctaggtatcaatgtagcaacttccgctatagatggaaggttaaatactctgccatctttctggtgaatagtgaataatcctcatataaaaaatcgtcttttctttctctctgttgaatctatcacgggcaatcctaaatgcaccaacatgagggtttatcttgttcaacattgctagcaaagatgcaactatctatttttagaactttttttttgccaccttcgttaccaccatggtt

SEQ ID NO: 16724 - DNA, 3680 bp, Arabidopsis thaliana landsberg
aatggaaatcaatatctaaaaagttaaattaacatagaaaaattcatataaaaggaaattattatagtccccgtagtcctctcagtccgtcatgtatttagccagagcttctatctccagagagtcttggttcgaagctaaagccaattaatactcggcctcccacgaaatgttaaagaaatctttggtgtatcaattcaaatttgtgtttatactttgtaatcgactaactcaaaaattctttagctttttatcggttggtaatcactacaatacgttggagatgtttcttattttgtttcagagcacatgagaagaaagtaaacaaactaaaatataacctctttctacctttttactcaaaaaagaatcccaaaacaaaaaattgaagtgaagttacaagtctctgtaattatcttcgtgtagagagattttatacaggttcctctgggggttctcttctgatatctcaaagcatctatacattcggaagctcccattcattgcctttgcctaccttgagaccaaatgtggcttcatgttgtgtgttatgctgtgaacataccatcaacacttcaagagtcgtgaagagaaccttggatcatcagtgatatacgctttgcactctctgagtgatacaactctcctttgaaaccaatctgtacagatgaagattatagttcatagttgagtttgagccaaagtcattgagagagacacacacgacgatgatttgtatttacctcggttgagctgtcgggagagaaccaccgtaagagcactcctaaatgtacaactgctggtatcaacttgaatagcaatggtgttgttacctgttacataatttaatttgtttagtaattatacaatattgatactggagtatgtgaattctactgttattcattgataaagcaacgtccgtgtcaatattcgtttattcgtttttgaatatgaacttattataaatatgatgaggaaatagaccataccaggcttaaagcagttgttcccagaagcaggaggtacaatttgctctgcaaataaacacaaaaccccttcattgttacttatcgctccaccaaaagcaaattatgagaaatctatatatggtcacacacggtttcaaagatatatgctaacatataatataactaagcatcaataatcatagaggtctcttatagcttacctcaattaggtgaagattagatgctcgacttagcagaacaaaagcaaattccccaatctgtgcaagggacataccaacctacagacaagaaaaccgtaaggcttatctacaagaagatttcaaatgatgagaaagaaggaaaaaaataaaataagggttcgcttcttacaagtagtgcagttttgttattgtgcccaaagactttatcaccgatagcagctaccaccgtctttatcactatcaccagtaatacagctgctagcagaatgtcaacatggttccacaagaagtgcatatgtatcaacatgccgatactagcaaggaacagtgctgcaaaaaaattgcggatgggttccacctgcaaggaaacagaagcgatcagaacaggtttatatgataaactttggtacaatgtgccaacgaaaggaaacgtatttcatcaggaaaccaagatagtatataagcaagaaagacactttcaacataagagagtgtccaaaaaatatgagtagagaccctctagttcgaaacagtcaaacttgacttcttacctgttcaagagtatgctgagcgagatcagttgttgagatcatcactcctgccgcaaaggaacccatctccagacttaggccgagcttgtcactacactgtagaagccaaaacgatactggatttaagaaatgaaaattcgagagtcacaaatgtgcaaacagccaatagctaagatgaacaaagggatcagactaacccaagcgacatgtaaacaaaatgctacagcggccaactgatagagctcattagtctgtcaaagattgaaaaacgcttgagttgatatacaatttaaagaccaaaactggagcagctaagaaatgtgtctatacctgagaagaaaggcttgtcataagttttagaaaccaaggtacccaggtacgggacaatacaaacaaagctcccaaaaacgcaatcaaaatagccaacctggaaagatattacagcccagtcaaaaagaaagtgtaacaaaaaactaggttttattgtaacaagtgaacaatggaagcagggtattgtggatagtttcacagaaattcgtggaagagaaaaatacatacgatttagccatggacaacactccttgaaggacaccagatgtgccaccaagaactggcaggagagcaaacagcaagcccacagcacaatcctggtgatatatgaaacagtaaattaaagttttaacaaaagtacttgctgcatgcaacatactacctattggaattggatttgaatcatatttcggatcaaaaggaaatgcagttttagaataataggaaaaccaaaaaaacgtgtgaaaaatgataatagagaagctattgttttgagagttatcaggtagagatacctgaagaataagagttcccacagttatctggccatgtagagcacttatgctatttctttccattaaaaatttcaaaacctggtacaagaatcatggggaggtaaggataacatatgacaatcaagtctaaagagtactttaggaaaatataactggcacagtaaagaaaagatcaaatcagtgagagtagggaaatattcaaacagtgtagaacaagatcaaaatattaattgaagtacacataggaaattagaatataccactgctgttgatgacattgatagaaacgcgcctacgaatattccttctgttagtttaccgccacataactgcaatgaagaaacagctaagtcaacctaatgcactctatatacatgtcataccacaaatgcctactaactcattcttaactcgattgctacacttttagaacataccgaggctgttattccactcaagcacatgaacaaaaatatctgaagaagacctcctggaatagctactgcacgaaccacacgaagctgcaaccacacagtacaataactgtctcaaaagtttcaatcggtttggcaaagaaaccagacaaatataagagagtggaaacatgcaaaccttcgctgcagaaaattctaatcctaaagcaaaaaggagaaagataacaccaaactgagctactgtttcaacctgtgctacacaaaaacttataaatcaagtccttgtaccaggcaatctagtagtcatgaaaacatacaaacgtatatgaagacaaaaaaagatgaactttgaagtactaaagctgatgtaagctacctgcaccatttcactaacaaagcttaacccgcccggtccaatgatagatccagccaatagatacccagtaatgacctgcaatataagtagtgtagaaattaaataacgctgtcatgggttgatcagtaagagctagcaaagatcgtttctacaatgccggaaagctggatactcaatgctaataaaataatattgaagtcacaagctttgcaaggaagtgtgtgctaaccggtgacccgcacaagcaaaggcattccaccacagtagcagaaacatgacgac

SEQ ID NO: 16725 - DNA, 1241 bp, Arabidopsis thaliana landsberg
  unsure (1)..(1241): unsure at all n locations
tcaggttcttgcatttcccactgatcgggatcatctgataagtgatgatcagtccaatcgtnnnnnnnnnnnnnnnnnnntgaatacgcttctgtggcttttcaaaatttctaatttcctagctgagagagcttcaggggatatggaatttggataatttattaggtgttggagctattgattcagtttagtatataatttagtgatgaaagtttggaactttgtttctccttccgagctggattgtaattttagcgggttgccacattaaggttaagtctgttatctcgacaaactttgtggcactctttggtcataaatgtattagttcaagaagttaacatgagagtgtgaaatcctttgattgttttgctctatatctttgttggtttgttagtaggttttctgtttcatgattcctatgtgcttttgtttggaggactagttaagtataccagttttcatgtagtttttgcttctaagatggcatattaacctggaagctagctgttcttgacttagctgggaagcctactttgaatcatcaaacgtgttcttttactcaaatgcatgctcagaggaagacaacctatcttctaagtctatgctttcgtatttctcacctctagggatttctatgtatggtcttctgaatgtccatttttttattcgaggtcttatctctttgcaaacctgtttatctggaatcttgaaacagtggcaacaatcctgaaataatgtgctcgtctaaattattgagtccctttgtgcagctttcgctgaccattgtatacatcgctggaggtgttttcatatctggttggattggtaagttcacctttgctaaaatccttacatatattataatctagttgtgtccttctttcctctaatgcaatgatgctattatccgtcaccataattagttgtccttttttatagaggtgtcttgctggatactgactggagagaggcagactgctgtgatcaggtcaaagtacgtccaagtgctactaaatcaggatatgagtttctttgatacatatgggaataacggggatatagtaagccaagtactgagtgatgttctacttattcagtcggctctaagtgaaaaagtatgtttcacttttgaatttggtttcaagtttcctattccatatcttcacttttgcaaagaatgatacataaacatggatttaattaatctttttgatcttggactttacaggttggggatt

SEQ ID NO: 16726 - DNA, 740 bp, Arabidopsis thaliana landsberg
  unsure (1)..(740): unsure at all n locations
ggaagaggtgcagatattaagaaaattccagattgcatcaaagatcttgatgggttaaaagagcgtcatatatatggctgtccaaaaatcgtatcactgccagagctccctagctctcttaagagactaatagtagacacttgtgaatcactggagacactagtacatttcccttttgagtctgcaattgaagatctatatttctccaactgcttcaaattgggtcaagaagcacgtagggtcattactaagcaatctagggacgcatggctacctggaagaaatgtaccagctgagttccattaccgagctgttggaaattccttaaccatccctacagatacctacgannnnnnnnnnnnnnnnnnnnnnnctcctaaacagaagatggtagaattttttgacttgnnnnnnnnnnnnnnnnnnnnnnnnnnnnnnactggccaaaaaagacttcagcttctccccaaggtccaagctgaacatctatttataggccactttactctttctgataaactggacagtggggtattgttggaatttagcacctcatccaaggacatcgacattattgaatgcggtatccagatctttcacggacactaccgatagattagaagcagaagaagctaaatatagttggtgctaagctgngttagtatcaattaaaacgttaataattggtgctaggctggttagtatcaataaaccattatcacttatacttatccctcagc

SEQ ID NO: 16727 - DNA, 3519 bp, Arabidopsis thaliana landsberg
gtcctaaaaaaaaaatgaaccttgatccaacaaacataaatttaaaacaatcaaagattgacataagaacataccttttggagagcctctaacataaagaaccatgtcagtgcattttttcactacacttgaaccaacatcctcaaatggtgacacattttcaccaatttccttctccatatacacattctcctcaaatggtagaacactctcaccaacatccttctccacagttacattatcttcatatggtggatgtctctcaccatcttccttctccacattcacatcagaattcacattctccttaaatggtagaacattctcaccatcttccttctccacattcacatcggaattcacattctcgttaaatggaggtacattctcaccaacttgtcttcttacagtggttataaacatttgattgtattctcctaaaatctccacaacttgcttaaaacctgcatcaattgcttctctcaaagtgctaatgtccggaccattttttgagacatgttcctccgttggctcgccgcttcgagaacgcacatcttcgtcaaacaagtccttccaccagattttcttcctctttttgattaaacaggttctccaattatcaacaactggatcaacaaaacttatcccatcatcaacaacattaccatctacaatgcgtctcaacaaatatttctcttcgtcatccggttcaaaaatgctagagatatcctataaaaattcaaatatcaaaataattatattcaagcacatagtcacatataataagatataattcacaagtcttacatttacacttccaaactcctcaattatctcttccaatgagaactctttcatgacactactagagaatttactattacacattctcggacactcattctcgaaccttatagggtctctaaacttttgtcccaactatgggatagcctcaaatgataaaatctacacattcaatgtaaacgtcacataactattatttttaagtctaataatgcatttcatcatatagaatactagaaattgttacctctaatagaaaaataaatccagagaaacatgtctccacttttgctttcccattcatgttatttattatcgacttaatcccttccatacatccatcaaatgtgaaacgatcccatggaaatgtctcgcatgcatgcacatcatcaataattttcagcaagaaacgatcaatgttaccatcaacctttgactttgcaacaatcaccttgcacaaaaatagcaagatagataacttttttctatctgccttcttcctttctccacaatcattcatttcattcagcttcttttcaacatatatgattttaatccttgatacatttttaaacatcttttttgcaaactttaattcttcatccttgataatcatactgggctggaactccttagggtactcataacactcaaaaccacagaaaagcgcatgctctttaatggagtacctaataggcactccattcaccacaaaccagcactttctatccatctctgtctgtgatgtgcgaagcaaaagcatccacatgccttgagtcatgtggtttttctcctcaggcatgtggaatacatgcctaaactgtgaatgcgctttgaaccatgacaaatcttctttaaacccctccaaatacttcactgtctgctgcacagtgtatctcgtccctaccttacacgtcttatggtattcgcttggaccaaagaacatcccttgtggctgcattggttgttcctcatcatcaagttcctgaaatttcatacacaaccataaaattaaaatttcgttgtactacttgtactagttatctcagaccaacattatcaactttgctcagaattcaattttctaatgcaaaccaatgtatgattaatcacgttaacgtataaatccatgcaccaatcacataagttgaaactatactattaagttctcttaagtgttttctagttgtccctatacactacttttaattttcgaacacaattttcagaaattaatgttacctcagatttttctttttccccttttttatcctcttcttcagggttttcttccatcccttgaggctgcatttgttcctcgttatcaattgggtgaagattcatacacaaccataaaattaatatttcgttgtactacttgtactagttatctcaaaacaacattattaacttttctcagaattcaattttttaatgcataccaatgtatgattgatcacgttaacgtataaatccatgcaccacataagttgaaaatatactattaagttgtcctaagtgttttctagttgtccctatacactactttcaatattcaaacaaaattttcagaaataaatgttatctcagatttttcttcttccccttgtttatactttacttcatggttttcttccatcccctgagactgcattggttcctcatcatcaatttcttgaaaattcatacacaaccataaaattaatatttcgcgttatctcagaccaacgttataaagttttctcagaatccaattttctaatacaaatcaatgtatgattgatcacgtataaatccatgcatgcaccaatcaaacaaaccaatactattaagttgtactcattgttttctagttgtccctatacactactttcaatattcaaacacaatttacagaaatttgtatatacctcagattcttcttcttctccttctttttcctcttcttcagagttttcttccatcccctgagactgcattggttcttcatcatcaacttcctgaaaattcatacacaaccataaaattaatatttcgctgtactacttgtactagttatctcagaacaacattatcaactttttcagaattcaattttctaatgcaacccaatgtatgattaatcacgtatatccatgcaccaattacatagacctatactattaacttgtactcattgttttctagttgtccctaaacactatatcaatattcacacaaaattttcataaatttgtatatacctcagaaatattttcttcttccggttcgttaaggttttccggaggctcttgttcacagttttcgtcttcaaatttgttttcctcggctgcaacttcttcacggttcatatccgcttcacggatgatcgtgaccctctcgtcttcactttcactcgaactaggagtgactaaccttacacgacccatgattaccttgcaaaaccactcaacaatcaaggaaaccgttcaaatcaacacaacgaaaaccaattctaatgtttcaaatcaaaaaccgttccaatttctatactaaaagccctattctacacttacaatttggaacgccggcggtttggaacgacgacggaactgtaacggaactgtaacagatgtgtggagtcgcgacgttcggttttgacggcggaactaaaacggttgtgtggagtcgcgacgttcggttaggaaacggcggtgaattactcggaaatgagaa

SEQ ID NO: 16728 - DNA, 299 bp, Arabidopsis thaliana landsberg
acgtcaagggtcatagcaggagttgaagaagtaaaacctgaatgtttacctgtcctacccactgacgaagacttcggatatgctcctttacttgctcaggagtaaacaattcaacaagtgaggagatttccatcttagacgcatctacaacttccacagactgtttcacattctcttcctttggtgcactcatttcattcatacatttggatttcccttgtgccaataagcaactagttttttcatccatagcaaaaccaccacaattattacccttgggagtatcttcagcaacatgt

SEQ ID NO: 16729 - DNA, 1279 bp, Arabidopsis thaliana landsberg
gctgagcgcgcggaacgtcgtcacctggatggtggtttccccgctcccgtcgggactcagcacccgtaccgctcacctcagcgtggacaccagtcttatggcaatcccgactgcaagaccaagataactctagaaccatagctcgttagagttggatcttgtaattaatacgaaatatatatacgtagaagctataatcttagcgttagtctcggtcttagttagtcttagttagacagggtagtttgctatatcctgtgcatttatgtttgtcatgatgaactatgtttggtttggatctttgtaatgattgtcactagagtgtgggtatcccctgcattttggtttacatactatgtcaatggagttagttatatagttgggaaacccattattctcctttcctctttatctgagaagctgtgtggtctgtgttggagatcagtgaagatgctcatctgttcagtgctgttggagaattctatactcttttcttatgctgcaagatttgccagatcagttctgatgtgtggttgcgttctgcagatgtcagagaacaggcgtagaggaggaaggcgtgctcagcaggagcgagccgctccgcaggatgaggtgccccagcagcagcacctgccgcccccgcccccgatgtcgattgagcagatgtttctgatgcagactcaggcagttcaagccatcggtcagactctggccgccattcagcagcagcagcagcagcaacagcagcaagcaccaccccagcctcagatgcctcagatgcctagagacaagcgtgctgaattcatgagaggtcatccaccaacgttcgctcactcttctgaccccatggatgctgaagattggctgcgcactgtggagcgggagttgcataccgctcagtgcgatgacagggagaaagtcttatatggtccccgtctgttgagaggagcagcccagtcatggtgggagtcttacctcgccacccatgccaaccccgacaccatcacctgggaagaattccgaggtagctttcgtcagtaccatgtgcctgcaggtctgatgacagtgaagaaggaggagttcctggcccttaagcaagggtcatcgtctgtcagtgagtatcgagacaggtttctgcaattgtctcgctatgctcctgaagatgtcaacaccgacgccaagcgacagtaccgttttctgagaggtttggttgaccctctgcagtatcagctgatgaaccacaccttcccgacattccagcacctgattgacagagcaa

SEQ ID NO: 16730 - DNA, 2558 bp, Arabidopsis thaliana landsberg
ttttttttttaaatataatatatgaatgatggtataacgaatattggaaaaaaatttgtaccattcaatttagatggacaacaataaaattaatagagccattttacttttgaaaaaatccatttgttctaatcgcgaatcagggatctattttaggggtgctataaaatttctttcttctgaataaggatttattaggattttgatttttttttaaacatccgactcaatatctaaaatagcaatatcatttatttatccattataaatttataatttggatatgccaaacagaattctatttctatatatggatcaaagttatgcatctatctcatctagcttgggcagctgacatgggtgtgagctatttgttattgataacattgagtaactgtgtggtattggaggtccatgaaaagaaaattctttgtcagtgaattttgaataagacacattctaatatatggtaaatgaatgttccaatcaagatcgggtacgttctgagcacaaacgtgctctgaaatcactgcaatacggatctgaagaataacgaaattccaaaggtctcgagcatcattccgaggatagacaatcaaggcaacaaagaagacatcactgctaaaagatattgttccctgagtggacacacaaatataacattaaagagcaatattgtaacatctatatgagactttccggagatattgacaagcaattagaagttaaaatttggacgattaaagaaaacatccaacgtagacttgcatctcattgttaaggtgatctctgagatgaacaataactatataaaaaagacaagctctcaaaactttattctaaaatgtataatatataaaatttatcaaaaacaaaatttaacatgtgttgtagcatgagtccagaattcaagatacatatggtgttttagtttatgtaaaacaaaaaactattcaaaatgaatcgtaaaaaaccgagttacatacgttttctatatagttttagtttttataaaaccaaaaccaaactgaaaaaccgaatatccatccctaaatacataataattaagaatttatattatatagagaatgattaaaactatactataaagcaaacaatagtccaacattaaataagtattttaaattttaatttttacccgtgttgcaccagcacggattacaagttggttctataagatgtgttgtttctgtcttttttttttttttttcttttttggctcaacatcaactttccattaaccaattcaaaggtacaagtcattagaccacaacatattttaactaaatacaatgaatcagtctagtatcaccctaaaacactaagatggattcaacgttacccaactgaaattcactgtatttttccaaccacaacgagatgaattacaccacgaagtgaaatcaactcttaaaccacctaaattcacccaatgacacaaaaacaattactaacacaaagcacatcaaatcctatcctgagatccaatccaattccaagctattagtccctcaagatccgagtgtagaacgtgtcctaatagcatatacgccaaaagtgcaacttcagaaaggttttgactccttggctttcactatttcggttctaagcctaaaacggatatactaatccgactgaaattcaaccggataccggggtgagacaaaagttcttgaagccggggctttattggagagctttccttcttcttcaatcatccaaatggttttcttttctcccccacttcaaattatttttccattaggagtcgttggcggcagcatagctagaaggccttgaaacatgtaaatctgcccaggatcgataagatcttcacagccaagctcgaaaaccacgatccacctccctctgtaccttcttaacactgaaccaccaccaccaaggaggctcatcggaggagaggtacctccgtgaaggggctgaagaaaaaatccatcagatctgctgccgtcgtccgagagtcatagttccccattgtagatccaccaacgaacctccatctgagagaactacctccgctcgtcgtcgacttaaaactctttgattaaaccacaaagaaggaggagccgccgccggctaaaaaaactaaaaaaagaagagaggaggagaagccctctcacggcgccggccgaagccgaccaccagagagacaaaacggcgattgaagattggtttttggtttgcggggcgaactagagagagaggaactaggactgacccgaccgtttaaaccttaacatttgctttctcaattttttttattttcccgattctattatctgtttttatagattttaaaatcatttgcatgttcataaatcagatattaagaaaattttgttataataatttttgcatgcattttcaaaacctaaattttcttgcagaggaaacgaaactttctccttcaattttcccggaaaagtgtgacagcaaaagaaactgcaatctctccaaattttaagaaagtgtaatcagatctcagaagccagtgtttgtctgatcatgctcttctt

SEQ ID NO: 16731 - DNA, 2143 bp, Arabidopsis thaliana landsberg
agcacagtcactactacttaatgcgttgacaacatagaaaaacaaagtctgacaaaaactcacaacacaaagccaagtcacaatgccacaatgcctagtaactattacttaatggaaccacacacacattccaaatcaagacaaaacacttaacacaatcccaagtcacaatcggaaactatatagaagaggagagagagagagtaatttaccgcaacataaatcgtgttcttggcctgaacagataaacccgctgaagctgtgctctccgtcgtgttgtcggaacacatctgagatgcttcctcttgaattctagatgacagttcattgtagatctcctctgattttccatcaatgaaactaccatcaggttttctatgtgtctcatctaagagtacaagaaaatctggagtagtttctccggtcatctcacactacaacagaaacaaatcaggttagtttttttaatgtaacaaagttgactaagtaagcgtgtaaaataacttacacgtttttgggcacgggctttgtaagaggattggctagaccggtgtttatgaatcccgaagccatccggatcatgtaatcttgcattcctactgttgatactcttcaattctgacttagggtctcacaaaaaactaacaagaccggcccacacttcaagatcaaaccagcgaggcatcgccgcatctcccttttctgtccactttcccttccaccgagaaacttgatcagacatcctctccttcagctttgcttcaaactcagtcctaactctcttgtttattgctttatcccaattatacatttgctacaaaacagacacaagtgacatcaaaaattagttggactaacagcaactaaaaagctttacacaacaaaacataatttagtggacttacagcaaaggtttcaaaccagcgatcaaccattgattggggtggcattgaccagttagcatgaggctccttgaaatctcttttaaagatgctccggacagtatatgcaactgaagtgtcatcgtcaaacctacaaacacaaggctccatcaggcagacaacagtgaactgagactaggactaaatattctaaggaaaaaaaacacaagttgcttacgagagagttctcagaggacggttagggtctaatctcggtaacccagctcgactgagactttcaagtaactcatcttgagtcatgttgttgagctgagaagctagaggattagcatgattgacagaaccgttgggggactgatttgcatcatgcggagaggcaccgcctgcttgagggttgacattgataggcgtctaaggtctcgcggtttgaccattaccctgaaccgtagaagaggtcccttcattgacaagcgtgtttccacgctgctgagcccggaaccttgaatagtcgtttccagagaacgacatcttgcaatgaagaaatcattgtgttagtcacattcgatcaattaaaccgaatgaagattaattaaaccgaaaccctaatagatcaacaacgaaaacctattcatatcaagaaaccctaaacagatctacattttaaacgatagagaaataagtttgattgaaaccctaaatagatctacttttttaaacgatagagaaacatgtttgattgaaaccctaaacgtttgattgaaaccctaaaccaagaaacacgtttgattgaaaccctacgtagatcaattaaaccgaatgaagaattgagaggttagagacattaccttgttcggttagaagacacggcggggatcgggaacacgccggagaagaagaatagacacggctgggaagaagacacagcggggaagaagattagacacgactgggaagaagacacgacggggatcgggaagaagtcagacgcagaaaaaagtggcggcgaggtagaacggtgacgaaaagaagaacggcgccggagaagaagatgaaatcgagggcgaattttttttattagggtttgtttgtttatgcggctgagtttgagctttgctccaaccgggttcgcggtgtatatataaatttaaaacgcctcacaactccctcgcaaatgtgttagggacttgcgaggaaccgacaaaccaaccaatgaaatcgcttcaacattgcgagggacttgc

SEQ ID NO: 16732 - DNA, 966 bp, Arabidopsis thaliana landsberg
  unsure (1)..(966): unsure at all n locations
ggatgggtccaatggtcacaactctagagggacatggatggatatgttatgagtccttccctctcaaaggaacagctctttagcatcaatgacttctctccaagctgggcttatgtgggttgtgaagtggtggtaagcactgttgatcaatttatcttctcggggagtcataagataggtttgtgcttatttgtttttgcaaatttttaggtttttgtcactggaaaattcttaaagactcgggaggagactgaaattggcgagtggtcttgcatgtttgggcaaacagaagttccagcagatgttatatctaatggtattctccaatgtgttgctcctatgcatgaggctggaagagttcccttttatgtaacatgttccaacagattggcatgcagtgaagtgcgtgaattcgagtataaggttgccgagtctcaagtttttgatagagaagcagatgatgagtctactattgacattcttgaggcaagatttgttaaactgttgtgctcgaaatctgaaaatacaagccctgtttctgggaatgacagtgatttgtcacaattgagcgagaagattagtttactacttttcgagaacgatgaccagttggatcagatgctcatgaatgaaatctcccaagaaaatatgaaaaacaaccttttgcaggaatttctgaaagaaagcttacactcatggcttttacaaaagatagcagaaggtggaaaaggtccaagtgttttggatgaaggtggccaaggtgtattacattntgcagcttctcttggttacaactgggccttagaacnnnnnnnnnnnnnnnnnnnnnnnnntgattttcgcgatgtaaatggttggaccgcacttcattgggcagctttctttggcaggtgagtaacttctagaaaatgttcactagttcatcttctttttctttgatttttggattgaaacaaaggtattttc

SEQ ID NO: 16733 - DNA, 1671 bp, Arabidopsis thaliana landsberg
gaaagacatgacatgggcgaccaattttaagtttcttattcccaagctccatggtggaatctctagtgggtcgttactagattggcttgtgaagattgaagaaattttggagtttcaaaacgtttcggatgatctatttgtttcgcttgtggttaagaaattttgagggcaagccgcatcatggtggcaacaaaagcagaaaacacgcaagcgagctggcaagaatcctattaaatcatgggataaacttaaggagaagctatgcaacacttttttacctcctcattacacgagttcggtgtttaatcgtttgaagaatgtgaaacaaagagccggatttggggatgatttcacgaggaattgtcacgttcatgtcaacaatttcgtggagaagcctacttatgatcgagattgttacgttcaagacaacgactttgtcgataaacctgtccatgttatctacgatgatgagaataatgatttgtctcctatatgcatatgattcttctttaattgtctgttattgttatactcttactcttaaaccaagtgtgttttctctttgattcttcttggcaacattgtacttaaaattgttttctttaatccactgaaccatcaatagccaaaaaaaaaaaaaaaacagggaataaacttggcaaataataaacaataccgaacagattctctatgtttgtaaaacaatctataagacttactagtttctatggagaattaattatatatcaccggactcagggcatctccaatggttagcttcaaatttttcttcaaaattagagtttcttcaaatttgaagacaaaaatgaagcaagacttttccaatggtttccttcattttctacttcaaaaagaatattcttaaatatattctatctctagtttattattaattatgaataataccctttactttataaatttatgaattttaacccatttctttataataataagcaaatacaattatacatgaattaatccatttcttttataactttaacccatttcttttacaattgtatcataaatatatctttttaattaattttatttagagtacattattataaagaaaatcacattacataacattaattaaaaatatatatttatgatacaattgtaaacatataattctcccacaaatgatcaattaatgcattccgaagtgagaaatgagcttctttatccttaatttttctgaatcgagtgagataaaagttgtttttgcattttagtttaattggattaaaataaaagaaataatttgtttaggacaaaataaatactttgttattatttgaaggatcattttgtaaataagaaagttcaccttaaaataatgaagatgttaatagtataccttcaaatatgaagatacactgttcaattcttcattttgaagataaaaataaagtaccattggagaagaattcttcatttttcacttcaaaatgaaggaaaaggtgaaaaatgaagcatcattggaaatggtcttagctaggtcggctggttaattggctatcggcccatcctttttcttgctacctaatatgtgacacattgtggctttttgtttaactcctttagtcatctagaatttgtctatatatcaaaagatatacgaacagttatagatggattagt

SEQ ID NO: 16734 - DNA, 492 bp, Arabidopsis thaliana landsberg
ttaaaattaccgatttcaactccgattctgaagcgggaagctgaactccgacgaagcatttttgttttttgtaactttaaatggtttttttttttgttggacgaaacaaaacttattattaagaatgtaaaaaaggaaaacaaaataaacattagtgtttcacttaaaaaaaactaccaaaaatttcaattaatagtgcggacaattcacaaacaaaacttgcactctcaaataactcaagtctggtatagtcactttctaaagagaatctgtgtctatcatgaggcaaagagtaatcaatgtttggtccatgagcgatgatctcaagagggtttatagaaggaaagcttccatagtaattttgcttgatatgatccatctttactgtactgctcattcccgcgatctggtagatatctttcttgtagttaaagagatgataatactctcttaccagtcttttatcgcattcgaagatcaccgcgtaagcct

SEQ ID NO: 16735 - DNA, 538 bp, Arabidopsis thaliana landsberg
agggaactatagtcttaaattttatcctcgcctttttttcagaacctttaagtttcacctgtgatctatgtaacatgttctcctttttggttcttagcagccttgaaacacccgagaactcctccttctaattccgctgtagactatccatcaggtgagtcagaccatgtctcaaagcgaaccagacctatgggaatctctgacgaggtgagaaaaatcttaattaatattatatattttcttatcaataccaattttacatatttggtagtactagtttagactttaaacgtatttcttctttctccccatatgtaggtgagtctaggtgtgaacatgttaccaatgacattcccggggcaggctcatggtcataatcaaaccttcaaagcacctgatgacttgcccaagacagttgcacgaactttgagccaaggctcatctcccatgagcatggatttccatcctattaaacagactctgctactaggtctgactcttggtctgtatgcatatttcatgtaacatacatcatcag

SEQ ID NO: 16736 - DNA, 745 bp, Arabidopsis thaliana landsberg
aaacaaaccgcctttattttccctcatggttttgccgttaatactctactgatcccaatgtttcaaagccatctccaatctaattgctactagggagaaattttggttgagtttattgtatcggatggaacatatcccgctaagattaactctgatacctacaacaacttagaggctgacaatgatagagaccgacgactctttcttaccgatttaaaaatgggtgagttggaggttttgtacatttttaaaacttagaacttgattgaagacctttagatttgcgtatttcaagagtgttttggaaaaccgcaaaatatcaccaatcacacatttgttttgtaaattgtatttttttaagaaaacaaataaaagtctatttgcgttttctttatcagataataactcttggaacgcgcttcttaaactatttaataattaattgtttttctacttttgtacagtaaaagatctacaaattaataatgtttgtaccgtgaaattttctcaatttatagaagtattgatttatcgataaattaataattattaattcatagagagatttgattaattttgtaaaattttaatacttttatgtgtggaaaagatttttttcattataatcaacatattttttagaaccagttacaagtaaaaagataatattttgtttaaaaacaacaaatatttttttttaaatagtgaaatatcgaaaatgaatacttatcaaaaatattttaat

SEQ ID NO: 16737 - DNA, 1762 bp, Arabidopsis thaliana landsberg
  unsure (1)..(1762): unsure at all n locations
tcttctcccctctataaaggaataaaaaggataaggatgagaggatgcctgcgagtggctccgggttactgcgagtggccaatcaatgtagtaatcaggatgcctttcatggctgccttcagtggtactagggcttccagggggctaatctagcaatnnnnnnnnnnnnnnnnnnnnnnnnnnnnnnttatttcatttggaaggaacgtaatgctcgggtgcacaccgccatttccaagtcgccagttgtgattatcaaggagattaatctaactattcgggcacttcttgatcctctgtctagagctcaggtttctcgccatccggggaattctttcttatcaacttggttcctggttttcaaatctctctgatgtgtcgtcctagtttggagttatgtgcttcttttgcaggtttgctcgtcgttgctctctttgtttctcgggctaggcgatggtgagtctcttgctttgcttttgttgggcttttaatttgtggttgtttctgttgttgtttttcgtttgttgggcctgcggcctgttgggcttttgccatgtattgtagaactttttttaatggaaatttatggaaaaaaaaaatgttagtaatccactatatcagagaggtatagaacgagaatgcattaactttattaagaatgtaatgtacatatttatactaagatacagacatatgattagggattgattaattacaaacatgtcctttaagatattatgacatatattctctatacgctccctcaagaaggagggagttgacggactccaatcttgaaacgtgcggactgaaagtgagctcgagagagaggtttggtgagggcatccgctagttgatctcgtgttgatacatgtgagactcgaagagcaccggactgaatcatgttgcgaacgaaatggtagtcgatggctatgtgcttcatacgagagtggaaaaccggattagcacacaagtaggtagctccaatgttgtcacagaatatagaagggtgaactggtaaccggatgtgtaactcagagagaagtgagcaaagccacttaacttcagatgcagcgtttgcaacagctcgatattcggattctgtggaggagcgggcaacaccccgctggttcttagaggaccaagagatcggattcttgcccagatagattatcttatgcattggtagaaacataatcatcggaatccccggcccaatctgcatccgaaaaggcatggagattcaatggtgaggtagtgtctaggaaaataccatgcgttgatgtgccggcaagatatcgaagaactcttttagctgcttgccaatgatcttctgtgggttgatgcatgagctgagataatcggttgacggcatacgcaatgtcaggacgtgtaaacgctaagtattgcaagctacccaccaccgatcgatattcagatgcatcgttgagttttgtaccaccatggagagtgagctttggagaggtgggtaaaggtgttaacaccggttttgcgtcagccatgttgtgctttgcgagaagatccttgatatacttcctttgcataaggtgcaaaccttgttttgttcgggttgcttctataccaaggaagtagtgaagatctgtgggatctttgatggagaaacgttccgctagggaagtcagcaccgcatcgatggatgacttgtcgctccctgtgacaataatatcatcaacatagaccagttcatagacgaaagtggtgctatgacagtagataaata

SEQ ID NO: 16738 - DNA, 1514 bp, Arabidopsis thaliana landsberg
  unsure (1)..(1514): unsure at all n locations
cgatatttaaactcttttaattgcaaactctaaatctctaatcgttctttctaaacccaaaccgatattgagcagtgtttaattgtaaaatctaaatccatttataaaaccaaacagacattcaacctcgtttagttataaaatctaaaactgtttataactcaaatcgatatttaatagtaaaatctaaacttcaatcctttcttataaacccaaaactatataaaattttgttcttgtggcaaattagattttataataaaataaatttaatttatttattaggtataaattctaatttaatggaataaaaaggtgaataaaggggtgaatataaatatattttttattggcccatattttttactaggataatggccggttatgctttggtgaaaatttagataacgcaagttagatttttctcactttatttaataagataagattttagcggggatgaaatttttacaagcgaatccctcgatatttcacttatgttcgtggatgatagcttcttttttgtaaaacgacaaaaaaaacaatgcgtcaatggatttggaatactaaagaactatgaagaggtttttggtcaccaaataaacttctcgaaatcaacagtccaattttgtcatgagttgacaactcgatgatggacaaacttatggcaatcttcgaaatcactaatataggggatatggacaactacttgagattatcgaaaagtttaggaggatctaaaacaaaaaaaatttactcttttagaaaatatttacataatagaataaatggttggtttacaaaattcttatctaaagatggcaaagaagtattgattaaatcagtaccagatgcattgcttacttatgtattgtcttgttttagattaccaaaatcagtaacatcaaaacttaggaatgtagtaacgaaattttggtagagttccaatggacgaacaaaacgtttacagtggaaggcatgagataaattttgtcatagtgcctctctgctctccctctcctcctccgggtgcctctgtgcttgctacttggttccgtctcttcagctaggtcctcctctgcggttcaggtttccttatgagttttttgggtccttgggtcgttccctcttcgttcttttggtttttgggcctgctgtttttaagtttcagcttctttggttgttttgggctttgctcttgttgtcgggcctgcgcgccttggatttgggcttttggatgtgtatgttttcgagcctgtgtgcttatgtttggacacttgtcttgtaacttgttgtttgttttaatggaaatttaaaattaaaaaaaataaaaaaataaaaaaataaaataaaaaataaataagttttgtcgtaacggtggacttggtttctagaatgtggatgattttaatacaacttaattagcaaaacaactgccgcaattgattatgattcttaactctttatttgcaaagatgttcanagaaaaatattacccggaatcaaatcacatg

SEQ ID NO: 16739 - DNA, 586 bp, Arabidopsis thaliana landsberg
gattacttcacttacttagcgaaatcagcagagaagataatgagccatcgcgagaatctcaagatctatacttattaccaagaccggtctaaatgggaatctgctatcttcgagcatcacacgacctttgagacgttagctgttgagccagacctaaagaagactttgattgacgatcttgatgctttctctaaaggaaaagacttcttcaagagcgtaggacgtgcttggaagcgaggatatcttctttacggtccaccgggaaccgggaagtcttctatggtagctgccattgctaatcatatgaagtatcatatctatgatcttcagattcaaagtgttagagatgatggtgaattgcgggagattcttacttcgaccaagaaccggtcgattcttcttattgaagatattgattgtggagctgatgcttctcgtagacgtcagagtaagaagaaggaagaagatggtggagaagatgatggtgagccacaaaagaggaagaagaagtttgaagttggggtaagtttaatgaaaatttcctctgttttggtagtttctttagtcttatgaatctttctttctt

SEQ ID NO: 16740 - DNA, 1457 bp, Arabidopsis thaliana landsberg
taaatatgatggaagaagagaaagagaaaagcggcggagttaggtcgaagaaaacaaagaaaccctaattcagtaatgggccaagatgtagatacatgcggcccaaataaagtttacaatttataacacgaagctaattaattggtgtactaccaagtaaacggaaaaaagttgcaactacaacaaggctcgtcctcgtaagcatgacgagtgtgagaatcccgatgtaattcttaggcctgggcataatacccgaactcgaagaaccgaaccgaactcgacccaaaatacttgaacccgttttatttcggttccggctaattatccgatcgggttttgttttcaaataactgtgggtatcgggtattacccgaaccgaatctgatacccgtgggtactttttattacccgaacatatatatatacatatgaggacatatatgcactaataacttgaatctgtgacttgtttaatgatttgagttctggaacaagctcaaaacaaggtttacttcttgttttatattattgtcttaagaaaaaaacttgttataattttagatctttggggttttatgggtacttttatgtatgtttgggtatatttggacaatgtttgggtaagtaacactcaaacccaaaataattttggttatgtatgggtttttaaccaatacccgaattactcgtattcaaagtgaacccaaaccgaacccaattcaaaattgtacgtataacccaacatatccaaaatttctaaatatggaaagaaaaaaaatccaaaatttctaaacccgaaaaactccaatccgaaaaatttgacccgaacctgacctgaataccgacatgcccagagctactccaaagtggggaaaattggctcggattagtgtggatgaagtttttggctttgttatgtagttttttggcttgaagaccaaaacttatatagttccaaagtccaaactagcttagagaaattgaaagccaaaagagggtagatatgtcttttaacactctcttacaaaaaaaaatagttacttgattctcaaagaagggtgaattcgaggttttttgcagcgaagagaaagaagatggtcggttgagctatttttgcttctcccgacaaaattctcagatccgaatacttccaccatcatcattcatttataagatctgggttttacacagctctgcgagtacagtaactatgagaaggagaggaggggatagtttccggagagctggacggaggaagatctcgaatgtggtatggtgggttctctctggtattgccctcctgctcttctttctcattctctccaaagctggtcatattgaacctaaaccctctatttctaaggtatattcaatctcaaagatcttttctttttggtcgatttcaatttgttaaaattccaaacccctttctttttgtgccagccgaacgttacccg

SEQ ID NO: 16741 - DNA, 2252 bp, Arabidopsis thaliana landsberg
  unsure (1)..(2252): unsure at all n locations
gttcttgtgccagtcaactggactaataacacactggatgatggctaagcagttaaggaatgtaacttcgagcgacattgacaaactctctgtttcaaatattccagagtattcaatgaggtgtgttagaccttaccatcttgagtcttttatgtttccatctgtcacaaatggtgtagcaggtaaagatttgagctacattttatgttttgccaggttttggactcatatagtaatggcttatgcctttaccatctggacttgttatgtgctgatnnnnnnnnnnnnnnnnnnnnnnnnnnnnnnnnnccagtttgttgcatcagaagctcgtcgacctgaccagttcactgtaagactcctttcttccccttggattaaacttgtaaagactgaacagctgtggccaacgatctaatacgttgggatttgtgataggtccttgttaggaatgtacctccggacgcagatgaatctgtaagtgaactggtagagcattttgtcctggtcaatcatcctgatcactacctgacacatcaggcaagttccttagaagttttaaatttgaaaccgtttagttttctttaaaattatgctcttcttgagatgtaagaacaacataaacattgtgagacgatatgtaggttgtatgcaatgcaaacaagctggccgatttggtgaaaaagaagaaaaagctgcagaattggcttgattactaccagctcaaatacgctaggaataactctcagagaattatggtgaaggtacttcagtttaaatctcaaacttcgttttttttgtgttctgttaaactgacccgttccatgctttcctccaccaaccagcttggctttcttgggctatggggacaaaaagtcgatgccattgaacattacattgctgaaattgacaaaatatcaaaagagatcagtaaagaaagagaggaagtggtgaatgatccnnnnnnnnnnnnnnnnnnnnnnnnnnnnnnntttaaaacacgatgggctgctgcggtttgtgctcagactcaacagacccgaaacccaacccaatggctgaccgaatgggctccagaaccgcgtgatgtgttttggtcaaatcttgctattccatatgtttctctgacagtaaggaggttgatcatgcatgttgccttcttcttcctaaccttcttcttcattgtccccatcgcgtttgttcaatctcttgctaccattgaagggattgtgaaagctgctccgttcttgaagtttattgtagatgagtgagtttttcttctttactctctctcttcttgacatcagataacctgaaaaaattactaatgatggactgacttgtttggtttaatgcagtaaattcatgaaatcggtgatacaaggtttccttccgggtattgcactgaagcttttcctcgcctttcccccatccattctgatgatcatgtccaaatttgaaggcttcacatcgatctcatctttagagagacgagcagcgtttcgatattacatcttcaacttagtgaacgtctttcttgctagcgttatcgctggagctgcgtttgaacagcttaactctttcctcaatcaatccgcaaaccaaatccccaaaaccattggtgtggcgataccgatgaaagcaactttcttcatcacgtatataatggttgatggttgggcaggagttgcaggagagattctaatgctgaaaccattgattatgttccatctcaaaaacgccttcttggttaagactgataaagacagagaggaagcaatggacccgggaagcattggttgtaatacaggtgagcctcagatacaactctactttcttcttggtcttgtctatgctcctgtgacaccaatgctttttccttttatcttagtctttttcgctcttgcttatgtcgtataccgccatcaggtaaatgtagtttctttctcgcctaaatttgatgaaactggctaggatgataacttgaaccttctgtttatatgctttcttattctcagatcataaatgcgtataatcaagagtctgagagcgctgctgcgttttggccggatgttcatggacgggttataacggcattgatcatatctcaggtgcttctgatgggtttgataggtacaaaacatgccgctgcagctgctccgatggtcattgctcttcctgtgattactatccgataccaccgcttctgtaaaggccgtttcgaacctgcctttgaccgttaccccttacag

SEQ ID NO: 16742 - DNA, 1992 bp, Arabidopsis thaliana landsberg
atttcagatttgggaattaaaccaattgataatcgatttctaattaatctgtatgatttggcttgtttttgcagttcaacttagggaagaaccgaaaggtatgtgagatttatgatttaatcgatttcactatataaaagtgttgggttttaattttaaggtagtgatgatgttgattttgttttggagacggttttcaaagctgcaaggatttgttgttggcgactgttttactctgtaagctgttattctcatactaatttgtttcatttcaagtatgtgttgatttgattgaaagttagttgagtgtattattgtttgaatttatcatcacaaaatctataattggtggtggagttgtggtcctattgtcgtgatatggacaaggcatgggtgtggcttccaaggtatgagtcttgttgatactgcgtcttgttgatactgcgtcttgtttgattaaatgattttaataacatgcctgagtcgaaaatatagtgatatgaactctctttatcggatgaaacatatagggcaagccgagagtatgtgaaaggagcaacaaattttgttactgttgcatcaaggaggttagggaatccaactgaacttttctgtccctgcatcgattgccgtaatgtttgccatcaagaagtagacacagtattgtaccatcttgtgatcaagggtatggataagaagtacatgaggaattcttgtttgagtatgcatggtgaaagaaagtctgatattactcatggtccaacattagaatctgaggcttatgatttgctaaggacggcttattgtagtggtgaaggtacacatccattagacaactttggaggagagaatttggatggtgaaactgcagaagactctgagtttaggtagaaactgaaagatgctgaaactccattgtactcgacgtgctctaattacaccaaggtttctgcaataatgggtctataccgcatcaaggtgaagagtggaatgtcagaaaactactttgctcaattgttgacgttagtccatgacatgcttcctaaagagaatgtcctgccacagtctactgatgcgatgaagaaattcctgaagatttttgggtttggatatgatgtcattcatgcatgcaagaatgattgtatcctctatcgaaaatagtttaataagattgaaagttgccctaggtgtagtgcttcaagatggtaaacagataagaatagtggtgaagaaaagaaggggattctagcgaaggtattgagatattttccaatcaaggacaaatttaggaggatgttttgatcaaagaggattgtagaggaattgcaggggcattatagcaatgcaagtggagatggtacaatgcgacaccctgttgactatataatgtgggctcaagtaaatgataaatggccagattttgctatggaaccaagaaatcttcggcttggtctgtctacagatgggatgaaccctttctctattcagaacaccaagtatagtacctggccaatcttgttagtgaactacaatatagctccatctctttgtatgaaggttgagaatattatgttgactttgttgattcctggtccaacaactctgagcaacaatattgatgtgtaccttgcaccattgattgatgatttgaaagatttgtgggctgagggtattgaggtcttcgatgcttttttgaaagagatgttaacccttagagctatgttgttgtggacaatcagtgactatcaaacattaggcactttgtctggctataaagtgaaaggaaaacaagcgtgtaatgcatgtggaaaggatacatcttgcagatggttgaagaattgccggaagtatttgtatatgggtaatagaaagagactgagaccaggacatccttatagacgcagaaatcatggcttgataacactgtcgaggaaggcaccgcatgacggattcagtctggtagtgagatatatgacatattgaaggacttca

SEQ ID NO: 16743 - DNA, 2192 bp, Arabidopsis thaliana landsberg
cgtgaaaccaaagccaccgttgccgggacttgaagggagtatgacgatagacgaaagaagtgctaaaggagcaaactttgatatcggaggaattggttaagtcacgcaatctgagcggtttgcggtaaaacgctgttccagtgacgttttgtttccgattagttagtctaagaagatcattgtcgtgttggattgtcgatgctccttctgttttaatatccgtttggtttcctttgaaacctatgaatgtgaatttcgctgtcgtggcctcagcaagaacagagcttttagaagcgtttgatgatatcattagaaagaagaagaacatgaacgaggttatggatcttgctatgcccattgagtagtggtatcttgagctttttgactttgattgtatgaagtaactagtaagagagagcattgagtttaagtttcaaatatggacatgttcttatgctatcaaaccaactatcaacgacgaaagagtcgtaatgttcaaagtcaaggtctttttgggctatttgtgtggaggagatgactctcatgatttcacgtaattgcataattaatacttgacaatatcgtctaccaaaagaaaacaaaatagtggacaaaatgatgaagaccggctatgatttagcctaaatatgagtcttttttggtcataaattttgttagcccattatggaaagtgaaactaatgggcttggcccatattagcgtccatatatttttagcagttaattatgtcaaattaaactgagtttcgagtttacaaaaaaaaaacaaaaaaaaactgagtttcgaatcaaaaaatcaaaaatcaaaattcagatctttcctcttgatatctccctcctactcactccagattccagaatatcacgtacttacttggtggtatcagaaatctacgatttttctggtgagggttttgaggtgtggagctagggcttttgctgctagatagttgatttttcaattttccgcagcagaaatgggaaatgcgtcggagaatttcgatattgaagatctcatgtcttatggagacgatttgatcaacttattgaatgttaagaatggttttgatattatatctcaaagttctgagcagttcaaagctctcaattttgcttgccatgaggatttcaatcagatacaaggctctattgaaggtcagttttgtttttccgatttgattctctagataatttactagataaataatgtggctttagctggattgagcgaggaatttttttggtttggacgcagattgtaagacgaaactctatgcttgtaagaagaaaactgaggaagcatattcagatattgcggctgaagatgaaattgaacgtcttcagaaagagcttgacgaagagatggaacgggagtgcaagctaaaagacgagcttagataagtattgtttgattttgagtgaaattattctagttgttgattcagtgacatgaaaatttaatcttttggttttttaattctcaatacagtagtcgctgatgaactcaaggacctgaatgctcaattgtcatcgatagatgaacataagcaatctgcaaagagaaaacagcgggaagacttgagaactgagtaagatccacaaacctcactattgcaattgtttgttctgaatgttcgtcacatttgctttctcattgttccctctttttctctgcaggaaaaagctatctatgtatgcttctgtcacgaacgttataccggacattgatgatccatcaaagatctcaggctgtatcctgttctttcatcatcactctattctatcaactttttcttaatcatatatattgttcattttttatccttaggtgttttgaatccttgatattgaaatcatattagatatggtagatcgcgaaaagagggtaattgagaagtttcaattcgagacaaataaaatgacggcatacgagacatgtaacagtatctggagcatcataaacaaacaataaacatacttggcaccacttcatttgtatgatatatgtgtgagcagtcttggttttagcttagcaaccaaaaacctctttatctaccatcagttccgttgatgtaaacactttctactttacttaactttggatttttgttatatgattttgaattttcttctcctgtaacatcatcatcaatctaagaaattcccccctgc

SEQ ID NO: 16744 - DNA, 1187 bp, Arabidopsis thaliana landsberg
  unsure (1)..(1187): unsure at all n locations
atagctacaaaattccctgacagtaccaaggcaaaccacagagtaagaatattatttcatccatagcaagaaggaaaaaacctgcctcatatgaacaataaaagcgtacactaacctttttcccctcctttaagaggacaatcaagccatgcagtacacaatgggaattctggtataattatgtgatgatgaacatacatgtttggagagccagacgattcctcgtataaataaacctgttcatatatatatagctttcatatgagccctaatgtttaacatgtaacctacacagcgagaaggactgaccatacctctagatggctaacatcatcttcattcctagcgcaaataatcaccgaatcggtcggcttgactgttgtgtcatcaatatcctcttcatcatcttcatcctaaaaagaccaaacatcatcttcatacaaaacaatttaaccacgatatgtttcattgtgaaatagaaacagtgaaatggcttacatcaacatctttcagatatggatccatctcattacttggataataaagatcccccattccagaactgaaaagttcaatttctgaatccaaacacaaccaaaaaaaaaggtaacgtttacataaggaacacaccaaactatctctgctaatcaaaatgatcacttgtagaattgcagaacaaacaccaaaaggccaactaaacgtaccatcatcctcttcatcataattatccatgtcaagttctttcaatccttgagaaacctcatcaacctccattgaagaagaaacagccttgcttttagaagatttacccaaagcttcagctacagccttggcatgatcaacttcacttatctcttctccatcttcttcaatctcttcttcttcatcctcgttactaccttccacgctatatattataaccaatatcaatcacaatctccacaagtcctaaatttagagaaacaggaacaatactaagttaaaaatctcactttcttgcaaaagcaccactctcaatgagctctttaagttcttcctttgacggaggctcagccacatcaggatcagctcttagatacccttttggtatccatgacactgcagttatcattctgcacatattcaaaacagagggagaatcatcaaatcggcaaaaaatctnnnncgccggttcttgggttgggggc

SEQ ID NO: 16745 - DNA, 478 bp, Arabidopsis thaliana landsberg
caagccacctcgtagttcaagtttatgcttctcagatttagttgtagtaccttctaaggtgcatggcattccagcgatctaagaatggctttgcgcttaaatcggcgagtttgtagacaccgggtcagacaactttagagattaagtacagtccttcccagtttgccccaagcttcccagcgtttggctcggcagtattttgaaatactttgcggagaacccgatctccttcatgaaatttccgttgccggacatttgaattgtagtatcgagccgtttcattctggtaattttgtattcgcactagagccgaatctatccgttcatcgatcagatctaactcgtcaagcatacgctgattgtcgtgttgtccttacggtaaaagcctgaggcgaaataaaacacacatcagtcgccatgtggccgaccaaactttccgtaacctgaccatgaatgtagaaacacatttgtctggcta

SEQ ID NO: 16746 - DNA, 1020 bp, Arabidopsis thaliana landsberg
ctccaattatagaggcggcggcaacgacgaaatctctgccaattcaacttcttaatcttgtaagaaaaaaaattattaagtcaatttcatgaagcgattactattatgtcgcagtcaatctttatataccgataagacgactaccatctaacaacaaatttgaccaaaagtttccttatttcgttaatatgtcattagtttgtgattgctctaggtattatagaatgaatgctaattaagtgacatatcttgatggttagttatttctattatatatccttcattaaatggtttatcaggttgtcattacatttttatggcacaccgtgaaaaaatagtacgaacatgagaaaacataataattaaaaactagtatataagttaaaaacttgaattcgaagacgttgaacaaaacatgggttgtttttggcttttatagtcgcacgtttgacccatttagccgcatatttctaatcattattgttagttaacctcttataatctaaacatggtaacatctgtttttactatacgatattgctatatgtaaactctattaaaaaaaaatattgctacatagacgatttagccgcatgtttgacctattttgtcgacactttaaaacgtttaaaattaactttttgtgatggtaagtggtacgtataacaactatttttactatgcagtctttatataaacgatttagttatacagcaacttttcagattttcaaatttttcatttaaaaaatatagagaatgatgattgaaattctgatttatgataggttcatatgttgaattaattactaattatgttttacttttttttaaaagtctagctggcaagctctcatgtgctgtgtcaagttatgggagagagttgaacttcctccatatatataattgtcttaataattataagatggattctctaactttagaatatgataatgtgggtgattggttggactgtaattgtaaattaattgctgtaaatttttaggtgcaaatgtgttag

SEQ ID NO: 16747 - DNA, 966 bp, Arabidopsis thaliana landsberg
  unsure (1)..(966): unsure at all n locations
aaaggatggacttttagatgatagacctcctgaatgcggacttccgaatgaatggatttgacctagctgttttggcacatcttgattgtttcgtgaaacaccagtcatagcttctaacagttgtaccttatcctcattagtgcttgcagctatatcaatgaaatacttacgccaatatactagctcctcaagtgcattaatgcatgcccaataaaatctagtgtgcttggaaagatctagtgggataaatatcgcttccgcctttttaaattcatcgtaatcatcttggtcaaaagcaccaggatgaaaactttgtcgttggaattcnnnnnnnnnnnnnnnnnnnnnttctattgttgtttcaaatgattgtcgtttccgacttcctcgtgaaccacttctaatagaaactcgtgagcttcctccacatctttgtgcactactttcacgtctagcggttgactgcaaatttggcctacctcgttgttgccttctagcagcacaatgttggaatatttcatcatcatcaatggtaacacgatacactttttttttttcttgcatttcaggaacctcggggtggggcatgttaccactatcagtgtctgagtaatcttcaccttcttcatcaacttcatgctcgtgtgtttaattaaactattaatatataaataagagataataatggttatgtttataagacaccaaataagaatgtgaaaaacaatcttttaattaatctaactttgatactaaataattttgtagtaacaaattcattacaaaaagaaattaaaaataattattatgcaacatacacgtatattaaaaaaaagtaaaagcatgatgttcaatggattacacatgctttcacataaccggaatatgaattccttatccaatttatttaaataaaatctttgttctaagttgatagtgttgtgtgggttaaaaattttataaaca

SEQ ID NO: 16748 - DNA, 410 bp, Arabidopsis thaliana landsberg
  unsure (1)..(410): unsure at all n locations
tcctgcagnaacaaggtctgtatttttattatacaagntaagctgaacaaagtgacatgaatgaagatagaacttactcaatatatggatctactattgccatgttcattaaaacatatcgatgtgcaatatctctctctctctctgttagagtaacttcagtagccttattcagcggtcgaccctctaggatattctcatctgtttcaaggtcttcatttcgattgacttcatcttgaggtggtaatgaattctgaagaaactcagtacagaatgctatgcattctccagccaaataccccttaaccatacatgcctctggcctaacataagttttaacatatgctttcggtgttttcattgtacctgacatcaattattcaaaaacagtaccaaataaaagtttaagg

SEQ ID NO: 16749 - DNA, 1425 bp, Arabidopsis thaliana landsberg
aaagcggacagttgtgggttgtggcaaacgtggttgtggcggtcgacgaatcatccattggagaagactagtggcataacacatcactaattctctctttcttatccatggttattactttcgctatacttttaaaaactatatgatccaaaagatcatatatgatttgttaccctgcaatttaatttgaaaaccttttatctaaaaaagagatttatttcttgtaatatgattctgttttggcatgaaatggatcaaaattaaaataacgcatacaaatttcattttcttaacattgaaaattaatggataagaatcttcataaattttaaataatttcattttataatatttatacaaaaaatattctaatggtttgatgcataatggattaaaatattccatttatcctattttataaaattggttaaaatcatatattaagaaataagaaatatttttcatttatgaatattcagtcaataaaagaaaaaaaatactgcccaattcatcataaactattaaattaacataaattatgtataaaactagagaaaacctaatgaaatagaataaaaataaaagcctaaaacatcttatatattataaaagcctaaagtataaagctaaagagaaactgcaaatttgaggtcaatacttttacaacctttttgtgtagaaccacaaattttaaagtttttgtttttatagtgttattgctttcttattagacttttttttttctctttgttacggattgttcttcttcttcagagcacacaagctctgagatcccatcaataaatggcggtaacagagtcctctgtttatttactctaacaagtcctttaaggttttaataacccagtttcatgggggttacttacttgtatctacccctgtacgttcctcttctttcatctacttatctaatcacgacgaacactttccccaatttcccaaaaatctcatcttttacaatcgatttctctacattgtaattcttccacatagtttctctggatagtttcattaaagtttgagtttttattgtttttcaattagtttatctgtgacatttattcttcttgcgagcaacatcgactgattcttacctgtatgtttcgatttcacatagacacacgagagaacgctaatttctagtcctctgttttcgtggatcagtctgttttttctatgcaattgtgtgttcttgatgttgttgacacaatgatttcaggttatagcaaggagctcgtgatcatgagtggtacagagttagatgagcctggacagttaaaacgtgctgtcattgatgcttctgctggtggtgttgctggtgcgatttcacgcatggttacctctccccttgatgttatcaagaatagatttcaggtaagtaaagagtcctagttcattggtttg

SEQ ID NO: 16750 - DNA, 808 bp, Arabidopsis thaliana landsberg
tttgtacctctatgtgtctttattgagcttcattttgaatcattagagttgagggaacggaagtatccagtattttctcacacatgggctgctacggatgtcgaattactaagtttttccctgaatatgaaattaatgaccgttggattcctcttcaccatttttgttacattgatttacagctgggtgattaatattgagacttgacgctaaaacgatgtgttcctatgatatgaatgcagatccaaaaaggaggtcgaagagaggacctccgtgttcatgtctctaatatatatcgaacagtgtctgagaatgtctggcctggaatgcttgctcgtaaaccagttttccgcctccattatctgcggttcattgaagattcaacaagacaaatatcgttggcacctcatgaaagctttcaggacatgcagcctctgcgatatgcacttgcgtctgttttaagattccttgcccctgaatttgttgaatcaaaatcagagaagtttgatgttagaagtaggaaacgtctattcgatctgcttctttcctggtccgatgacactggaaatacgtggggacaggatggtgttagtgattatcgccgtgaagtagagcgctataagacctcacagcataaccggtccaaagattctgtagacaagatttcttttgacaaggaactgaatgagcaaattgaagccatccagtgggcctcattgaatgcaatggcttcccttctttatggaccgtgttttgatgacaatgcaagaaaaatgagcggccgtgtgatatcttggataaatagttt

SEQ ID NO: 16751 - DNA, 532 bp, Arabidopsis thaliana landsberg
gaccgtttactgcccttgcgaatcgtattgtacaatctcccgagccggacgattttttttttgaactctggtacaaaccgaagacggaggaactgtcatcggctattccattggaggtgaaatcgtcgctagggaaacagaacttgatacatatcgaacgaggacgagttaccgctatcgtgagactggtaaagccactcctgttaggacttatctcgagagcatccaccgtcgataacaatttccgcggtaggagctgataacgtagatataattgactctatggtcataaagatacctgactttgttgtaaacatgacttaaaccgattgctaatttatgaactctcaccctctgtggtatgattcgagaaataatgaaacctatattaccttatattttgcttggggtcgaaccaattgtgctgacgattgatgcgttaccatatttagatgaaacacatgaaatctttggattttttgacatctgagaataaggaatcttgattgcgtatttaggtactacagggtca

SEQ ID NO: 16752 - DNA, 2086 bp, Arabidopsis thaliana landsberg
tgaagtcagtgtcagacgccacaacttctttatgaaggcctacaccatcagttttcacacttggtgaagctttagggaacacgattgcctggcctttcgataagatcattctagacagtgatgtatcatcaccttctgagaatcagactgcaggatcttcggtaatgtctttttcgcatcacttgtcaattatctagctgaacctaaacattgactctagtaactttttatttatgcatcatgccttaggctaaagattcatcagccgttaaaattatcataattgattggaatatggctggttctgtggttggtgagggtcggttgtgttcaacagaccgactagaacttgtgaacaatatgcctcttggtccttctgcgggaattgttaaggttgagaaattgtttaacaaagacgcatatttgtggagaccaagtccaggaaagtttgtgatgggagatgtactaaatgagaacattgcatggtcacttcatagtataaaatatgtgaattcatctcctccacagtatgaaacagcatcagcagataaaagaccatcaccaccatcagcagataaaagaccagcatcagtaaatttctgcactttaacttacagcctttaaaatcacttaagtattatttctgcttgaatgcttggtattatttctgcatgaatgcttggtattatttttgaatctggtagagcttaagtaacagtactgctagcaccagcaaatctgccaagaagaaatacatcatgttagattacaagaacggaagacaaagagttgcacaaggaagagtatgtacctctaaccgttcagacacagtccaccatatgcccctaggtccaaatgcgagcaaggtatgtgtagaagtttcaaagattaaagatgttgttgtatggagaccaaactctaaaattcaaaccattgccgatgcagtaggtagtattgtggcttggcctactgataaaatcatgattgtgtaaacattatatgtttttttttgttaagtactttgacattgaaatgtaatttgggatcttgaattttatataatatgaatttctttctaaattttgaatttatgatatctaaataatatgaatttctttctgaatttgggattaaaaattaatttatgaactggaattaattgaagaaatattgcataattaaaaatgccataatatataaatattgcaattaactaaatgctattatctaattatatgtagcaaattaaatatgctatgtataacagttatttatatcagaaacaaatcgctattaaataattaaagattgcagcagaaaaagcgctgtaataaaggaaataatgataccagaacaaaaaagcgctacaatatgtctccgacctattatgacggacgatgatagagcgcttctaataacgctatggtataataacatagcgtttttcgggcgctacaaatgttccatattcctgtagtggggtcaacgaagatggcaataacatgggcagcgatgtcagagtcaagcaataccaacttccaaaccctaacaacaacgacaacaacaacgacgacgacagcaacgacgacaacaacgacgacaacaacgatgacaacaacgacgacaacaacgacgacaactaaacaatcgtttgtttatctctctaatttatctctatggtttagtagtcctatttatttatgttgtaatggtccctaatttgctttagacgctttttttttttttatctctgtttgatctctagtcttatggattgatgttgcaatggttcttagttatcttatgttgtaatggttccttaatttgcttaagactgcttgtttatctctcttttacctctaatctctatggtttatattatttttatttttatgtttgttcggtttcactatatatatatagatatgaactttttagcaggataccgtgccggtgtaaatagaaccaacatctcccggttcatggcgggacattttggcaagcctattatagtataattgattctgctgccgtgcgtataatttgaccaagttaaaccgatgattaaactaagtaaccgaattca

SEQ ID NO: 16753 - DNA, 2416 bp, Arabidopsis thaliana landsberg
cgcattgtacttcaaaggagcctggtaagacaaattctataagtcaatgacgaaacacaatcctttctaccttgtcaatggcaaacaagtacatgtgccattcatgcaaagctcacaaagtcaatatgttaaggcttacgatggtttcaaggtccttagacaaccataccgacaaggcgttaatgatacaagtcgccaattctcaatgtgtacctatctcccggacgagaaagatggattggataatcttgtggagaaaatgacatctactgatggattcttggacagtcacattccgagttggagagttgaagttggtgaattcagaattccaaagtttaagattgaattcggttttgaagcttcaagcgttttcaatgactttgcgcttgatgtatcattataccaaaaagctatgattgagattgatgaagaaggtactgaagctgcggctgctactgctctagttggttcttgtggctgcagcctttataggcctcctcctcccatagattttgtggcagatcatccattttttttctttattagagaagacaaaaccggaactgttttgttcgctggtcaaatcttcgatccttccttatcttcttctgcttaagatcggtctaaataggagtttgggattttaagatttggtttttcatatgatttttgagttttgtttttggttttgctaaatctctatttgctttatcttattatataaagtattaaagttagtaactcgccacagtgttaacggtctcagattttcaacatgtgaaacaaaaaactcatttatttattttaaaagaggaaatttatttatttaaaaaaattaaagaagatttttttttttggtgaagaaaaattaaagaagataattataagaaaactataaatatcttattaaaaaaaaaaaaaaaatattttataattctaattagtagttactaattcttgaaaacatgcaaagggaaatttactaattcttaaaaaaaggaaatttattccaaaaaagtatttctaaaaagtcaagagattaaaaatatgaaaactatatctcttattaaataaaaataaaaatggataaataaaaattttaaaaaggattttaaaagttatataatgttcatataaaataatataactaagaaaaatttacattcaattattaattctaaaaggaaaagaattgtgaatctcaccaaatcaccagttatttattattttaaaacaaataatcgaacaaatcaacccaatatcctaaaactttcctcaaatctctcaaaaacttcaaatagacaaattccacaaaatattctaaatttcttgttccaactgaaaaaattaagaagaattttaactattttttgttttgggatttatctttaatttatacaataaaaaataattacatttatttcaacgtaaatttacttttgttgactctttttagttttacttacctattcgaaagaaagaaaaaaagaagaagaaatattaactctattttccagtgagtgtattgaaatatgaagtttatctaaattaaacctttccggattccatcattcaactaattaataaagaaatctacattttaataataatttgaaatttcctaaaatatcatcaatatgttcaatacaaaaagcacatccaccccttaactggtttacatcatgtaaattacatgtctgagtcctctatcttttctctttcgttatagtcttatagatcaaaaatggatgtaagagaagctatgaagaaccaaacccacgttgccatgatcctttccgggcacgtcttatcttccgcgccgaaagactctaacgtcatcttctcaccggcgtcaataaactctgcgatcacgatgcacgccgctggtcccggaggtgatttagtctctggccaaatcctctccttcctcagatcttcttcaatcgatgaactcaaaaccgtcttccgagaactagcctccgtcgtctataccgacagaagcgccaccggcggcccaaagataacggcggcgaatggcctttggattgataaatcacttccgactgatcccaagtttaaggacctctttgagaacttctttaaggctgtttatgttccagtagatttccgatcagaggtaaactttcccttcaatatctcttttatcaggaaaaaaaaaaaatctagggtttggcagaaaggcagaaatatataaaataactagggtttcaattgagaacatacacaccgagtcatatagtgaacccaatagttcttgtttcgtattgcttcaaaacctctatttgatttcaatgatgagaatgtcttcaaattcaaaattagacaaaattgcttttgacaaattaatttgtatctggaaaagtatttttaaatattgacaaaaaagaatgaa

SEQ ID NO: 16754 - DNA, 2625 bp, Arabidopsis thaliana landsberg
ttctgtattacagaatcaaacaataaaattctacatcggagagtaaccaccggaaaagaaaaggagaatgaagataggcggttttgtttccgaaacaaatttccaagaatccagtaaaatttttggttcccgatgatacatcatactaatcacgataaaacaaaacgcacacagaagtaaaggaagtacctttgagcagtcttgtggtttagattctcattcagctctagactggccagctcgtgaggaaagaatgattcctacaataagcccgtaaagagcaagcgcttctgcgaaaataaggataagaatcatcccaacaaagagcttaggctgctgagcatttgccctgaaaaagaatcgcaaaagggtaagtcaaacaccaatgttacatatcttccataatacctcaaagcgtatcagtagcaggaggacgagagacaaacctgacaccggcatcaccaacaatcccaatggccattccagctgagagaccagcaagaccacaagcaagaccagacgagagatgtgcgtatccatcaaagaggtagtaagacttagccttggggttaatcccggtactgatgataacagcaatgatcaatccatagatacccaacactccagccataacaacagggacaatagatttcatcaccaactcaggtctcataactcccatagaagccacaccaacaccactctttgcggttccataagcagctcccatacctaataacatccaatgcaatccaaggattcaacatggtttcgtatgatcatataaagcacccaatgaggttccaaaattcgaggaatgcacaagagaatcgaatctctatctcagatttacagccaaataagacacaaaagcattgctcaatcagattttactagctcaaatgcaaatcatatcccataaatcaccaattccttatttttgcagatcgaacctaaaagactcattctttatatctatcacgatcatatacgcaatctgtaacaaatttcagaaaatgggaacacgatctcacgaagaaagaaacagatcaaaatgggaaaacagagagaaaatgaaattacaggagaaaacgagagcggcggcagcgccaaggaatccgaagaaaggagcagtttcatcgccgctgaaagttgaagccatggctcgtcgtcgttgagatctgatcgggaatgagacaaaaactgttggcagattttgagagagaaaccaatttttttgtcaatgatatgattttgattgattagtaattgccggccatgagtcggcgcgtgaatctaaaccgggcttaaaattagctaacccaatctcaatcgaaccggaccaaattagaatgaaatggttttagtgagttacatggttcttaatttgactggatgatattaattaaaggcactatatagatgaaactaaaactacaagaacattgctctaacttttacacaactttaaaaaaaaaaaaaaaaaaaaaatcgtggaatgttgattcatttgacctttattctggattgaaagtgatgcaaaaatgactttatctaataaaaaaaaaaaaaaaagactttatctgatgtagtgaaattcttgtatttgttgatgcaatgatgctatggattgttttcaaatgtttcaattacgtatcaaattattttatttgtaccaacacatgcaagtatgcaaccatggcctcgtcgtaaagaactttgggcaacatacaaatttgggcaaacatctataacaccttggatttttttgatcgatttaatttgattcttggaattactattaccttcttcttataaaaattcagtaagatatgtgttaccgtgtgaaagtctatatgtgtgggaacgaaaggtttgaagacgagtaagaaagtagaagagcacaatgcgaaactttattggtatacgtaactgtttattgacgacatttgtaggaacaaaaattgcaagataacacattttttagtgtttgctttgcttgtttatagtaaccggtagggcttgatgtcttggattgttaagttttaaagttttgtctcatgatctatgtaagtgcttaagccggcgctagcataaattgaacctttaatcagaatgtagtagttgacctggatggatgacacttttatgcgagatgggtcgagcgacgctaaccattaggccctcgatcggcagtcggcagatataacttagatacagtggatagtgacatatcctcttaataaatcatgttttaaatgttagattaacttatgacctaaagaaaagaagttagattaacattttttagaaattattatttcggataggtttaataagcataagtcagcgaaacttataaggtatttatttacaattataaaatcaacagcttccaaacaaaatcttttttctttttgacttcttaaaacaaaatctcatactaaccgatttaacattatgtttgtgaataatatggtaacgcgaatgattagcaacataaaaaacaaagagtcaactaaccgcattcatgaatggaatggaatgtcacggtcaatcattagatttggtgttacggaatacatatttatttataaatgtatatgaagaaaaaagcatggccaa

SEQ ID NO: 16755 - DNA, 2735 bp, Arabidopsis thaliana landsberg
  unsure (1)..(2735): unsure at all n locations
tatattctacagcctgcgtgactcctgtggtttttcttttccctcttgttttctctttttacccctaaaaaaattatggaagttgcaacaatctgtacaaatagagagagacttgtcccatatattttcatgtcacaacaaataagccttgactttccacaagatttcattccagaaaatctatggctgagatagccaatggaaaatgcctcttcttcctctttcaaaatatccaatactcatcttcacagctgtaatgccagatccggatgctgcgacgaggacgaaccagtctgctgattagagcccggggagtttggtgagactagcctagcgttaaggtctggcggaaaccggtggaattcttgtttggggtaaggaaacaatgagccttgttgttgcgagaccggtgtggcctcgttgcttacgtttggttgttgctgtctagcaattccgagcatctgatttgcattatggttgaatccgcggatgaggccgttgctgctctctgttttgattagcagtcctgcttggtgagaggaggaggatgggtgatcgatttctggattcaagacacgagcaggtggtggtgtggtctcttcgatggcttgagaggaagcatgtctgtttcctatgaaagcacttgaaactgaagcggttggagacaggattctgttagaatgatcatcagacgctaagtcattagaacacttttgttttcccgacgacattaataagttttgtttctgagaatcatcctcttcaggtcctgctgggttctctccaacccaaccttgaccaaatttgattccagagggcaatacagtctcgattctcctcgatgcaattttccaggcaacaggaccgagatttgcagcatatcgtgctagactcttcgcgtaaccgtactccatgttcagcccaacctgataaataaggaaaacagaggtcatactcttgtttctcgatacaaaggataatagagttggcaactacgtactggaatcaactgttttaactcgtcttcaagcgttgtcaaaaccgatggttcttgggtagaagtcgagaggtggttgtaggtatcacgtctattatcatcgacattgaaatgtttcatcccatacttgttaaccgccttcacaaccgaagctacagaaaaaaacaagaagatggttcatattggcaacaaaagaaagaaagtctgaaagaaggtaagagaaaaggcagagattattttacatggaaattcgctctcccagtctaccgaccaaccactctgggtttcactgttatgattgattctaactgatgattctgcttgccggaatttgtatgaaggaggagcctttcttaaattgtaagcaccagaaaacttattagagctatccccaggaatgagagcatcagctgacatttcagaagcagtgcggtcaatagaagacggctcaggatgtttctttggcggacggcctcttctggcaacttttggttgctgctgttgctgttgttggctttgtggttcttcatcatcactgtcttgccttaaattctcaaaatccttttttgccaactcttgtatagcccgtgcctaaaagtcgaattacacactattttcagagtcctggaataaaatatcaaaagatagaagaatagtgaattttaaggacatacctgtcgataatatacagtgtctgctgaattgtattccattgcatttgtacatattaaaaacacatctctctgcaaaacagaacagggccagaagctatatatatcaaagaggcataaaaagaaaatgttccaacaccaatctcccgacaaataagctgggagacaattttgagactaaactgatcaaaggttactattgagttaaacagagctgttgaaatagccttaaatctgcacgcaccctacactatatgtatcttcactggttagcacttagcaataatagagccttaacatctcataactgaaagaaaatgcacagaaacaacatcatcaagcaaaggttctccgtatcaaagtatcgaaatgaagatggcaagcaacaaaactttctgtagctatcaatcaaatgtgtaaccaactcgaacgcatcaaaactgtaaaggatagaagctgatcgaaaaggaggagtagaaagacatacctcaaattgttctaaagtggaatatgctccagagtctaatttgttccgcaatgtgctaaaatccattggattcttaataatctcaaaataatcaggaagctgtaagaaagacacagataagacaaacagaaatctcgtaacattaacaagactaaaacatcaagaaaaagagacaatcacctcctcaggatcaaccgggtcagagtaaactccataagtatccttccttcaagagttttacaaaacaacaacgatcagaaaaaccaatatacacagtagtgaaatcacatgaacctagagatacaagaaacgagagaataacagagaacatacttttgaagtctatcgaggatgaagagtaacaactttttgtctggcaaggtgtagtgggaccagactccacgggagaccctgtccacatgtaatccanaaattccttttatttagaaaattcctcaacgcttttatcctcgtaccaattttatcaagaattaataataaaaatatatatttcaacctttgagaatgtctgtcgctttcgaagccctttctccctgcaatagtattaaccaacagatca

SEQ ID NO: 16756 - DNA, 1343 bp, Arabidopsis thaliana landsberg
tagtgaccttgttccccatagtggcaacacacacgacttcctccttgcgctggcgtgcttggttgttctggttggttgctggggcaggaagacgggctgcctggttgctctgacgctggtattaatttcctccttgctggttgttctgacggtattgctgctgatggtgaggaaattgcctctggtactgctgctactggttctaatgctgatgctggtgctggtgaccttgcttgaatggttgaggtgggtcgcctgagtagcgaggacgactgctactcccgacttgagatccactaatcttgcgtttcctgtcctccatctctcgacgcttcctttctgtcataattgctctgtcgatcaaatgctggaaggtggggaaagtgtggttcatcagcgggtaatgaggggatcaaccaatcctcttaagaagcggtactgcctcttggcatcagtgttgacatcctcaggtgcataacgagatagttgcagaaacttgtctctgtattcactaacagataggggtccttgtttcagagccagaaactcctccttcttcacaatcatcagtccctctggaacatggtacctgcggaaactctcgctgaattcttcccaggtgatcgcttcggggtcagcatgggtggcgaggtaggactcccaccaggactgggctgctccccttagctggcggggaccatacagaaccttctccctgtcgtcacattgggcggtgcgcagttccctctccactgcgcgcagcagtcttctgcatccatggggtctgcagaatgggcgaaggtaggagggtgcctctcatgaactcgccacgcttatcccgtggcatctggggcatctgcacttgcaattggggttggggttgatgttgagcctgctgcatggctgccagagtctgcccaatggcctgcactgcctgggtctgcatcaagaacatctgctccactgacatcgaggggtggtgggggaggctgcctctgattttcctcctgctggtcatgctgctcctgctgagcacgcctgttgcatcggcgcctgttatcagacatctgtggaagacattcatacatcagcattgatcttacaacccttcagcataggaaaagagaatacagaattcttcatgacactgagtgaacaaagagcctcactgatcctcattcatgattcaatcacagcttctcagataagaaaggaaagtaagagcaaatggtttcccaactaaacaactgacttcattaacattactagctaagccaaactgcaggagaaacccacatgttcggctacagtcattacaaagatccaaatccaacacaggttca

SEQ ID NO: 16757 - DNA, 2343 bp, Arabidopsis thaliana landsberg
aggtccattttttcgtgagccctatcaaagataatctaatatagagtccagttaggtccacaaatataaccaaaatactatacaaagactaattctaagttaggccaaaaattacatcctctaatacaaaggaaacatgtttcttatcaaaacaatttgtatacaaattttacacatttacttaaaactacatatgttgtatttattataaaaataatatttttaaacaaagtcaatccaatgcagcattaaatccaaagagtaaaaatattgaaaaatattattacatcacttttatactatattatttcttatgaaatattaatgcacgggttatgatctagtactaaagtattttgttcagatgattactattccaagcgacgctccggagacgcgtagcacgtgaatggcttcgacggaatttattacatcgttgtacaatatggaatgtggactagtgttgtgtgtgtgagtactgtcttataaaaagtggaattcaatttccaaaaagattgaaagatatttgcagctgctattattatagccaacgccacggttatcttaatatgacaaaaatcagaaagacgcgtaaattaattgttttatgttttcatatgtttgaataagctatcttccatgtagagagaaagagaaatctctttttcacgaattaagaaaatgatacaagtaagattctttacaagagatataagatcatgcatatctgattctagtagtatctatacacgatcttagaggaatagtatgagaatatactagcatgaattgggatttactgctttagatagtatgaagagcttgcatttggagaatgtaacatttatctctttttgttgctgtctttcactagacaaaccaaacaggtctatctttgaacatcaacacaggaacgcatgaagttgctagaagcgttgtggctgatctacgtacgtctaacttcctatcatcctatgtcacgcaaggatatgaagggatcaatatttgccaaacagaaatttgattaccatttaccaatgtgagctttcttctatttttttcactcgtttgctttgggcttcgtattgtttcatccaaatgtaattaaccaaaaaatctcgtatctattggcaaataaaccaaactgaatcaaaccaaatcgaaccaaaattggaaattaaccaaatggataataaattctgtaaccgaaataaccgaaaccgaatggatacaaacagaaatataatattttgggtaaccgataatatccgaaatataaatatattttcaaaaatattagttatatctagacttaataattaaaaatacttgagaatatatataaaatagtaaaaaactcgaaaatatctaaaaatatcccaagatatccaagaataattgaaatatccgaaaatatttaaagcaaaataaccgaatgaatactaaattttaaaaccaaaaaaaccgaaaccgaaccaagctttcaaaataatcgaatggatactaaactttagaaccgaaaaaccgataaccgaatggatataaccgaaaccgaatggatacaccaaacgcaagtcctgagattgtgtaaaaggcccataaacgggcccaatatgcgaatccattttgttttcttgttgggagattaatctttttctgcttattttaggagaaattgttttaattttaatttagggtctcttgtctttgatcttttgtacactttctctggattttctgaattcgaactttggaagaagaagaagctttgatcaatcatggaaattgcaaccgatacagcaaagcagatgagagacgaagagttgttcaaagcagcggaatggggagattcatcgttgttcatgtcattatctgaagaacagctctctaaatctctcaatttcagaaacgaagatggtcgctctctcctccatgtcgctgcttccttcggccattctcaagtttgttcctttctcttttcaatcatattaagaactaatctgtggttagataacctctttgattactatagctgcagtaaataggttgtttaactgatgagaaagccttaagggaagtttttgagtctcgctttgaaaaccacacgaatctgcgtcgtttgggttcttgagattagtgtgttttaggaacagtgtcagtatgtgtaaaaatgtttatggatgtgggatttgcagatagtgaagttgttatcaagttcagatgaagcaaagactgtaatcaatagcaaggatgatgaaggatgggctcctttgcattccgctgctagcatcggtaatgataagctcgttgaggtgcttttgaccagaggtatgttacatactc

SEQ ID NO: 16758 - DNA, 781 bp, Arabidopsis thaliana landsberg
tgagaacattggatgatctggcctttcctgtagaatgagataactatgctcggcttaacgggagttcccactttgagtttagtcaactcgataattttaggggattgggcccaacctgtttcgttggccattaataggctttatctttaatgcgacggcttacttttgtaccttgagaaattgaaaagattgcacgcccttagggcaataattgaacttcctcgatttccaaaaatggtttaaaccattcggccacgccgccattattaattttctaattccaaggtaaccctaaatttcctataaataaagtccttattgtgttcataattccctccaaccatgatctcagaaatttatctccttgatacgtcgaagatggacaataaaattgcgacccccgtttgtcccgtggatcccggcagccctctttacgttctggtgatggttttgagccatccggagtcctctctcctcatgctgccttccactttccgccaaaagataagaaagaggcgtatggtttcatcgaaaaggtaattgcattaaaccctactgctcctcttagaatctttcgacccttattcgtttctcttggggtaaggttgttgaaaagcatcgtcatgtatgcgaggagagggagcgtgtggagcttaaaaggcaaacgctagaagccgcatcgcccgagtggaaaggaaagtgagggccttggagagcgatcactttcagtgggaatggaggaactttgattccgttgctaagatcgcgaccatgctacaga

SEQ ID NO: 16759 - DNA, 1049 bp, Arabidopsis thaliana landsberg
tcttgttcttacaaaaagaacatgcatttgatccacttacagattcattcctattattgcagctccattctgcaaatttcccaataattgcatctatcataggtaaaagcgcatacctcctcacatccctaaaaacaccattcatagactcaaccgcattattggtgtcgacgttgtactttactccggaaaaaagacatcttgcccattttccaaattagtgtgatcatcaagatatgtggctaccttagggttccttcttctaaaatctgcatattcatgttcaaactcagacactgaacaaatggctgcaatttgtctaaactttttagcaacctcttctttgttgtatgtaacttttgttctcacattctgtgacaaataataaacacaatttccatagtgagagctcgggtacacctcaaccactgccttgatgaggcttgtttttctgtctgatataaagaccaattccgaactgtctggtataacagttttgagagtttcgaaaaaccacttccaagtaacatctttttcgccatcaactacagcaaacgctaagggataatggtgatgattcaggtcttgagctatagcaaaaatgagcacacctttatatatagtctttagaaatgttgcatccacaataatcacttttctcatgactttaaacccttcaatggcagcccccaaagtgacaggaacttgaatctttttgcttcatctaataccacactagttttgtgccaggattcaccttctctaacatatacaaatattaataaaccatcttgaaactctcctctggactggcaagaatatcactaacagctagtttttttcccctattaacagtcgagtatgacatagttgtaccatgtttttcctgaacaagactaatgagacttttaggagttggggtcttgtactgacctggataatcttcatgcaatacggttgtaactaaacgtggagtacctctccttacaatgcttgtagcaggattcgaccgtactcatgtatgcaacttcctatatgttccgaccgag

SEQ ID NO: 16760 - DNA, 2466 bp, Arabidopsis thaliana landsberg
  unsure (1)..(2466): unsure at all n locations
gagcggcaaggcattctgtcagggatcagacgggcatgcaacaagttctctatcccacgcggctgagtattccacacacctggcaataccacaaggaccgtccgcattaacggcaccggaaatgggactggaccgaaccgagccggcaattttgagaaatcgggaaacagatcgaaacgaaccacaactccctcctccccgagcagaggttaccgaagccgatcgtatcgacgctttggacaatgaagactccgaggagaacattagatgggctgaagaatacgccagagagcaggaaataagcgccatcaaattatccctagtaaaggcagaaaacgagatgaagctcgtaagatcccaaatgcataacgcagtctcctcagcaccgaacatcgactgcattctggaagaatcccacaacacgccgttcacacacaaaatctccaatgcaataatctcggatccaggaaaactaagaatcgagtatttcaacgggtcttccgatccaaaagggcatttaaagtcgttcatcatctctgtggcccgagccaaattcagaccagaagaaagagacgctggtctctgtcacctgttcgtcgagcacttgaaagggccagccctggactggttctcgagactcgaagggaactctgtgaatagttttcaggagctatcgacacttttcctaaagcagtattcggtgctaatcgatcccggcacatcagacgccgatctatggtcactatctcagcagcctaatgagccacttcgagatttcctcgcaaaattctgatccaccctagccaaagtagaaggaatcaacgacgtggcggctctctcggctctgaagaaagcactatggtacaaatctgaatttaaaaaggaactaaacttgtccaaactactgacaatccgagacgccctgcaccgagcctcggattatgtatcccatgaagaagaaatggaactactatccaaaagacacgagccgcncaagcaaacgcctcgcatcgataaatcccaacccagtgctccgaaccacaaaaagggcgctcaaggtgggacattcgttcaccatgaaggacaaaatttctccggagcccataattaccaagttgatacaccccgaggcgaggccgcccgaggtcgaggacaaggccaaggtcgaggacgcggtcgagaatcctacacttggacgaaggatcaacccgcaggaaacgagcaggaatattgtgagttgcacaagagttacggccatcatacttccagatgtagtagcctcggagcaaagttggcagcaaaattcctagcaggagagatcggtggagctttaaccatcgaagacttggaagcggaaaagggtaaaaccgagcaggtcaatgctgtggccaatcccgagcaggcggcccccgcagcaaacttcgaaggacccaaaagaggtcgaggtaatcgcgaagcagacgacgatgagccagaagctgctcgggggaggatcttcacaattttaggagatttggctttctgtcaagacacggcggcatcaatcaaagcttatcaaaggaaagccgacgcgaatcataactggacgcggccatttaatgggccaaatgacgaagtaacttttcacgaaagcgataccaacagtttagaccgtccgcacaacgatcctttagtcattacacttaccattggtgatttcaacgtcgaatgagttctggtcgacccgggaagcacactggatatcatttttcttgcaaccctgcaagaaatgaaggtcgacatgacgcaaattataccatctccgcgacctgtgctcagattttctggagaaaccactatgactctcaggaccatcaagttaccagtccgagccaaaggggtaacaaaaatcgtcgatttctctgttaccgaccaaccgaccgtttacaatgcaattatcggtacaccatggttaaatcaattccgagctgttgcttcgacatattatctctgcctgaaatttcccacgagcaatggcgtgaaaaccatctggggaaatcagaaaaatgctcgaatctgcttcatggcagcacacaagctcaagaaccccgtcacagagtcgacgaccgacgcgaatcataataaagctaagcttggccgagctgaagagaaagcaattttcgagcagttatagcagctaaagattgaggagtctcgggaatccacgagaccaatccccgatccggtaatctctatctgccttgatgacaaaaatcccgagcggtgtgtggaaatcggtagcggcgacctaggagaagaattaacagctgaacttaccgctttcctcaaagagaacgtcaatacattcgcctggtccccagaagatctgcccggagtaagtgttgacatcgtatcacacgagctcaacatcgaccagacgttcaaaccagttaagcagaagaggagaaaattggggcgggagcgagc

SEQ ID NO: 16761 - DNA, 937 bp, Arabidopsis thaliana landsberg
aaggctattattgtatactcctgtgaagtttcttatctgaaaaaaaagaatactaattatgtttacaacaatttcttttatttctttcaaaatttttgcattgtaacactttattttacagtcaaagttttattaagttctatgatctttctcaatgtagacaaagcaatgacagcttctgagaaataacattgccgtaatatataatgcaaacgtttattgtaatagtaaagctcataagcagaggcaaaacaatctgtgatcattttaacatatcccactactaatttcagtaggtaaatagttcagagtaaagtgtctttaaaaggattcttaacgtgtctctcaagcagccaaactcttggaggcaatctcaaagacattctcagacagcccattagcagacattatcatttccaattgtgcctgcaaacacaacacacaaacacaacagcttaatctaatgattacgaatcatggctacagattccgatctgcggaaatattgaacacagaggctcaatgaagcaaaagaaccaggaaatgaattagatagaattcaagactcgtttgcatttgtcgggctatttaccttggctagaccttgacgggtttcatcgtaccgcttccacctcgaaaaggcagacaccatacgagaagcaacctataatcacaccaaagaaaaaaataggtagttaagcttgttgttgccaggatagttacattatgtaagtaactgcaaagacacaagttaatttgggagttttaacctgagggttcaatttgtctaactggacaacaatgtcacccaagaacttgtaacctgatccatccttggcatggaaattcactggggaaccgcagaaccctccaataagcgaataaacctgaaagattgttatcggttccatcgtaagtatagatagaactgtgaaag

SEQ ID NO: 16762 - DNA, 3386 bp, Arabidopsis thaliana landsberg
tttttgtaaaaatgtgattttatcggcatctagaaattctttaattgatttttatatttcctttgttaaaatatttctaatcttcttttttttattgccaactatggaaaaacatatctcagaccatgtgcttataaataatatacagtttttatttttatcttcttaattgaaaaacatagttgaagaaacatatctatttaaaaaatatagtatatctttcattacttgaaaacattttaatatgaatttaagaataaataggaaaatgtatttcgtaaaaaaatcttaatcgaatatatagtttcctttaatatataaacttgacataatgagtaatgcagtacttttgactctatacattgtataaaaaaagttgatgcaatacattgtattcttctacttttttttattaaatacattgtattctttttttctcgagcatacgatgttcgaagacaactaacacattatacataatctgcgaaaaaggcaatatatctcatttactaaaagtttcataaccctacaatatatataaatactataaacaatgccgtagtagtgatcacaagataaaatacaagttatacaaatatttaacaatgagtgagaatatgcaaagagtgtgtgtgtctatcttaacagtgatggttttgatgctatcaatttctaaagttacgaaaggtaataatgatcatgcgccggctccaatgtcagagaaagggttgctgccaaatccaatatcatgtgtagcggacgcaagaaaaattccagattgtgtagaggcaataaaacagggccatttgaaaattataaaaaaagaatgttgtatcattctactcagtcttcccgaagattgttttgggattttatttcctatacgtttctactatcgtatcatacttaagattacatgcaaattaattggcatcgtttaatcacaattttttttaatctagagatattttttcatgtaacggtattcatattatttcataataaaaccatttttctttcagtgatttgttaataattacctaaatgattatactataagtaagaaataatatgtgttggctatactaactaaaaattggactagtgattgtgaggcccttagtgagtagattaacgagaaaatgatattttcatgcatatacaatttacaaagcgtgttttcctacttttacaaacacatatgatcaattcatacccaaactacacaaaattcaagttatatatcattctaatttattagtcaaccattacggttgctcagtctgctaacatgtatctcatgatgttgcttaaaacgacatcgttttgtttgttagagctgaaattttataaactgtatttggttgactaacattcattaattatgattctaaattatgttctaaatgtgagtttgggtataaaattcaaatatttgtgtaatttcgatatgaattatcttaagtgtttgtacatataaaaaaaaaacacattttacaaattatacatgtaagaaaatacactttacaaattacacaggtatgaaaattatacacttaatatagaacaacaacaattttggggtgaaaatgtagactgtctaagtgcaaattggatcgcattttagcaaacgaaactaagtatatagaattgtagattccggtttagagacgaaaaaaaaaaaatccggtttataacatcgaccaaatagggttaagttaactgaacttttcagggtaaaaaaagtaaaataaaataaaattaaaccagtaccttcttagttatccagaaggttttgatttggttttccttaacatccttcgtcgccggaatttgacgactaatatcagacttcatcagcttacgtcgatctacgtacgacggctatgacgatgacgtcgatcatcagatccagtcctactctcgctttcatcgtcttacagatttgcttcatcttctttgcttacactttcccttgctcttctgggtaagtaaatcgttctctgtctttgatttctctgctaaatcatctcaattatctagtcgatgcaatttcctgcgaatttcttctgttgataatttgtctcaatttgatgatttagttgcttgccgagttcagtactttgattttttggagatccgagaatttatttctctttgtgtggtttattgtgcaggtctgaggatagttacaccattactggtagagtcaagattccaccaagtaggttttaacttttcccttcttctctctttgggatcttcccaaagattactttacctttacggttccaacaatcagttcctaatctaaaaagtgatgtgtagtctgttttgatgttttgaatgatgaaatttgactgcttcatgtttattctgaatgttaaactctgttgaactgatctacaagttatttcgtaggcaacgtgattggtcacatagcaaagttctcaaatgtcaaagttatactcaatggtggacagaagattacgtttctcaggcctgatggatactttactttgtatccttttgatccttctgttattaaagtttcttttgagtatattattactcacagtagctgatgattggtttcttacttgcctttgatatatgccaaaagaaatcatgttcagtattggcttgttataaatgttgctagaaatagatcaggagaactaaatacctttatggtttcatgaaaagaagagtagtggagatgattcttactttttgcggtccttgactaattggtttgtaaagtcatgaagtgcctgctgggactcatttgattgaagtatcagcaatgggttacttcttttctccggtaagtttttatgtgttgctattaatggtttccaaaactgcagttttgtaagaatgtgttgctcatgcaatgatggataaccaaattcttaggtacgagtagatgttagtgctcggcatcgtggcaaggttcaagcaacactaacagaaaccaggaggagtcttactgagctggttttggagccattgaaggaagagcaatattatgaggtgagacttcacatgactcttttcattatttgttttgcatgtgcttctacacatctgtttttttctttctttaatctgatttggtcatgtaaaatactacagattcgagagcctttcaacattatgtcgatcgtgaaaagtccaatgggtctcatggtgggattcatggtcgttgttgtgttcctaatgcccaaattaatggaaaacataggtacgcttctattaccctcgaaatgtaggagttcactatgagccaacagattcatcttccgtgttttacttgtaaccaactcgactatggatttgatggacatttgatgttacaataaaacatttcaccaatctaggag

SEQ ID NO: 16763 - DNA, 1003 bp, Arabidopsis thaliana landsberg
gatcccctgtggagaacaaggccactgggcgatgcagtgcccgaagaaattggcgcacgagcaggccaaccccaatgctccagcaaggcaaggtgtactgcagccggcagcaggcaatcgtaaccaagcgtacaaccgcggaaaggtgaaccacttggaggccgaagcgatccaggatgcaccagatgtggcagtaggtatgttctcagtcgaatctcatcccgcgaaagtgctatttgatactggtgcaactcattcttttgtcactgcaacatgggtagaattgcataacatctcagtagaggcaatgatgccacccatgaggattaattcggttggtggcagggtgcaaacagataaaatatgttcaaacataatggtggacataagggggataggatccccagtgacctaatagtaatagacacccctgggatagatgtcatcctagggatgaattggttaatgaagtatgaagcgaatgttagctgtgacaagaggaccgtaacattgaagtccccgtccggagaggaggtagtggcggacgtaaggatgcctaaatcagcggagggagattgtcaccagatttcagttgatagtaaggaggccaacccgctcgaggctatcaaggttgtgtcggactttccggatgtgtttcccgaggagctaacgggcatgccacccgagagaaaagtcgaatttgccatagagcttatccctggtaccgcccccatttccaaaagagcctatcgagtgtttggaccagaattggtggaactcaagaagcagatagatgagatgttagagaagggttacatcagaccaagtacctcgccttgggccgctccagtattgtttatagagaagaaagatggtccaaaaggatgtgcatagattacaaagccctgaatgaagtcactattaagaacaagtacccctgccaagaatagaagatctgtttgaccagctcagaggtgcagcgtattccgaagatagatctgag

SEQ ID NO: 16764 - DNA, 1144 bp, Arabidopsis thaliana landsberg
cattaatatattaatatatgagcttcttaataaagtagacactttttcaaaagtaatttgagaaataagtagttttttttttttttggcaaaagggtaatttcattaaatgactgaaatacaggaaaaggaagatagagctgccttagccaattcatcggccacgcgactgttttctctcctcacaaaaaagaaattaactgtagaaaaattcaaagatagatcaaggatgtcgtgaagaatcctgtaaagctccttcgattggggctctcgagtgagtgctttgatcagctgttgcgaatctgaagcaaaagaaagatttttgtatccaagatccagtgcctgatgtatagccagaagaagagccatcgcctctgccattaagggcgagctcacgtttgacgctgtggatctgtaacgtttctctgatttggagaggggatcgataaacaaccaaccaaatccagcctcgcttgtctcctttttccatgccgcatccgagaagacttgtatcgtatcagccccaattgtgtgaattgggggattccgagagccttcctgcttatttggatctttcaattgagccgaattccattccttggccataacgattgcttgagagatcacatcgacgcttgaagcttgtttctgatcaaagatctttttgtttctacaagaccaaagcgaccaaaggatccaaggtaagagtgtaccgtctccgagacccgtgggtggcaaattcgttagctttctagaagattcaattcccaattgcaagctggaaacttgagatgcttggaaaggatatttgaaaggtgcctgatcccatcttgcttagcaaaagtgcagtggaagaagagatgcagaccggtttcactttcattacaatgggagcaagcagccgtctgattgatccctctggttttgagattttcaccaactgggagagcattcttcatcaatttctagaggaagaactttatttttggtgagcatttgttattccatatctctttattctagttaaaagcattatgagtagtttgagtaggagtattagcagtagatacctccatagatgctgcttgatatccagactttgcactatttctcctgtctttgtaagagtcaattgagagaacgga

SEQ ID NO: 16765 - DNA, 2251 bp, Arabidopsis thaliana landsberg
  unsure (1)..(2251): unsure at all n locations
aatcgccgcaccgaccgaccgaaccacaggagcatttaacgcaaaggtggcctgacacctttatcctgacgcacgccccccggcagagcgaacgtgaccacgtcacttcgctgctccactgaccggcctgacaaaaggacagcgccgcctgcgccactccgactgcagtgccacttgacagagtgaggctgacaggcagtcaggccctgccaaaggcaccataggaagctccgctccgcccgacccagggctcggactcgggctaggtcccggaagatggcgaactcccctccgcccgacccagggctcggactcgggctaagtcccggaagacggtgaactccgctccgcccgacccagggctcggactcgggctaagtccggaagacggcgaactctgcatcgcccgaccctgggctcggactcgggctgagtcccggaagacggcgaactctgctccgcccgacctagggctcggactcgggctaggtcccggaagacggcgaactccgctccgcccgacccagggctcggactcgggctgagtcccggaagacggcgaactccgctccgcccgacccagggctcggactcgggctaggtcccggaagacggcgaactgcgctccgcccgacccagggctcggactcgggctcggccccagaagacgacgaactccgcttcgcccgaccccagggctcggactccgccctggcctctgccgaacgacctccgcctcgcccgacccaggggctcggactcgacctcggccatggaagacagactcgacctcggcttcggaggagcctccacgtcgcctaacctagggcgcaggcagccacgtcaacgggaagcgccatcatcaccctaccccaagctgactcgggtcgcagggaacaagaccggtgtcccatctggccagctccgccagatagnnnnnnnnnnnnnnnnnnncgctctgtgacgacggcgactcccagctctcttacggaagcaggtggacgtcagcaaggactcgaccgctccaacagctgtccctccgccaggcaccgtcgctcctccgacggccacgacaccacaccagcagggtgtcaagatctctccggctgccacattggcatgtacttagggcgtcagtctcccccgctagacacgtagcactctgctacacccccattgtacacctggatcctctccttacgcctataaaaggaaggaccagggccctcctagagagggttggccacgcggggacgaggacgggacaggcgctcccttggggccgctcgcttccctctcccgcgtggacgcttgtaaccccctactgcaagcgcacccgacctgggcgcgggacgaacacgaaggccgcggatctccacctctctcacgcccgtctccggccacctcgcttctccccccttcgcgctcgacccatctgggctgggcacgcggcacactcactcgtcggctcgggaccccccggtctcgaaacgccgacagttggtgcgccaggtaggggcctgctgcgtgctgacgaacagcttcccgtcaagctccagatgggcagtctccagcaacctctccggcccgggacggtgctccgtttcgggagtcttgagttcatgtccttcgacggcagctacgacatgatactccttccaccgccgcgcgacaacgacaatggcggccgatatanccgccgccggcggcggaatcgacgacgtcttccccgtgtggtggaagaacaacattcgagctcgctccgtcctctcccccgtcaacggaggaagaggcggggcaaccaaggccaagcgggaggccgcgcttcgtcggccgtcgagcgaatcgacgcccccgacgccccaacggaaggcacgccaggcgtcgacctcgcgttcgagacgaaggcaagcaccgtccccccgcgacacgctgatcccgagcaagaagacgacgccagcgcgctcgcggaaagcctgcaggacgtcgccctcgtacctgggacgacggtgcaaccagtccccgatgtgactacgtcgctcctcgtcgaccaaaaggtactgactaactcccatcttacgtcatttcgactcggcctcaaccgccaagcgacctcgctttggcgggcgctctcattgaggcgagtgcaacccactggggtttcgtatgcggtcgccttgggaccggttgacggacgtctcgacctacgggcctctgggtccgaagaagagggatgagttagagtgcaggc

SEQ ID NO: 16766 - DNA, 629 bp, Arabidopsis thaliana landsberg
atccaacacttgagcattacacaacgtacaaagcatcggatctgaaagcatctgttcatgccttacaagatctgcagcttaacaccaaaggttgccccttgagcgctatacgcatgaagtataggcaagagaaagtaagcttatcagttaaaaccacatactaaaacctgtttggtatagctttagtttggtttccttgattctcataagacttattatggatttgcagtacaaatctgtggcggttctcacgtctccaaagctacttgacacgctattctgaaggtttcaactcctaaccgataatagttttgtcacattgatggtccaatttcgttttcattcatctgttactctttgttcataaaacagaatttccacagtcccactcatctaatacctgattagaattcggtttagcctagtttgatccgtggtttggttctttcaaacccgggaacatctaatcggtacctagaggtttttttattgtaacgagaatgtacatttttctcccatcttgaggcaatgtaaacagattcggaattttcatatcagttttctgatatgaagtaggtttaagtatttatatttcaaatttcattgatcggtgatattgaactgtcatg

SEQ ID NO: 16767 - DNA, 915 bp, Arabidopsis thaliana landsberg
attcttgacagccatgacgaaagacttcgccatgactgcagtattgccaccaaacaaagatatggttgcttcgtagctcatcaaaaactgcttcgggtctgagtgtccgtcgtacatgggaagctggggtggcttgtaagacgggggccaaggtgtagcctgcagttctgctgacagaggagaagcatcatcaaaagcaaaatttccatgatgtaaatcctcataccagtcatcctcgttgaagaagccctcttgatgaagctctttgtgctgaggccttcggttctgctcatcttgagctagatgacgaacttcttcagaagcttcatctatctgcctttgcagatcagctagccgagccatcttctccttctccctttgtacttgctgatggagcatctccatgtttctgatttcttggtccagctcctcctcttggagtgttggactggaggctttcctcttctggattcgggcctctcggagggagagggtctcccggtttgggtccagtggctgtagcgctgcagcccctgttgctgaagctttcttcggcggcatgatgaaggttgatgctttgccgaagattgtggaagtgagtacaccggaggtgggcaccaatgttggggacttgttctcaaatgctatgagtcaagaacaaggcaacataaaatgttaaaggttaaagcccttcgtctttcgaagcattatttgccttaggacataatgatcttcagacgaaggtcttgaaggacataccttcatcattgcagtgaatgataataaaagaagatgcatgtaagaaataaaaaacgacatgaacgattatgtaacattatttattcctcttcttatcatataatcatggaaaaatatgaattatcatcaattacaaaaatgtacttcggcttgaca

SEQ ID NO: 16768 - DNA, 1939 bp, Arabidopsis thaliana landsberg
catagctttgcggtcttacataaacataagactctcaacctgactagaaaatacatagtatagaatacatggatgtcgtttcttgcaacgggacagcttacggttatgctctgtgattccttgtatcacaacttttctcgtagactgtctttgcggatcataatagataacataatatggtggatcaggcaaagaaatcggtgccaaaataagctccccagcatcagtgacgttaacgaaacaatgataggtaaggaagtgcgaacttgtccatgaattaggcaaaacaaagttcttcttcaaccattcatgtttctctagaacccacaaaaccatactagcaccatcaacagaaaattcgtgagacacgatagctagcttcccctggtagcttgtcatagttgaaacacagtcatccggacgatagtcattaccaggtgctttaataagatcaaatgtttcagacctaacatcaaaactcatgaatgaaagttgctctaaatctggttcagcacgagcttgataatataaaacaccgttgatgcaaatctggctatagataggataatgagagtaaggatcttcaatcatcttccacgaattaccatttcccaatgtcaaaacctgtataacaggtaaaggcttatcctgtaaaagaaactgcttctcccgtagcttcttcttcttctgtaaaacaagccttggcactgtcatacacaagactttgtaaaccccatcaatgggatcatagcccaacaagtgtttcacgacaaaactccgggcatcgatttcgggcaatgtgatggatcttctggtgctggaattgtataccacaagttgagaagcataagcagtagttccatagcacatcaaaccgtgaacaaaggaacaattgtttgtgtatccagatgcaggaatcgtgaaaaggtaagtagctacagaggattcttcagacgagaataagaaacaatcatctttacgtctgaaggtgaaaaagagacgacctggtcgagcggaagactcggtgaggaacagtttcatgagatctcggctgcggatgattgatgaccagagcttcgatacgcagaggaacctcgctagggttttggctggtaagcgtttaagaatctcctttatcagatccatcggaagcagatctgagtttgtgctcctccggtcatctgaaaccttcttcctccgtctcctaaccctaggtgacgacgccgatgttgttgattccacgactctgagagtgttagagattccatggcggctcgaagatcgagtattgtagcgaaatgttgtaacagtgtcatttgctctctgtctttgcatggtgtagagagagagaaaacaagttcagcgttctcaaacgtttcagagtctgacaataaacaaaaaaattatcaacgaaacgaactctttgttgtggatttttgttttgggcctcgtaattgttaggcccatgtgacactaaagatttcactagtatttgtttaatgtttagtactgtattcaaacttcgctacaaatccaaactttttttttttagaataggattcagcaccacctcctttcattctcttttgttctgatcttctcctccgatccacctcatcttaaagccgtttttgatatccttacttttcaaacaaccctaattaacgtttatgttaccatatagttcagtacttcaatctaaaatttaaccatgtgttaagatttaaagtctcattatagtttgtccataatttctaacttcatcaaatcctcaacagatttaagcaaaagctatataacccatgcaagaccatgtgctacgatttcctacacaaatctaacagagtcggcggtaggaacctgtcctctttaacattcatgattcatctctcgacgaacaatgtgatctccttattcttagctcatagtgttctaaaag

SEQ ID NO: 16769 - DNA, 3213 bp, Arabidopsis thaliana landsberg
cctaagtctcacaaggttcaatcatcaaccaccacagtaaaacttatactcaaagtctagaacaagcctgaaatctatttagtgtcacaatgaagttaagctatcatgagcaatttggttttacctccagaggcatatactccttcatgtccatctctccatgttttctttccactgcctctgatatcctcctcttcatcgtcgtcttcatcatcgtactcatacaactctctactccggacgccattcttacccgacccggaacctggacccgaatgataattatggtacggaacaacagtagccttccctaagacgtggtgcctgggtcccaatggaccgcctaggatactccgaaccggaagcaggaagtagaactccttgtcaccaatctgcaaaaggtcctgtgaatcgagcttgacgttggggttcccagggagatggaggacaccttcaacgaagcagccatttttgccaagtacctcgagagagaagcgtcgtctagtgaagtcatagaagatccgagcgtggttgcgagaaatgttcatcccaccgccgagagatgagaggtcgacgtcgacggtcgatttcttagaattccggccgagaataatggagtaagactgcatatagtactcgaaatcctcaccttggagctgcgcagggccaacctatacatcgctcccgcttccaacggctgtagccatgccgtgaaatttctccgattttgaagtcggagatcaaatttggggttacatagtaatagaatgtgtatggaaaccggtttagatatgttgtggttaaaccgtacaatgaaaaatataagggcttctcaagtacatgactattatacccatcatgttttcagtctctgcactgtcaatgttacgggccttacggcgatcaaatcaaaacgggcagtttgtttccacggttaacaaatgaaacagctatagttgggccttatctaaaaagcatcagcccattaacgtgaaccggatcttatgtacataaacccagtagtatgtaatattcggggataagcatgacattgacatgaatatggatcatgtgataaccgtaaggcttgaaattatgatgataaaatatgatgaaaagttcataagaatatcgtcacatttttgtcaaagaaatagcaaagtcaagaatggttttctttttctagaatctttgctttacattttgttaaacatttaatcaaccgaaaaaatcacaacgagaaaagaacatttgctatattccacagtgtattcgcagaatcttcctttgtttttcttgtcaacaattcaaatagtctcaatcctctttccactttccaggtgcaattcatgcaagagtaaggctggaacttgtgatagccaagctataataaagcaacttcaacaagctattccactatttgaataaagacacgagtcatctatctactcaacataattctttacagccatttgtcatctagcacgtgcccatgaagccagccaaacatgaaccacgtcgacacacatcagatgagaataaccgttacggcgtcatttgctgacctggactgtctaacctattgcactgtctctcgaagatggtcgccacatgtcgatcccggggtcgtgtttatgctcgagattcgcggagtcagatacgaacacaagaattcaaaacacccaacgtgtcctcgtcaaagccagcaggatctcagtgtacacgtgttaactgtttccatgcacgtgttacacgtggcgtctcggtacttttcgtcaaaatttttacttgatttttacaaccaatggaaatagaaaccaacaaaataaatggaaagcgtttatcgataatccgaaattgtagcgctaataaagtttcttaacctttctcttagtgaattttgaaaccgcccatgtccactatccttatcggacatgtgtcatgttccgaagcctttaccattctctttttaattatctccgccccttataatattcctttctcatacaacaaagttggcgaagcttcaaaacccttcaagaggaaaattttgcggaagacaagagaccatctttttgacattatatgtttgttgaatctttatcaatggcagaaaagtttgtagaagatgagaatgtggaggtcgagctcgagctcgagctatgtctttccctgggaggtcctttcaagaaaacggagaaatctaaaacatttggacaatctaacgccgtcggattcgagaaggataacggcgttaatcttgacggcagaacgacgaatgtgacgaggataaaggaaacacggaagaagcgggaggcgaagcagcagcagagaagcgaagaagaaggagactgcaagaggatcagaacagaatataacggagttagtaacggcgatgatatggatttgagctctagcaacatgtgtaacggttacgggtcgggtcaactcaaggaaagcagtaaagacgttacgattgggtcacccatttgcacctcctccgacgtatccgatcctagcagctcttctcgccaagaaggtataaaacaaccttctttttaaaataaaataaaattggtttgtatatgtatatagtttttttttagtatataattcgatgtgttgattctgttaaagaatcacgaaaattatgctatttgcatgtagatgattttgaattatggttaatgttcaggtggaagtggcgacattggggcacaatctggccaaaccaaacaggttagatctccggttaacaactttctgaccggtacagagcaaaccgtgcataacacagacggttcaaaagacgcggagacccaagaatggtccaactcttctgtaaccaaagagagtgggaagccgccaaaaccgcataccaacagtaacggtaacggcagtttgcttccgtttgctcagatgccttgcgtgactagcaccggtaacggtcccgagggcaaaaccgtaaatggttttctataccgttactcaaaatcagagatcagtataatctgcgtctgccatggaacgtctttctcgccggctgagttcatcgttcacgccggtgggactaatgtgtcgcatccgttgaggcatataaccgttgttccctcaactttgtgaactacaaatttacataaaatgttaaaaattttgtctcgtttttgtgtatataagtttcaccgatggacgttttagttgaagggactctcc

SEQ ID NO: 16770 - DNA, 2252 bp, Arabidopsis thaliana landsberg
gcagcttcggcttcattgatgttgtttgactgagattttaagatgaagttgtgatttcttgatttgagtcttctccattgtttaatgaggaatagtgtttcctacttctagtctttttatttcagctttcctcatttcagtatcttccttttaggtagagttaaaaaacatatacatatcctatttttaacttgagaaaattaagtgatataagagtttcttggtgaataagtaagactcctctgtttctgttcattttctgctaagtaattgtttcatcctcaactacgttttggtctctgctaatttgtcttcatccacctgcggttttgaatacgaaattaaaattaaagcagagagtaagtgattatgatgaaactgttgaatcaaaattttataatataaatttgagtacgaaaaggaacctttcattccaagaaaggatattaaaattcatagtttcatttctctgtagaccaacatgtagtggtcaaaatcaacttgtagaacttgcatatattaattttaaaatatcttatttaaaagttttaagtcgatggcaaatgctacaagttgaatttgaccaaataacaagcaaaggttagtcgagttttcattgttgatgccgtttctaacttctctcaaatacacaccgcgtgccgtttagtgctctgcttattggacaacgtgtggtataacagaacgtgaacgcttaaacatttttcaactgggccgggctctttggcccaactctatgacttgaatgataccatcagtgaagtcaggtcggtcggtgttcgtcgtatcaaagaagtttcctttagagctttttctctcattctgtcttcgtctaaaaaggtgaaatctttaacaactgatcatattactcttaatgatttcgtaatctcctgttcgttacgttgattattgttatctgttaaaattgatgtttaagagtgtcatcgtactactggtagcttgattgcagataacaatggggaaagaagttgataacaagttcacttgggtgattaagaatttctcctctcagcagtccaggaaaaattattctgatgaattcttcgtcgatggctgcaaatggtaagaagtgaattttttcgaatgatttcatcaatttagttttttttttgttttccgtgaaattgaggattgactaaattttcttgaaggcgtcttctggcctttcctaaaggaaatggtgttgagaagttgtcactgtatctggccgttgctggtagtgaatttttacctgatggatggagaagacacgcatatttccacttcagtgtagtgaatcaactctctgatgaactctctcaagctagaggtgattgtttttctacacaatgctcgttacttgatatgcgttggaaattgattgcaacagttttttttttccttatgttgtttgagttggttggtttaagactagtgtcaatgtttcgtagcaagtttagagcatggttcatggatggctttattttatgtgaagtgaagtcaatgatgaaatggaatttatttcgttgttgttacagaaacaaaaaattggtttgatgcgagtactagtgactggggttttacatcaatgctttcccttaaaaaacttcatgacaaagatggtggattcctggttaatggagagctcaagattgttgtcgatgtttctgttcttgaagttattggcaaattagacgtaccagtggaatctgaagagacaaccaccaaagctctaagcgagctagaggaaaatgacgtaccagaggaatctgaagagacaactaaagctctaagcaaggtagacgaaaacgatggtgcagagtctaatgattcgctcaaggaagcttcatcagtaaaggaaagcatggatgttaatggctttcgagttcttccttcacaggtatgaaatcaagaatggtgtagttgtttcttaaaatatctaaccgacatatgttctattctgttttgtgaattgtttctcaagtagcagagagcacacttgtatattcagtaaaaacaagaaatgaaattgtaaaagtttcttgatacatgtatgatgtatctatgatttgcagaatatgagcgaaactggaatattggagatgtttttgtctgttctgatttattcaagtctctgataactgcctcctcaatttgtttttttctacttaattcatctttctatcactttcaggtggaaactgtgagctgtatatttgaaagacaccccgaca

SEQ ID NO: 16771 - DNA, 3111 bp, Arabidopsis thaliana landsberg
tatggaacgatgatgaagattttagccaatgtaatcaagatggtggtgatgatggtattgaaaaccgtgatgatgatgataatcatgcctatggtgatgatgttgatgatgacacattgacgagcaggattgaagattacattgcaaacgtttacaatggatggagagaagagagacgaaccgacaaattgtttgtctgatcttttcaaaactctgtttttctctctgtagtctgtacatatgaagaaattgttgtcgtgtggtacataaatttggtgtgttaatgtgtttcttcagcgccgtttatgactgatggatctgctatttcatcgatcaatcagtcgaataaggagcgtggtctttaaatttctttgaacgtatgaacttaaccaatctggaagaatactattcaggtgataaatcatcgattagacaagaaacaaatctatatcaacatgagaacatactgactgcagagaactgtaccagtcatgtccacgaaacttacactcaacaacaacaagaacaaatttaacatgaaaacgggtccagaagtaaacacaagaatagctatctaaaaaaggcgattcacctcatatatgcaatcacaagggaggatggttgctccccaattcgtttctcgaggattgattgtttcaagacagcatttccagatagcttttttccaatctcccatcatgcaacatatcaatcaccatatttattgttgaagcatctccagcaaactcgcgactcctcatttctctgatgagttcagctgatgctgctttgtcaccatctctaagatgtgccctaataaacgtattttatgtaccgctatctggaagaggcccatcttctctcatttttctgaacaaggcatctgcttcttcctttaaacctttcctacaaaatcctgagatcatagtattgtaaattattacatcaggtttcactcctttaaggctgaggctacaaaatagatcccacccatcttccaccttccctgccttgcacatcccttcaatcataatattatatgtgtaaatagtaggttccattttactcctttgcagatactcgaatacaaccattgctttctctagcttcccatttttacaaagtccatctaacagagtgttgtatgtcataatattgggatgcacaccatcagaaaccatctgtttgaacaccatttgggcattatcacaatctctagcttgaaaaaatccatggataagagtggtgtaagtgactgtgttgccaaccaatcctctttgagacatctcgcggaagagttccacaccttcgtctattctcttagccttacaaaatccgttaataagagtattgtaagtcactacgtttgggaaacagtccttgctaatcatcaactcaaacatgtgcttggcctcgtctaaacgatcgtgcatacaaaacccattgatcagtgaactataagtgaaaatatcaggatctatagaccttttgatcatctcgtcgtacaatttctcagcctctacaagcttcccctccttcacaaatgcatcaatcaatgcgctgaaagtgactacatttggattgattttcctctcaatcatatcactaaggaggcgagaggcatcactccatcttccgtaattacaaaggcaacttatgagggagctgtaggtaacaacatttggtctaatgccttttgtttccatttctttaaataggttgagcgcatcatccatatgtttgtatttgcaaagaccatcaatgattgtgttgtagatcaaaacaccaggttctaatttcccttgttccatcttgttgagcagattaaaagccaaatcagtatcacctctcttacataatccatttactaccactccataagtaaccagatctggttgacaaccttttgcaaccattcgatcaattaaagccactgcttcggaagctttgttgtgaagaaaaagtccatggattagagtgttaaatgtgacggtattaggttgataccccattacgaacatctgatcaaccaaagctacagcctcggatatcctcttaccgtggcagtacccattgagcagcgaagaaagcgtgacaatattgggctcatagccaagtttcatcatcttgccaagaacagctaaagcaagagggagttgagagcgtcgacaaaaacagttaatcaaaatactgtaagtgtagtgattatgaggaattcccaagttttgcatccgctcgccgagagagatgacaacatcgaacttgttcatcttagcaatcgcactcaacagtttactgaaatcaatgatggaagggaagggacgagacttgaccatttcaccgaacagagcaacagcgtcatctaactttaattcactcagcccatttctactcagtttctctctgtaatcataactagtcttaccagagaaagctcgtctccagaaaaaggaaaaagagggagaaacagttgcagcattacctctcaccacaagactccgatgaacaaatctcttcgcagttgatgcaatcgccaacgatatcctcattttctcgatttgatttcttctcaatctctctgattcggaagctctgaaaaattcaaccaaaccctaaacgaaccaccactgtgtgtgagtctgagactctcagagaggaagagagtgaatgccaaaccggtttagttattttaatgttatttggtgattaccggccggttcgcgttttcttttttttttgaaagaatgtaaaattttattccatcaaaaccattgtacaatgactgcaacggttagtttagtgttttagagagaaaactgaaattacaaagctgaaaggaaaattcagagagagtgtgtggatgaaagaggcctcgtggagaaccatagctgcaggcaagcgttgtagttatgatctccagtatctcgaattgagctgattctattgcgaacattcttgtctatgaactttatgagccggtttggtggtgagctgatttctccgtgtcgtcgggcatttctttctcgccatatgtggtaaacagaggcttggaagacataccgaaacaaaaagagaagatccgttggcatatttgtattgcagagcagagct

SEQ ID NO: 16772 - DNA, 1596 bp, Arabidopsis thaliana landsberg
attggcgtgtctgtccagtgataggcgttcaatggctgtgaggttcctcgagagagtcagacagacagcgagaggtaggtctgagggtcttttcagttaggtataaattgaagtcctttgatttctgaggggtaatcattattatgtaatcagttctgtcgtaatgttatgtataaacatttaagatatgttctgtcgtaatgcacaagtatcatgaaagacattattacttttgagttataacaaatgtgaatcaggctactcttttgatgcattgctcaaaagcattattggcacaaagtcccttgagaagatgatctctctgtgtgttccacagaactattgcacaatggattagatcaagtttgctagtttaagcttcttctttctcaatggtttgctgtatcctatgaactttaataatcttcgatgttgagctttttctttgttatgatcaccagctcaatcccattcagctttcttttgaacctttcgcttttttttattagtactattgtgttgaaacaggtgcttgatgcaaacactttcacaagtctgcttctcacagttgttgcattctagatctgtctacttcacatctcccttgtcactcatcatcaacgcatggagatctacgtatacttcgaaagagctaggcaaacgaagctatgatatcagagttgcacgattcttcttgtttatctgtactttaatcttgttactcaagcctgaatatatatatttgttgattcaagatcagtggacagaccagtattagactatactccttacaacagaatacaaattcaataatagtatttcatacaaccagagcaagttccatcaaggttgcctctctaaattaagcaaacaaacaaaaaatcattcagatatgctccaaatgaacatccaaaagttgaaacgaacaagattcagatggatcatttggatacattaattaatactactatctatacaaacaggggaacaatatattgatccagagcacttgaaaactattttgtatggacaacgcctcttacaaagggagcaactaggtcgagacatatgatggttattcggcagattatatagcattttacctttcaaatacgacgatgtaccgaacttacctttgtataaccaccatgaaccgggatccatgtatttgtccgccccaagcatacagttaatgtgtagggtgacacaacaatactcatcacacatataaaaccttttctttggatctatttctccctcgcaagcttcacaccaataggtcatggtacttgtctccttcccataagaaagagtgagcatatgcttatcatacttatacctcaccttttgaggtaatgtggcacatccaaaacacaaagcaaagtcacactcctcaatgcaattaaatttttcatttgtcaaagaataatttgactctttgcagacactacaatctttccactctcctggtttggatgtcaggaataaaggatgcatatgactttcatggactaatggctctgaaactgtggcgcactgcacgtgtagttggaaatcacattcttctctctcacaccgatagaagaaaccagttgt

SEQ ID NO: 16773 - DNA, 678 bp, Arabidopsis thaliana landsberg
cttttcaaacacatatttcttttatcaaacaagtccatattagcttttacatcaaacgcaacaaacctagcgttttagttaaaaaatttatcgttgccgtatctaacattctaacatcttcaatggagattctccatcatcctgtttctgctatcgtagttgcagagggtatcttcataggggttatggtgaatacgtgatgattagaagagaaacgaagaaactgctcggttatggattgcctaaccgaattgacccgaaaaccgaaacccatttcaaatatcgccgatcagttcaaagctcacaaccaaacacaaaccaaaatccaaaaatatcggtttgttcggttcggtttgctcggttttcactgtagtctcgtgcctatttgtgtctgtagagctgtcaaaatggtccgtccatagactattgggcgtgtccatgcggacaatttttttttcgactgaagttgggcggtccttaatggacaacggtccaaaaaatgtcaatgcccaataaacaccattttcaaatggtaaatccatggttgtcacatttttttatttcaatatgaaaaaaaacaaaaaccataattttagagaaaatagatgaatttcatttttctgaaaaaacgttaaattagagaattgcgttttttcgccaaaatggttaaatgtattt

SEQ ID NO: 16774 - DNA, 3792 bp, Arabidopsis thaliana landsberg
  unsure (1)..(3792): unsure at all n locations
aaaataaaatacccacagcacaccaaaaaaaaatgattaacaaggacttaaaaccatgaacaaaaaaaatgcaaaagcaaaagttatataagacgattagaattgacaagacaaacaaatttatttgttttccatttattgactatgatacaaatactactattttgctcaagcatgtcggtgagtagcataattaaaacgtggctcacggatatatatcatccaattcgaattctgttgaaaccaatgttttcaaactctacctgaacccgcggtcgaaccggtaaagttggtgacccgatcacttattcgattcgggtccattgctaaaattctttaataattaactcggtgaatttataaaaattcggaaaatccgataaaagatgactcactgacctggtaggttagtccgtgttggattaaaattttacatgaaagaaaagtgagctagcatataaactatggtccatgtttagtaatgacacatacacgagattaatgatgatgatacatacagccagttagctctccgattgaaaacctccacttgcttcattgtcgtaagggttgttcattgattagcctacttcgacttcatcatgcatttaatgtcgacatgatacaactttttcttagataccattcatacacgataacacgaacgtattgtagaaaaaatctcttttcaagctaacacgactttaaatttagaaaatatatattagaacatttttttccttctaaactatatattagaacattgaaacattgtttcaatatgtggagatactgaagtaaattgctcgaaccgaactgaactaaagttttgccaatttggtttagtttggataaaacgtttaggaaaaagtcactgaattgaattgaaaagtaaaattcgagcatttcattttcgaaattttggactgaaccgaacgtacccgatcaaaaacgactagttggtacattgctcataatttttctagatatagtaattgtttgcatatccctcttcactcacacaaacattcattacacacaaattaagaagaagaaaaagatggataacatggagttatgtgaagcaaacaacgttcctctaacgcccataactttcttgaagagagcttcagagtgttatcccaatcgaacatcaataatttacggacaaactcgtttcacttggccacaaacctatgaccgttgttgtcgtctagccgcttctctcatctctcttaacatcgccaagaacgatgtggtatgtcacattattggagttcaatatttataaatttaagcccatctggataaaactatagttgtgataacaagatttattatgtttatttgtttaatcatattgtaccactatctttcactatccttacctcaatttttcgctgaagaggtttaagatttgttagagatagtccgttttgtgtagggtataattaaacagattaacattcatttatacaaagtatgagacatgcatgtgactaacattgtgtatttaggtatcagttatggctccaaacacacccgccttgtatgaaatgcactttgccgttcccatggctggagctgtacttaaccctatcaacactcgtctagacgcaacatccattgccgcaatcctccgccacgccaagcccaagatcttattcctagaccgcagttttgaggccttggctagagaaagcctccatttattatcatctgaagactcaaacctaaacttgccggtcatatttatccacgagaacgattttcctaaaagggcttcattcgaggagttagactacgagtgtctcatccagaggggagagcctacgccctcgatggtggcacgcatgttccgtattcaagacgagcatgatccaatctccttaaactacacatcgggtaccactgccgacccaaaaggtgttgtgattagccaccgaggagcatatttgtgcacattaagcgcgattattggttgggaaatggggacctgccctgtctacctttggactctgcctatgtttcattgcaatggatggacgtttacatggggaaccgcggcgcgtgggggtaccagtgtgtgtatgaggcacgtgactgccccggagatctataaaaacatagaaatgcataacgtgacacatatgtgttgtgttcctacggttttcaacattcttctgaaaggaaattcacttgacctgtcacctagatctgggccggtccatgtgcttaccggaggttcaccgcctcccgctgctcttgtcaagaaagttcaacggttggggtttcaagtgatgcatgcctatgggcagaccgaggccactggtccgattttgttttgtgagtggcaagatgagtggaataggtaataatcatttgtactatttattctcatgtatnnnnnnnnnnnnnnnnnnnnnnnnntcatttaccaaaatttaaaaggtcttattactcaattgaaacagattaccagagaatcaacagatggaattaaaagccaggcaagggataagcatcttaggcctagatgacgttgacgtgaagaacacgaaaacgcaaaagagtgtcccacgcgacgggataacgatgggagaaattgtcctcaaaggaaatatagttatgaaagggtatttaaagaaccctaaagcaacatctaaggtgtttaaacacggatggctcaacactggagacataggtgtgattcatcctgatgggcacatggagatcaaagatcgatccaaagacattatcatctcgggaggtgagaacataagtagtattgaggtcgagagagttctttacgagcaccagaaagtgctcgaggccgcggttgtggccatgcctcaccctttgtggggtgaaacgccgtgtgcctttgttgttttaaaccaaggtgaaaccaatcaaagagatcgtgaaaaggaatcggtgacgaaagaaggagatttgattaagtattgccgtgagaatatgccgcattttatgtgtccgaggaaagtagtgttcttggaagaactgccaaagaatagtaacggaaagatacttaagcctaagttgagagacatcgctaaggcattggtggtcagggaggacgatgctggctccaagaaagttcatcaacgcagtatcgaacacgttagttcgaggctttagcgttacatattcatcgatgtgttttatgtatatgcgtatgtttggattgatatgtttcttagtttgcatgtatggattgttaaatttacgctaataattaaaatgaagttattcaacaaatattgcatcttttatttgtctaaaaaaatggtaagacaaaaaagagaaaaaattccacgtggattcaacaaaataaaattgaagaagataatctcaaaattcttaaggctcaggactcgccacttggataacattcatatctcttcactttcactagaacacagctcctgaagctgaagaagtaaaaaaaaaaacattgcgacaacataacaaaaacaaaagaacacaacatgagtgacactaaaacggtgcgttttggtcttcttggatgcatcagattcgcatcaaagttcgtcagaacagtaacagaatcctcagacgccgtcattatcgccatcagcgatccatcactcgaaaccgcaaaaaccttcgccaccgggaacaatttatcgccggagaccgtcacgatatacggaagctacgaggagcttttaaacgatgcaaacgtcgacgccgtttacttgacgatgccggtgacgcaacgagcgaaatgggcggtgacggcggcag

SEQ ID NO: 16775 - DNA, 1953 bp, Arabidopsis thaliana landsberg
cctgatctcttgataagtgttatccgtgatgaagcagaactcctcaatgcgtggcgcatggatttcctcatacttcctgcaagaactcttttagatgttgtgttcagaccagagcattatttgattttaggtggatgaggaacttacgaagcaatgagcatacaagtgatgccaagcaattgaagtctctgtctttccacatagtttccatggagaaaccagtctatgagatacactgtgaggtaaagagtgtcaggtacaagtgtgtattcctctgagacctgaaattttgagttgtgagaagctacacaaaaagacttcataagtaagcaacaaacaaactgggaagtagagaactaacctctacaagccaatcaacaagaattctccgcattgtctcagtcacatctctttgtgttttctccataaaatcaggaaatggtcttcgcttaagctgataagtagacaagtcgtaaggattcaaatgcctcaaatgcatcatcgtaagatatcaaaatccaagggataaatacctcatcaacacgcaggttgtagtagatgtcaggtgcataaaggctacagagtagaggatctttgtcatctgaatcaatgtcaacgaatttcgggctacttgctccaccacaacttctctcaactgtaaaccatttgcaagaataaagatgcatcagaaatgttatacattgcccactcaagcttcagtaaatgaccatttataaaattcacctgtcccaaagggtcttggaggcgatctggagcttggctttgcgataatgctataggatgtttcgtttgtgcctaagcttgtatctgtaaaaacagacaagcttgctcctgctgaatttgacacaacttctacctttgcatctgtaacttgtgaagtagccgaagaagatgccaccttggaagaagaagaactttgtcgtcccttctttatctgcttgatattctccacctaagtaaaaagaagaagcaacaattgtcagcaaaaacatacttcttgtcatataaacttagcaattctaaaatgctgcattgtgtagttaacaaccgcaacactgaagcaacttgtgtaagaattctcgcaggtaacattagtgatatccttaagaacagctcgcttcttaggtgcattggctttcttctcatccaaggctgttcttttactctttgctctaagaacccgtccctggttctgtgttgtagcagccacttcagaagatgttatcagcttagaagaagcacgcagagcagaggcaagagcacgagttacagggcgaccatggattggtatagagtttccagaaacagcattctccttccccatgattgaaaccctttgacacgatccaacccttttctaacgtttgggacttagcaccacattaactctcgatctgtgaatttgaagtcaagagaaatcgaagatcaatggcatgaagattaaacaaaacagagagatatatatttatctatgcagagtccaatgcatataagatgtttggagaaattgtttattctaaacgaggattgtttatctgatcattcatgactagacaaataattgcaaaacgtacttgttgtttaagttcgtcgaatcaagttccaaagtttcaagtcagattcaagttgaaagaacaagtctttgtgaattacaatttacttgttgacaaaaacttgaaaactgtaatgcagaaaaccctcaacgctcgaaagaaaaagtcttagcaattttagcaaagacgggagcgacttgcgcagaatttggagataattaaatttgaagaaaaaattagtaaagtttctaaatttctttcatgggtttttatatataaatgtttatccataagaaataggaacaagaaaaggaacgactagatcaaatttcttctgaggataacgaaaagacccatgatttaaagctgcaagcgtgac

SEQ ID NO: 16776 - DNA, 797 bp, Arabidopsis thaliana landsberg
  unsure (1)..(797): unsure at all n locations
tgtttggcgtgttggttgcgtctacatctacgtccatggccgtcacgggatctataatcacgcaggtcacacttggtagctcgatacttggtttcgctatgctttcgacgaggattgttcgcctcatatcggggttcgtgtttgaagcttgtgcggctaaagcgtctgctgcggagttgtcagtccgaggaattttgaccagagagaattggtcgaactgtttggacagatcgtgaactaatgaaagataggctcgcattctttcatttttagcttcaaattcctcgctgaactgacagactacgagctgagaatcactgaaagctttgatgtgcctggctccgaggcctttagcaagtcgaagtcctgctagaagtgcttcgtattctgctttgttattggacgctttgaattggagtcgaagcgactgttcaaggatctcttcggttggtgattgaagtagcatttcaagaccggagccttgtaatgacgatgagccatccgcgtaaagtatccagttctcttcaaggaccttgtcaatcacatatggagatagctcggtcatgaagtctgctaggacctgagacttgaggcnnnnnnnnnnnnnnnnnnnnnnnnnnnnnnnnnnnnnnnnnattgcccattttgcaattctcccggattggttccgattgtggagaactgtgtggagcggctgatcggtaaaaactactatggagtgtgaatggaagtacggtcagagtttccgagccgccgatatcactgctaatgctagattttctaaggtcggatatcta

SEQ ID NO: 16777 - DNA, 2005 bp, Arabidopsis thaliana landsberg
  unsure (1)..(2005): unsure at all n locations
aaagtttgattcatatatgggggcttttttccaaagattgggtttcctgataggcctttggagggagaggtactttcggacagcagaacaaaaccctttttattgtttttgcggttcttgaatttttttaacatttaacatgagagaagtttaacacagacctgctggaaccaaagttacgaatatgtatggtggaacacgannnnnnnnnnnnnnnnnnnnnnnnnnnnnnnnnnnnnnnnnnnnnnnnnnnaatctaaaatctttcctgatcagaatcatgttgtgaaaaagaagattgatagattgtttccataacgaatctgatctgttcttggcttattccatagctgaaacattgcttataatgtggactttgtgtaggtatcggtgaatggaacattgtaccacaagagctgcttcaagtgtacacatggaggctgcacgataagcccttcgaattacatagctcacgagggtaagctatattgcaagcatcatcatattcagctgatcaaggagaaaggaaacttgagccagctcgaaggaggaggagagaatgccgccaaggacaaagtcgtcgctgcttaaagaaacaattcaatctctctgggatgattttgactatcgaagaatcaaaagagtcactacttctccatcgatcgataacatatattggttttgtttcttcctacgtttgtgtttttctttttggtctttaatatgtttttttttttttgggacctttgttcactcttttattgggtttcttgaaatgaaactagagaaacaaagaaataatggatgtttgcttatgagatatatatgtattacgttcatatgatataaattaattttcgtgaagtttaagcttcagctaaatgatcgattcaattgctaccatcgttgattcaggttattgataatttgttactcttggcagagaggatgatgaagtcgcgtgaagatagaggatggagatgtaaacatattgggctaattccttacaaatgttaacatagattaaaaacataaaataaaacaaacaaataagggtaacaaaccgaaacaagagagacaacccataacattaataggcccaacgaccaaacccatgagtcccaactcggaggagaccaatcgacgaaaacccctacacaagaggcgcactaacacagaaaacaaccctttgccgaaactcaatcggagaaggctaacaaaaattttgcaaagtacttcgtgaacttgaatttgtaaaaacaaaacatattgattcatggattttttgttttaatgttattgtcttcaaggaaaaatcgggaaaataatggctactatagatataatacaatgatatgaaattaattacaagtagaaagtagacatacttattagccctattgtaaatctaccaaaatgatttaaatcaatggtattatgtgttaattcataatattaacagatttttatctcaggaattgttgaacaaacactaattacttttggtcaatgctaattgattaatctaccataaaactctttccccaaaaattttggtcaatggtcttgaattaattgaaaaatgttttgttgctttctcgacccttatatattaaacctttatcttccatgcttcaaaatcaataaactctccctttctctctattgttgatcaaaatggaagtgagaggcccagtgatatggatgttgttaatatgttgcatctttggtaacataattggaagtcataacaatgattttgtggaagccaagagcttttctaaatctgaagatttagaaatcgagaagagactaaagactatcaacaaacccgcagtcaaagtcatcaaggtttttgtatatcttcacaatcttgttgttgntctctatatattatacaattaatatcttaacctctctatatatatatggcattaaatgatagaccatagatggagaaatatacggatgtgtggatttcttcaagcaaccagcatttgatcat

SEQ ID NO: 16778 - DNA, 2954 bp, Arabidopsis thaliana landsberg
  unsure (1)..(2954): unsure at all n locations
tgatgaaagattcacgttttatagtgggtctcacatattaaaaaatatttatattgttttgcttataattactggactaattaaatttattaaaatatcctccatcaatattttattaatattcaactgaaaaatacatttaaaaaaaagtatttaaaacaaatcagtgagaaagcccaaaaaaactcaatattcatataacagagtgagagtaatagattgattcgtatacaataaactcttacatatcgcttttgtaaataaattttctagttacgctgctgcaggctactacgagaaacaaaaacaggtctaatagattagttgactctaggttttggctcggatgtttaacatggtgtgttttatacccaacgagcaactacaccgcatcattagtcggatagtttagattcggatcactcaagttaattataaaataaagtgtatagatttttatcgtacatacatactttagtttagtaaacaaccaaacataactgtacgttacaacattctgtttcctctctttttctgccatcagaaaaagacgcgtacacgtttctttgcaactggttcgagaaattcccagagcacaaaggaaatgagttctacattgcaggcgaaagttacgcaggttaaataaaaatcatcttgtgttttttttaactaatatgtctaattcggttttataaaattttttaactaatatgtcatcttctgttaaatcatcttgtgtttagtttttatattgtctaattcggttttataatttttttgggtaacgtgtgtgtgcaggaatatacgtacccgagttagcagaacttgnnnnnnnnnnnnnnnnnnnnnnnaatgatttgtcgcttcacatcaatcttaagggttttttggtaagtttgtatgaatctctcgatactagctaactgtaaataaaccaagtagttgtgtacgataacaataaaaacaaacatgttaattatactcgatataaccatatattcaaatcaaatcagtcccattttttttttttttagnctacatagttggggaatcctgagacatcagatgcagaagattggagaggttgggtggattatgcatggagccatgcagtaatatcagatgagactcataggatcataaccaggacgtgcaatttcagcagcgataatacttggagcaacgatgagtgcaatgaggccgtagcagaagttctcaagcagtatcacgagatagatatctatagcatctatacctcagtttgcataggagattctgcgcgatcgtcttactttgattcagcgcaattcaaaacaaattctcgcattagctccaagagggtatgtgcatgtgtataacataaaagcctataatttactttgaaactaacaaatatcttttattttgttgggatgccttagatgccaccgaggctcatgggtggatatgatccatgcttagatgattacgcgagagtattttacaacagagcagatgttcagaagtctcttcatgcgagtgatggagttaatctcaagaactggagcatttgcaagtactctccccaatatcctttatggttttttttttgtgtaatatttgaaggaatttgtctgaatgttctttggtattctaacttcagcatggagatctttaataattggactggttcaaacccgtcggttttgcctatttacgagaaactcatcgccggaggattaagaatatgggtttacaggtaaattaaattacgttcacgaaaaccaactaaattcctaattaatttcactctgacgaaaagtagttgactacaacacaaattaaaaacttcgatcactgaaactaaaaaaacagagtatacaattaggtggcttcctacgcaagtaaccactacatactttagcttcttctactttagttggttaataacaatatgaaagaaagtttattctccaatttttctaagccgttggtttttggtttctttttgtgatggatccagtgtgacacagacggaagagttccagtacttgcgactcgttatagcttaaacgcactcgaattacccatcaagacagcttggaggccatggtaccatgaaaaacaggtacccgtggacctaattcaccagttatatgaaattcttgatttgagtattgttagaccggttaaattcttgatgatgctataacaggtaagtgggtggcttcaagaatacgaaggtttaacgtttgctacgttcagaggagctggacatgcggtgccttgcttcaaaccaagcagctctctcgcctttttctcggcgtttctcagcggagttcctcctccgccatcgcggtagagaagaaattcaatgattaaaaagatgatttagtacgtaatctaattatgagtatttttgaaagatttttgggttttgtttcgttaacttgtcagacacacgagataggggaaaacaaggattgtaacttgtaagagagaatatgtgatttatgttacgttttatgtcatgatcataatgatcaaaagaaaaccttcaccgctttgagattatgatcaaatgaaaaataaatagctttttggtgcaatgtcattataatgaaatccaaattggaaccccagactagtttggcgcacacattttttggtggtttttgttaattctcccttttatataattcattagtaaccgtagatttttgctacttaaatcgatggtcaaatataataaagttatgtatacggtatatgataatctctctttttgggtaagaatgaaacattcatgcattaatcatcagaaaatctcttcccaaataagatagtaggatttcattcttaccaaccatatttacttttgtattagcattatattattattattcccatttgttatcttagagataagtttgaaccattgacccatcaaattattattttttcattcagaaata

SEQ ID NO: 16779 - DNA, 1818 bp, Arabidopsis thaliana landsberg
aaactataggaaatatccaagaagtttccaagtatcgtggaacctacacgatatggttcacatattttccatgaaaggataactattttgacttttctcatcacgctcaataatagcgtgttgttaatcctttactctatctctcttcaaagctcttttgatcttaaatcttctctcaattgtagtaatggatttttacgttttccttgggactgttgctgctacgttcttcactcttttgagtacaatattttatatgatttatggaaaatttcgagtccaagaaactataataactacttcttcttcacctcctacatctccccaatcttctttgtcttgcaaccagaaacacgatgtcttccccagcttccacggggcagatgtgcgcaaagcatttctcagtcacattttgaaagagtttaaaagaaaagggatcgatacgttcattgataataatatcgagaggagcaaatcgatcggtccagaactcattgaagcaatcagaggatctaagattgccgttgtcttgctctcgaaggactacgcttcctcgtcgtggtgcttgaacgagttggtggagatcatgaagtgtaggaaaatgttggatcaaacagtgatgacaattttctatgaagtggatccaactgatgtaaagaagcaaaccggagactttgggaaggtcttcaagaaaacttgtatgggtaaaacaaataaagttattcgaaaatggattgaggctttgagtgaagtagccacaatagctggagagcattcaagaaattggttagttctttttatcacatcgtgctgctttttttttgtcaaccgatattaattaggatgcagttcagtacgaacgatattaaataggatacatttttttgttaacaactttattagctcttaatatacttctttgtagctacgatttaaataatttccagccagaaatatataattatgtgtactttattatatgaattctataatgagtatttacttacaaatatattttatcttcccttttttagggataacgaagctgccatgatcgaaaaaatctctactgatatctcgaacaagttgaataaattcacaccggtaagggattttgacggtttagttgggatgggagctcatatggaaaagttggaattgttgctctgcctagactcttgtgaagtgaggatgattggaatttgggctcctccagggattggtaaaaccaccatcgtcagatttttatataaccaactctcaagcagtttcgagttgagcatcttcatggagaatatcaaagcgatgcatacaatactagcttcttcagatgactatagcgcgaagttgatcttacaacgacagtttttgtcaaaaatactcgaccataaagatattgagattcctcacttaagagttctgcaagaacgtttatataacaagaaagtgcttgtcgttcttgatgacgtggatcaatcagtacaactagatgccttggccaaagaaactcggtggtttggtcctagaagtcggattctcatcacaacccaagataggaaacttttgaaggcacataggatcaacaatatttacaaggtggatcttccaaattctgatgatgctcttcaaatcttctgcatgtatgcgtttggtcaaaagaccccatatgatggtttttacaagcttgcgagggaagttacatcgcttgttggtgaacttcctttgggattaagggttgtgggctcatattttcgaaaaatgtccaagcaggagtggaaaaaggaaatatcaaggctaagtgctcgccatacggaaaaa

SEQ ID NO: 16780 - DNA, 998 bp, Arabidopsis thaliana landsberg
cgccgtggacatcttgcatggctgcctcagctgagtctcgctcagagatagagtaatgctctaagcagacctccgcacctcggagactgttctccggacggcgcaccaaacaagttgcctcccagcggtccgggtaaaccccgcgatggtgctggaagacaacatagcgatactcgatagaccaggtacgtcggtcaagtgcctagcgtagaactgtgtcgagcgcatcgtgaaagtgacacccacgagcggcgtcacgagtgatgggtcgggcaacccatccctccggcttctgctcctgctcctctgaaaggtcgatgctgtggctcgagctgctgtcgtcatctccgtcgtcgaggtctcctccagcagctagtccagtggccgggacgcccagtggtggtgcagggggcgcctccagcgggactataggagagtagctcctcacagactacctcctgctgaagcgatgaagcagagccctgctgctccaactcctgtcgccaacgctcctgctcctcgtgcaggcgacgatgcagtctctccaggtggctagaccgacctagcatcgtgcgacgcagtggacgctccaccaggcgagaaggcaaaaaggggatcactgacttacgtgcagtgcatctaatacgagccatctacaaaagacaacataagcacaagagtgagagtagaactataagaccaacaagtaaacaaaaagataagtgagacaaaactttgtgagatgagtaataacatagaattggtcaagatgaccaacttttgaaatgacactaaaggtcaaggtaagggtagaggtctatagtccttagggcgactattctagtctagtttagcggtcctacagtcagcaagggctttgataccacttatgtcacactcggttttggaaggcaaaccgaatgcgaaccatgtacgtgcgaggaccagaaattcacatacacaacgattacataattggacatcatcacacaatgctc

SEQ ID NO: 16781 - DNA, 926 bp, Arabidopsis thaliana landsberg
  unsure (1)..(926): unsure at all n locations
cgcccacttaacagcaattagagttgggacggaaggaggattctgtagaaatattttttggtgtaacttgtgcatatttcgcaagaaaacagaatttactgtaaatttcaaagtgacaagaataaagactttttacctggaccaggaaaatgtcaggcgctggtactttaacgaaaagaaaccagagaagcattgtaaactgaataaatgccttgagcaagagagttacaggataaagtatctttggaaagtactgaatgaatcgaggctgagcctgttttagcaccccccaaaagaattagaaagtgatgatcataaatctacagagttgctagtagtttatatagaagatttcatcgtagcataccatggtatggatgtggattgatgggtgatttagaacagcttcatggggtatagaacctgttcatgatttttttttaaaaacacttcagcaatgcattgtgtgattcacaagaaaatttatcaaggaatccgcacctccatatgcacagatgtccacttgtgatatgctcgccggtttatgtctttagaggaactggtcgattcaagaggcacttgatcgaatgcaaaagtggggacaaaccaagacgtgcgagattnnnnnnnnnnnnnnnnnnnnnnnnnnnnnnnnnnnnnnnnnnnnnntccactacgcaagcccttcctcttttccccatcgttcctatgtcgagctcagaagttatcagactctactaatccatgagaagctagttagttataaatccaagagagtgcgctcttgcgattttagctgccaagatctcacatttgtgcgagatgtgcgttctctcgggttctcccagactccggtgatatgctccgggcataattttccattaaaacgcaggaaaaagagagatagtgatctntaatganaatcc

SEQ ID NO: 16782 - DNA, 3088 bp, Arabidopsis thaliana landsberg
gatggaacgtctacctgtttccaatacctcctcaacgtatactgggccacattcaggaaaaaccattcttaattctttggaatatgcacacgcagtcacactttgtagtggaaggaaattgctcaacacccaaccaacagaaaagatcactgaagatagtgaagttcaagaaggggaggaccagcataaaaacgaagttcaaactgatgaaccaattaagcttgatcagccttcatactcactcgaccctctactcgatcgaacaaagccaacttttgaggaaagtaaagccgcggctgcagaaaaaataaagaatggtctccgccacccttcaaactgactatgcttttccaagaaagattcaagaaggaattaatagaaaaatacaaaaccctttttgataagcagctaaaggagattgagctaagaatgtcgttaatggatgctttcatgctcattccacactcccacaaggacctcaatgatctgattatggaaagaaccaaggaagtgcagggaatggtggtaataggccatgaatgcaacgctttcatccagaaaaatataataccaaggaagttgggagatccgggatccttcaccctaccttgttcagtaggaccgtcatctttcagtaaatgtctatgtgatttgggtgcctcaatcagcctcatgcccctatctgtagccagaagattaggttttagtaaatacaaaccctgcggtatccaactgatattagctgacagattagtcagaatacctcatggagttctcgaagacctgcctgttaaagtcggatcaatagacatccctactgatttcgtaatactggagatggatgaggagccaaaagacccattgatcttaggaaaaccattcctagctactgcaggagctattatcgacgtgaagaagggaaaaatcgacctaaacctggggaaggagatgaaaatgaccttcgacattaacaaagctatgaagaaaccaacaatcaatggacaagtcttttggatcgaagaaatggatggattggctgacgaattactggaagaacttgcagaaggagatcacctagcaagtgccttaaccaacgaaggagaagaagattacctacacttagaaactcaagggtacaaagagtatctagacgcccacataccaatggaaggaccagaagagtttgaggaattgattgttccctcagaagaagcagtatcaggatgcacaatgagcctaatcgctgaaaaaacaaactctactgagatgctagaccatggaggagagaatataagttcagatgactggtcagaactcaaagctccaaaggttgaccttaagcctcttccaaaaggtctgaggtacgcgtttctcggtccaaatgatacttatcccgtcatttttaatgatggattaagtgatgaacaagtgaaccagttgttgaatgagcttagaaagtataggaaggcaattgggtattcattagctgatattaaaggaatttcacctagtttatgtactcataggatctatcttgaaaatgaatcatatactagtattgaaccacataggagattaaatccaaatttgaaagatgtggttaaaaggaaaattcttcaactgcgtgatgctgatataatatacccaatttcagagagaacatgggtctctcccgtgcactgtgatagtaggatttttgtcaattaatccctaaaacactatcttgtcggtgtagtattttaggatgtcaatccaatccggtgtgatgcaaacagatgagatatgatcagaaagctctaagtcaagccaagcagatagttggttggttctaacagtcctagtatgcaataaaagaaatgaaatgaaactaaaagcaggaatggcaatagcaggcaagtgaatgacaaagcagaactgataacaggcaatcaaatggataaacgattcctaaggatggggtaatcgagtagagtggtatcctagcctattcgaatggttaacaagcgcaatcaagctatccctagacaacaagttcaacaacagattacttcactcccgtgatagaaatcctcaagcaaaggtagcctagactaattcccattaacggaatctaactatgcaggcaataagtacaaactgataaagtcaataaacgctctaaacggccaatcccttgggagagagacgaatatctcaggaactagtggatcaagcattccatcgaacacattctgggtgcgggaatgcttaggaacgaattccagaagatcagaaagaaataagcagttaacacaactagtccagaagggattcaatcaattcaaaaacttaaccattctacagactaaggattccacaatcattctatctcatccttaagaactttatgtcactactcagacaacatgctcaaagacataaacgcaggtaaatgataatattgcataagtaaagagataaagagtagagaaacaagatgacagatgaaatcaattgcggaatctgaataacttggaaaaatctcgaattacaggttgcacaagcaaaagcggcgcagccagagtaaaacagaagcaaaaaatcaatgtccactagatgtcccaggacaaaaccctaagacacctatttatactaaacaaaataaaatgatagtagatgggccggaaacctaatcgaccggcccatagagtgataatgggccgagatgggcttcgtgatcagatgaagctctggacgcttccaaacacttcttcttctactcttcccttccttgtgctcagcttgtctggttgagtgcggatttgagtagactctgaagatgtgatcgagtgcttggtcgagtggtggtgttggtgttgagtgattatactcgaccagaggctcgagtaatgtggtagagtgaacggccgagtgtggtcaggtggtgtgacaaagtgatactcgaccagggggtcgagtggtgtcatcgagtggtctgagctatggttactcgactagggggtcgagtagatgggaagaatggctccaaagccacttgaccagggggtcgagtattgtgttggatgtacacgacctaatggtcgagtaa

SEQ ID NO: 16783 - DNA, 1264 bp, Arabidopsis thaliana landsberg
gagatagtgcggaccgtagtaatatgaattatggtgttgttgaacatattgattattatcaaaattatggtcatcatcaagaatctgatcaagggtataaccatgaaaatagatttcatgatatggttacagatgcatttcacgaaagtactgctgcatttagtgaaaatattattgtagaaaccaacgtagatgcacaacgcttttatgatatgttagatgctgctaatcaacccatctacgagagatgtagagaagggcaatctaagttatctttggcatctaggatgatgacaattacagctgataataacttaagtgaaaattgcaaggattcttgggctgaacttattaaataatatttacaagcagataatatatcggctgagagttactatgaaatacagaagttggtttcaagtcttgggttaccatcagaaatgattgatgtatgcattgactgttgcatgattttctggaaagatgatgaaaatctgcaggaatgtcagttttgtgagaagccgagatatcagcctactggaggaaggacgcgagtaccatataaacgtatgtggtacttgtcaataacagatagattgaaacgcttataccaatcagaaagaactgcagcgaaaatgagatggcatgctgaacattcaacagtaaatggtgaagttactcacccatctgatgcataggcgtggaaacactttcaaacgatatattcaaactttgctagtgagtgtagaaatgtgtatgtctgggaggcaatatttttcatggccggttatcgtgacaccatacaatcttcctccagatatgtgtatgcaaagcgaatttctgttcttaagtattctagtgccaggccctaagcatccgaagcgagcattcgatgtcttcttgcaaccgttgattcatgagctgaagaatttgtggtacgaagatgtcctgatgtttgattactcgagcaagcagaatttcaatatgctagcaatgctaatgtcgacgattagtgactttcctgcatatggaatgttatttgggtggacaacacatggaagattatcgtgtccatgttgtatggatcggactgaagcgtttaagctaaagcatgggcggaaatcatgttggtttgattgtcatcgtcagtatctttccatgcatcatccgtatcgaaaaaccccaaatcccattaggaagaataaagttgtgcataaacccaaaccagtttatctttctagatatgatttgtttgaaaacatcg

SEQ ID NO: 16784 - DNA, 1501 bp, Arabidopsis thaliana landsberg
tagtgacttcattactctgataattccttccaaagttggatccaccagctctaatggtgacttgtttctccaaagcctcgaagcctaatacaatgaacaattaagtaccttggtcatatgttttaaaatgttaaattgttgaaagttgaggactttatgctcacataagtgaccaagtttcctgcagtactagtttcatccatctggtagacgccgctgtttttcttgccgcttataatctcaagaactaagactccaaagctataaatgtcagatttcatggagtattgaccatgcatcgcatactcgggagacatgtaagcgctgaaaaacatacaacacgggttaatatgcaatagaaaatggtttagtgttcagctactacgagcagaacttactaggttccagcaattctgttcgtgtttccttgagtttgctccactccaaaaatagttgccaatccaaaatctgcaatttttgggttcatgtctgcatctaagagaatgttgctggctttgaggtcacgatgaatgattttgagccgtgaatcttgatgaagatatagaattcctctagcaattcctccaatgatcttgtaccttcttgtccagtctagcttccttttcatcgtggagtctgtacagcgtatttaaaatgttaagaacaaagaatggcatacaatttgaaaatatcttggctacgtactaaatttaactgaccaaagaggaagtgatcaaggctcttgttgggcacaaactcgtagacaagtattttttcttctccttccaaacaataaccaagcagctttaccaaatttctatgttggagctttgcaacaacaacaacttcgttttcaaactctttttcaccttgtcctgatgtcttcgatagcctcttcaccgcaacttgtagtccactagtcaatgtaccctacttaagtaatttattttaagataaccatattcatataggaactgactgtaagattaatcatgaaaatgaagatgtactcaaatgcaattctgaagaagtcagttcttgttacaaatgaaggacgatgataattaataactagtgcttgtttgttccgcaactgtgaaatgaacatcctcatatagtgaagctctgttcaatggtaataccttgtaaacttcgccgaatccaccttgaccaagcttgttaatcggcaaaaagttattcgttgctgccacaattgccttaaaatcaaactgaagtgagcctgcagttgtaatactatccccatctgtagcaacaacttaaacagtttaatacatcagagactattcacttgacctataaagaggagtattttactttcagcaagtggttccgtgacttccgtgtcttttctctttacgtttaacaacggtatcgctccaatcatcttttttctcctcttagtgcgaacactaaaaacagctacaaagagcagaagaagggcagtgattaaacaacaacagcaataattatgacagagtag

SEQ ID NO: 16785 - DNA, 1008 bp, Arabidopsis thaliana landsberg
tattgttactatgatcaagacactattttatgcataatacacattataattttggcacagtgagacttacacacaaggtttttatacatgttttttaactgatttacaaaaaattttataaaaattttacaaaagtttttaaaagatttaataaaagttttaaaacgattttacaaagagttttaaaaacttttaaaggttttaaagaaagtttatgagaatttacaagaattgtaaaagatttataataatttttttagaattagaaaggagaccctcattttccacccaaatcgtcaaccttctcataattgacaagttattacactctctccacttactagttactataaaaccaaaggagaccaaatctcttagcaattatgaatttggtcttcgctataatctcacgttacattaaattggctcctgtgaacctaaatttatggactatgatcccaacaccaatccgttcgaccttcatttctccggtaaacttccggtgagtttttcaatttcttcgaaattttcacttcaattttcgaggttgtggtgattattcgtggtgttcatatatattttattgcctgatttagaaaagagaagtctcggcttcagcttctaaagttgtagagaagaaatggttagtgaaagatgaggttagttctttcatcgaacactttggtgtgcaatactttgacctcaaaatttttgactatgagtgaatggattaggttgatcaagttctcatatctgatttagacattgaatagtttgtttagatcggtgatgctcaaaagttgaacaaatcaaagctttgtcttacagagattttagtttgggaatggtgattttcattttacacagaagagaaatatgctacaagatgaaataaaccgggttaattcggagaacaagaagctaaccgaaatgttagcaagagtctgtgagaagtactatgctcttaataatcttatggaggaagtgcagagtcgaaagagtcctgaa

SEQ ID NO: 16786 - DNA, 2448 bp, Arabidopsis thaliana landsberg
  unsure (1)..(2448): unsure at all n locations
ccctctccaaatgtcagaggagaggaataattagccttaccatattttttttgtttaaactatgttagaaatatagaatcaaaacaatattattttataaggcttatccaaagcatattcttatttttgtgcctttaacaaaaaaaacaaaaaaaaattctcatacttatctccagatgttttagaatccaatgagctcaagtcggactcctttgtttcaaaaaccacataacccttcctctactcattaaatccacaccgttcaaactacctatgcatagacgtggcaaacgatcaatggacaaaacacagattatccaatggacccgcacgtacactcatgattttcccctcccgaataaagttggtttatcttatacagggactgactgatacaaaagtcacataaaaaaaaaaaataagacattaatttgaagaaattgaaaggagaggtaacatatgcgaagttgattgagaagattcgcatgaagagaaatgtagatgaggcttcgacgaagcttaaagtaagttactttcccttctcgttccaaggacataaggtaagaccaaattacattcgagatgatgaagatgtagagtgttattttgagggtgtgagtgaagaaggatttagaagcgtattgcatgttgaagttatcaatgatgttgaactaaatctgaggatggatgagaatgaacagtttgatcaagtattaagagaggatttggttagcgaaagtgttacaaataatgaagatctatctcttattggtggagcggatgagattggtggagcggtggagattggtggtggtgttctttctatgtatgtaggagaaccatcagaacaatatccagttgtggtggagaatgaggatagagatttagaaggaaatgcgcgtggaccaattttatgggatgatgagcttgaaattacagttggccaagaatttggaagcaaagaagcaatccaaagtttagttgagaaggctggacataacaatgtctttgagtttgttgtaaagaaatcggagccgttgagatatgtggtggcatgttcagaagcacgtaatggatgtaattggtatctacgagctgcgaggcgtgatacgtctaagccttattctatacgaactcatagaaggattcattcttgctctcggtcaagtacaactacagggcaaaataaaaggagaggcacaccgactatggttgcttcattattggccgaagattatccgggtaaaattgccactccaactccaaaagatcttattgacttggttaaaggaagatttggtgtgcaagtctcatattctaccgcgtggagaggaaaaagagaagctgcaaatgatattagaggtaccccagaggaaggttttaggcttgtgcattgttatatgtacatgttacaaaagatgaatcatggttcagtttcgtatgtggaagtggatgatgaaaataagtttaagtacttgtttttcgctttaggagcttctgttgaaggttttcgagttatgaggaaagtcatcattttggatggaactcatatgaagtctgcatatggtggagtcctaattgttgctacggctcaagatcctgatcatcaccattacccgattgcttttggtgttgtggattgtgagaaaaacgagagttggacttggtttctcaataagctcaaatcggttataccggatgatcctgaaattgtgtttgtttcggatagaaaccaaagtctcatcaaggcaatagccgatatcaatccattgtcccaccacggacattgcatctactatttgtctcaaagacgtgaaactgaaggtttctggagtaaacaaaggcatttgtggaaaaaagtatagggaatgtgctcgagcttatacgaaggcggagttcttaaggctttatggagatttttcgagtacatatccttcggcacgtacatatctagatgataatgcggatgtgacaaaatgggctagatgttattttggaggagaaaagtgcaacatagacacaagcaattctgttgagtctataaatggtgttttagagaaagcaaggaactactcgctattacaattgatagatacaatagtggggaagatagcggagtggtttgccaaacatagaaaagcttcgggacaaataccaaatggacaagtggtttgggtgagtggtttacaaatgatggtgaagatgagggannnnnnnnnnnnnnnnnnnnttgatttttgagtgccattattaagatgatatttagaaacgatgttgtttgtattggtatttgtttgtgaaacttatttgttctgttttgtacaactacattttaacaggtaccactatggttagattaatcatcgtatctgatctgtttcgtacaactttgtattagtacagctgcgtacaacctatacaactgtggtctaatgccttaattacatt

SEQ ID NO: 16787 - DNA, 647 bp, Arabidopsis thaliana landsberg
aatcttggttcttttcttttatccaactattactaaatcatcgatctttatgatgtctgagttacaacctagacatgttgagctttcatcggttaatgcgcgttttatagaatggggaaaattaaccgatgcaatctcaacatcgatctcattgttctttttttttttttttcggaaatatttggttccctaagcaaattatatgtttatctaacgagttttattcttggatacagaatgctgcatggactccagttccacagttcggagggtgggaccaaaaaggaccaaatgatgctacaaactactcggttgtcttttctaaagctcgcgctaataggaagcagaacaaagctggtgtgagacattctagtttgggaagcgaacaagaactcatggtaagtgttcgtcgcaaccaccaacaacttcaccatcgccatgaaactcaagacgatgaccctgtcatggtaattaacatctttctctctacttattcttccatggattctttagttcatatgcaccttgtgatgatccttttccccttagtcaacgcgcatggatcatcacaaggtgggttaaccattcaggaaatgattttctctttgcgtcatttctttgatttgtgtttttgcatgcgcctaaaa

SEQ ID NO: 16788 - DNA, 1156 bp, Arabidopsis thaliana landsberg
  unsure (1)..(1156): unsure at all n locations
catttcgtgagagaagccgagcacaaaggactcattcaacttgagtattgcaaaggagttgatctatttgcagatatacttaccaaggcgttaagtgtttcaaggtttgaagatcttagaaggaagcttggagtgaagccgagatatgattaagggggagtgttgaagaataatcaaatctcgtataagtcaaagtcacattcgtataagttagttattaagttaagagtcgtgtctgttacacagttgtgtctttatcaagagtcatgttttttacacaagacaatgtttcatttcatataaatagatcgagtctctgtttcctgtaacacaataatcgagttttgtaatataatcaagtcaataagattgattacattcatactctgtttttcgttcttactctgttcttctttcataacaaaacattaacacggaccggaatggcaaatgctaagaaaaatttgcattaacaaaatgttaagcagcgccacgttggattcaaattcttttagtgcacttcgccgccaggagaccaggcgaacagtccggtatttggcagaccgggctcgggccgggttggcgattaacgttggagaacaaatatttgtcacgatattaaatgtggtgactcagatgttgtggggagaaactgttgcggacgacgaggagagagagagagagttggagctgaattcttggaattgattacggagataattgatgttgtgggaaagccaaatgtctctgatttttacccggttttgagccggtttgatcttcagggtttggctaagcgtgtgcgtagatcggctcagaggatggaccggatgttcgaccggattataagtcaacgggtgggaatggataagggaagtaaagggaacggtggagattttttgatggttttgttgaatgctaaggatgaagatgaaaacatgtccatgaaccatgtcaannnnnnnnnnnnnnnnnnnnnnnnnnnnnnnnnnnnnnnaatattgctacatgatattattggactttccgagctcattccaactcccttttgtattatattgtctactttgaattaagtccgcatgattttgttaaaggaaatgcttctcaaaatacttatactagatagaattggatttggtttatatatataaac

SEQ ID NO: 16789 - DNA, 611 bp, Arabidopsis thaliana landsberg
ttaagttgaataaacacgttcaacgatatcggtattaagtaaccgtatagcatacaagcggtctttaaatgatagaaagcagcagcaaccactctccgcggatcatagaaaacagtattctgatcaggtctaagataccatcttcttagcttcccattatcactcatatcccttctcgttgcaataccgaagaacacagatccagtaaacgctataacaatcaagatactgaagagaatgtaaataatctgatccatttttttctcaatcttactcctcttagaaggaggatcagtagcattctgcatcactttcgtgtcatgaccggtaaaaacaaccacgccatatacataatccgtatttttgagtttggaatctctcaatagtatctgctgaggagataaaggatattgctttccttcaaagtaaagtgttcccacaaaggaataaagatgctcattaggatcctcacatttgatcattcccctgaagttcttgatcaactcttcgtccgatgttatctccaacgcgtgcttaagctgtaagttagtctctccatcaagattcattgtttcaacataacaaatcccatcttcatagctagatgaaag

SEQ ID NO: 16790 - DNA, 1593 bp, Arabidopsis thaliana landsberg
tttttttggcgattataccttttttgggtctaaaaatagttttttttctatatccaaatcaaatgaaaatagtctctatttatagagaatgcaaaattagaaattttgatataaattttgatatttttatgtacaaatattataaaataattgaagttatataattgagatgaaacaaaaaaataaaaatcaaagcaaccaagcaaatataacacttgtcacacttatcttctctgttctacttacacgggtattgatatttatcaatactaaatttgccacatcacctagctttgattacaacacaccatcgtagtggaaataattttttcaccaccaaaccattgtaactagtctaagtagtcttacaaggtattccataaatcttcttgtttgagaatttgttttactaaacatgtgtctactaaagctataaataccaaaatgaacatgatttttattaggcttgggcatataaaacgaacctaatgtaccgaaccgcaaccgatgcaaaaaaacggagcgaaaccgaaaatttgaaaataacctaacggatattaaaattctataaccaaaagaaccgaaatcgagtggatacaaatcaaaatattttggataaccgaaaatatccgaaatataatataattatattttcaaaaatattaattatttataaactaaataattaaaaatacttgagaatatatataaaatagtaaaaatatgcgcaagtaaccaagaagtgttcgattatccgaaaataactgaatgatccgacaatattcaaagtgaaagaaccgagtggatactattttttaagagcaaaagaaccgaaaccgaaacctaactttcaaaataaccgaagggattctaaactgtagaaccggaaaacacgataaccgaatggataaccgaacgcctaggactgataatatgaatttaaatattctaaagaccattgacttaaagaccaaatcattgtaaaccctctagctgcaccagagtgtttgcttttgaccaactatgtgaatttaaatattttaaagaacattgacttaaagaccaaatccacaaatgtacgagttcagaattgagatgatgattctccataaacctccatcttctgaaatcttacattttgacaatctgacttcctcgaagttcatcttctttaaaccagaaaagtctctgaaaactctcaatgggttgctacagcagtaagaacctaaaacaatcaaaaagaaccattcttgagaaaccattcgttgacatcggaaaggtatacatcctcggtgatgaattgggtcaaggccaattcggtataactcgaaaatgcgttgagaagacttcaggtaagacttacgcctgcaagaccattctcaagatgaatctaaagagtagagaagatgaagaagccgtgaagagagagattcgtatcatgaagcatttgtctggagaaccgaacattgtggagttcaagaaagcttacgaggacagagattctgtacatattgttatggaatattgtggtggtggagagttattaaaaagatcgaagctttgccaaagatggaaagtcttactccgagaaag

SEQ ID NO: 16791 - DNA, 2169 bp, Arabidopsis thaliana landsberg
  unsure (1)..(2169): unsure at all n locations
acaaatactatgatgactttagtggtgtgtgtatcatatccttgaattgatatagacaccggtgtctttcttcttactaaattgcagagtctagtttttaaaggatctttcttagaaaaaaaaaatcaaatccttgagtttctgacttgaaaaacattttggtacatttttttttatcaatccaacaatttttttaaatttaaacttgatagaactgggaatattgtggttctttacaaaaatgcttgctcttaggatgttcaaacacttaattgggccattcccagaatcgtgaaacacttaatgggtcattcatagaatcttcaaacacttaattgggcatttgaaaaatatttaggattgggctttgtacaattttctaattctaaagccacagcaataatacgattttgcccttccatttcaccatatttaaacactttcttgaattttgatgtgattcaagtgaaatggaaatggtatgaatcatacaacactctttattgtacataatgtttttgcacactcactctcacaatgtatacgaacgtttagtgtatatctaagattgaatctcagaacctaaattctctattcaatcatttgaattgcctgccatgccgactagtttgagcatgttgcgatcttccttaaacctctccagaacagtacctttcatggcgttatgtttggtgtcttgttcatttgaggcctgaacgattccccagcattctatcacttctggctgaattctgctcgtcttggaaaggctcgggctaccaaacgttgtgcattcgaatgtctggccttgatcgaagcttgctgatataaacaggccaaagtgatttatcttacctccaaatcctatcccattcggaatgttctccgatgtgaaattagtagcacactgcccgaccgagtgaacttatattagaatatgcttataatcacattctcatatgtagaagtatcatagtgtctgtagaggccatacccattgaatgttggtgtttgctccagttggtcggtaaatggctgctttagggttaagctggaaaagaaaagacttcatgtctccatagaaatcgctgtacctctcccaaggttgagaggcgtaccctccatacacatatccttctgtgtctttgatgattagcacagatgtcgacataccagtgtttctgcaagatatcttacgttagcttacaagcctacacacacaaattctgtcttgattctactcagtcaagtttaaatgatgttatgttactgttgagaaacactcacgatgtgtgtccgaggaatgtgttgaagctttgaccgtgtaaggaactgtgatacaacagcttccactctacaagctcgtggtgaggaagagctcctccaatatgccaagcgtattccttctttaatagtagcctatctgaactcacactatcttcatatagcagatgcgggacttgatatccaggtctcactatataacaaggttcagaggatataaaaaagtgaaaaaaaggaaaattttgaccagttttgtcaacaagaaatgagttaagatgagagaagacaaagaataaacctgtactcgggggcataagcaagcttccgaggaactttctgatagttggaacgagtgagcaccagcttctgaagtcttcaaaagacattcctttttcagaaccatcatcagattttgagaaagtagcggcatcgagtagcgcatctaccatctccttgtaatcacttgattccgcatcagaactctcagtggagaacacactcttcaaaatcaccaccaggaacgactctaaatcagacctgaagacatactagaatgtgtcacattcagagaataaccccatctaatctaacaatctcaattcattttctatccaaatatgttaagtggatcaagagaccagtaatggacatacaacaaaacaggtaatgaaacttggataacagaagcaacttgaagccacaagatggataccttctcaagaccccattgccattaacatccaaagtctggtaaataaactcagcaatctcatcatcagttcctttctcgtatgttgcctaanaagcaacaggaattgagttgaacacaatcgaatctctcaaattctatatcgagtcctagaaatgctaatcctattgaactct

SEQ ID NO: 16792 - DNA, 734 bp, Arabidopsis thaliana landsberg
cacatttcacggtgacttagactttctacatgactaagaaacaggctaacatggaatatgacaaatacctgcccagaaaggtgggactccgcttagcaatatatacaatataacaccagcagtccacacatcagcttcaggcccataacgtttgatcaaaacctcaggagcaacataatatggacttccaacaacatcagtgaatatttgacctgaaagtcacattctgtttcataagattcttttaccagcctagttaagcaaaacattaactaaaagcttcaaacactttacctggtttgaaaaagacagatagcccaaaatcaatagccttgagagagaaatcatcatccttattaaccaataagaaattctcaggcttcaagtctctatgcatcacaccaagcgaatgacacgcttcaacaacaccgacaatgatcttagtcagctcagcagctttcctctcactataatgtcctctctgaataatcctatcaaacaattcacctccagcacaaagctccataacaatgtgaacatacaaagagtcctcataagctcctttaatcgtcacgatactaccgtgaccagctaaatgatgcattatctgaatctcccttctaacatcctcaacatcttctttagagatcaacttcctcttggatattgacttacaagcgtagtcaacgcctgaggcaatctctgtacatagataagtcgttccaaattgacct

SEQ ID NO: 16793 - DNA, 1546 bp, Arabidopsis thaliana landsberg
  unsure (1)..(1546): unsure at all n locations
aaacactattatgtataagagccgttgctgcgacatgttgaatttcctttatctgtataccttgagttggtatgaccatgatgatgaaatgttaattcttgttttacagcatctcgcatttattttaatgattgtatattgtatgtctgatgcaggataagcttaaagggtactcaaatatacagtatacgccttcacgagaccgtcaatggcatatgtatagtgttacagacaggccagtgccaatcaaaagaatgttccttagatctcttgttcgacaaactacaatgaatgatgggtttctgttgcagcaagggcaggactaccaacttagccaaacagtgctctccatggcgtttacatcgaaatgcattctgaggtctttgatgaatgcaatggaggaactggaactgaatgcacataatgctgccatgaaaccagaccacgcacatatgttcctatgcatactacgtgagcagcagatagatgatcttgtgccttaccccaggtttttatggctctgtcttttacaagttatcatttgcgatgtgttagaactttatagtaacaatgttcaaaatgtttctctcaggagatttgaagtgaatgcggaggatgaagaaactacagttgagacgatcttagaagaagcaacacaggaaatacataggtctgttggagtgagaatgcatgcattgggtgtttgcgaatgggaagtgcgactgtggttggtgtcctcgggactggcaaatggcgcttggagggtcgtggttgcaaacgtgactggccgtacctgcactgtccatgtaaattcagcttacaaatagtttgttgttggtaacatacataggtacacttctccaaaccttgactctctgtgattcatgtttcagatataccgagaagtggaagctactgggagaaacagtttaatctaccactcaataactaagaagggacctttgcatggaactctgatcaatggtcaatataaaccacttaataatctggacaggaaacgtttagccgcaaggaggagtaacactacttattgctatgacttccccttggttagtaactgaattctgaagtttcacacttagtttattcttttggctgtttccaacccaccttatgttatttcctgtctcttcaggcatttgagacagcattggagctgaattgggcatcacaacactcgggagttaggaaaccatgcaagaatagactcatcaacgtcaaagagcttgtattctccaatacagaaggttctttgggtacatctcttattccggttgaacgaccagctggtctcaacgannnnnnnnnnnnnnnnnnnatcttagagatgtcgactcctgagtttcctatgggacggaaacttctcattgtcgccaatgatgtcacattcaaagctggttcttttggtcctagagaggacgcatttttccttgctgtgactgaactcgcttgtaccaaaaagctttccttgatttacttggcagcaaattcttgtgccccgactcggtgtaactgaagaggtaaa

SEQ ID NO: 16794 - DNA, 1080 bp, Arabidopsis thaliana landsberg
cacatatttgtaacgttttggttcacatatttgtaacgtaatgataaactaataatgttagatcatatttgttagatcatgtttgtttataatcaaccataatcagatatcacactagtaactaatatcagcatatttaaatttgttaccactggtactctaatgtgaatcattaccattatcatttacgttacatttcgtgaaccaaacagcacgagtatagactgattactgaacaattccaacaattcatcagccacagttcagaaaccctcataataataattttctcgccgcgacaaaccagtatgcaggctgtcatgggcatcatagggagcgagaggcaacaaccaggctgggataaggctagagaataagattgagacgagctgggataaggctagataataagattgagatgagagaattgtggagagttagttagtatcagataagtccaagaaagtaggagttagttgagagtttgtaggagaagttggttagccatagggctatttataagccgcatgacagcagggaataaatcaagcaagatcattatcaaaccaatctctctctctcttgcaatgaccctctcaagcgcctagggctgctaccctagaaccaagcctgcggcagaggggtataacctcgccggagaagacaactatccccatggaccgaagctatgacaccgcaggagtgaattgtaaggctagggttaaagaaaatcctctcatttgtactatgccaagcaaagcataggtctaaggtctggctctggccctggtcatgctcatgcaaatgcacagtatcctttactgatatgctagtaggttctttgtctgaatattctcaactatgactagtattctcactcaattctcagtcacaatgtgaaacttcttggaaaaacagaattattatactttgaaaccctaaatttttattgattctgtggaagtatcactaaaacaatacctatttatacccgtatttctaaggttctcaagtacactatactaaattgacacccatgacttgtctttttcacgcgtgtatcatgagaaattgtgtttg

SEQ ID NO: 16795 - DNA, 4097 bp, Arabidopsis thaliana landsberg
gaaactgcctcgatcacaagcctagagctacgcaaaacatctaagttcaattatatatgtgatcaaagattgaaacttgacatcagcacagaccacaccgtattctaaacaggagaaagaacaaaagacaatagaacagaaaaaacgcaacaactataaagatagcgaccagtgttatgaaataagatagggtcacttacactctcagagaacatgtcttgcaatgcagtagcaaggttcttatcttcactttcatcatccaaagaattgagaggtaaagactcagggatgggttcgctgatcgccttgtctttggattcttcaatcacagtttggtgtatataaccactatcatcaccatcagactcttgagcatcatcagatccaacacaagagatatgctttacgccagtagaacatataatgggactggaagcagagctgctctctgcatctttgaaatccaacccaccacaaacagagctcatatccaaaagtaactgcaacaaacacaaattcaaataccattaacaagagaactctagctcaaacaacactttagccaaaaaatcatatagccaaattacctcgttcacacaaaacgtcaaaacaaaaaccgaacgatcgatcaataacaagcttgttttcttcgattagcttactccgagctaggaaatgcgtgaaaacaaaccaaaccgaagagaaaattgaaaagatctgaagagatcggagaaacaaaaaaacagagaaattgttgtttaactaagattaccacgccaatcacacttttcaagaggtttcaaacgattagaactcaaaccagaatgataaggagtcaacgaaggaatcaaagacaggagaggaagaagcttagagggcaccgaaggcattcttatcttatgctcttcgaaaccctgttaccgtaaaaaagccctaattctccaattttcgaatcccagaaatcgcagagatctcagaaaactttgatccagaaagaaaaccaccacgaacgatagagctagatatacccaaaaaaacgaagccgtgaaacccttaaaattggatcatggaaagaaccagagaatcaaggagaaaaactatatccacaacgaatctcacgcttgaggaagacgataaagaaaagctaatttgagaaagaagaagaagacgaagaagaaatgaataattatgattgatgacgattttaaactagaatatccaacggtgatagatgtggcggcctacctttagatagatttatgactgtacacgtgtcccttatctttttagactttccttacgggccttgatattttccttttgggtctaatgggctgagaataatagactggaaataaactacaccaaaaaaatctacctaattattaggtcggtcttatcaatagcgtctcatgattcaacggcctgttggtgtagaagacgacgatataacaagtttctcttgtaataaaatccactaattagagaaatagcgtttagtctgttttgtcgatgtcacacacaaacgcaactctataccgcacttgatggatagaaattagtttataaatacctgatggagcaatttgcatattatccaaattccacggactcaaacgttaaataaaacaattataaatcactgaaaggaagaagaagaatcaaattcaaccatcaattttgaaccattagagtgatcatcaaacaattcacgaaactcaaaacatctaaacaaaccgagtctaaaccaaacacttaaccggaaatttacaggaaaaccctaactggtgaatttggtaaccgccttcgtgccttcagaaaccgcatgtttagcgagttctccaggcaacacaagtctcacagcggtttgaatctccctcgatgtaatcgtcggcttcttattgtacctagcgagctttgacgattcctgagcaagtttctcgaagatgtcattgatgaaactgttcataatccccatagctttcccagagattccaacatctggatgaacttgtttcagaaccttgaagatgtagatcttgtaagtctcgacgctcttcttcgatttcttcttcttcttatcgccgccggccccggcttccttcgggagtttcttgccggcttttggtttcttctccgccggagctttctcggcttttgatttctcctctactggtttctcggcggctggtttcttctccgcgggcttcttctctgctctcggcgccattgttttgacttttgttttacttttctgggtgaagaagaagaagcacagatctgagtgattttgatatctaatttgatgaagacgagttttgattttatagtagttagaataattgatatgattggttattagatgttgacgaggatcgatgagatgggagatcgcaaccgttgaaattttttttaatcgacggtttataaacttatgaagcgggatcgatgacgtgtcaatattggtttatgttttagcgcggtgttaaaatctccgttcccgctccactgtattgtaaatgggcttttattgggcttaaaattttaatatcagcctgatccaaagcagatctgattaatgtggtctatacaattatgaaaaaactaactaaacatatctgtgaagaaacagagtatagaatatatatactagtaggcttgcattaacagtttaacacaatatattttgctgtaaaactgaacctgattacaacttacaagctgatttaaaatgaatttgttgactaataatatgagacagctaaaatataaagaatttgttgtatttacataaacaagaagtaaaaaaattgtgcttggctatattgagcaatatgtgttaatactccagtttatggttcaaattatcttcagtggagagtagtaaaatctagaaactagctacattaggctactatatatgcatgatgtatgactattgactagaacatatatatttaatcatgggaacaatatataatccacaacattgtatatcaataatttagatttttggtgtgttttagcatggcattaaaagctaatccaaatctctttttcaggtattttaaatggaatgtttttcacataaatgaaaaactctatctaccttttcacataagtgaaaactgaaaacacaatcaacagccgcaaagcatcgaaagaaaaaaatcttataaacaaccatagcatcaccatcacacccaaaaaatttaacataaacatatctatatcgattcaaatatctttagtttgaaaaaatgcgaattggaaaaataaaaatgaaaccttgttaattgcaaacacaatcatagtaactgcaaacgactcttagctaagccctaaattcaaattttcatctccatatccattttctacattgatgctagctagatacgcttttacgggcagtaaagaaagatcattgtaataatcagagctacaaaggctatcataactgatagacataaataaatccccataatccaaacatggtggtcaccaagaacacaaaagataagaaaccaaataacataaccatctcttgacaaaccttagagtatgaaccaaacataaaggcaaatataaagccgccatgacataaatacatgccaacatgcatgctaaattacccatcataacaagaaacattaaaaacaattgttcatgaaaaatttccgcaaatttctgaaaatgagtttcttcggtatgagtttggaagtacatcccgatagcttcatcgttttaagagggtagattaggaggttttggagatgaatgaataagatgtttgtcgagaaatcagaaatcgggaaagtgatgagaaagtgatgtagtgttaccttatatcggacttttaaatgatttaataactttgttgttttgtcttttgagatgatataatcttaatgagattagcttctaataaatcttatcatctacgatgatgtataactataacatgagtggctcgcttcattttaatttagttttggtgttgattattaatgctgagactttttctcattttatctggtcttcgatcatcaaattaacacatttgtaatcgaaattaaactttagtaattgcaagtata

SEQ ID NO: 16796 - DNA, 418 bp, Arabidopsis thaliana landsberg
aattcgtccagactggtttaggctgtggagcactgtgcgtagtggctggtcagtgaagactactatggaatgtgactggaagtaaggtcggagtttctgagctgccgttatcacccctaatgccaacttttaaaaggtcggatacctagtctcggcgtcattcagggctttactggtgtagaagataggtttttcgttaccgcgatcatctcttaccagtactccgctcaccgccgaacttgacaccgagatgtagagatacagggtttctctgacctcaggtttggctaagatcgccccgctcatgaggtaggatttgagctcttggaaggcgttttcgcatttgtcgtcctagtggaaatccttctttcgctgcttcttctcgattacgtaacacgtcagtgagaccttctggtta

SEQ ID NO: 16797 - DNA, 3039 bp, Arabidopsis thaliana landsberg
gcaatggatagttggggtgattgggttgctaacaatgtttatcttaacaaaaagcgagttttcttcggggcaaggtctcctacacatcaatggtaacaaaaatacttatcccctgttctccatcaatatgattgattctactctctttattattttcgcattaaaaccgagctgttgtaactggtcaggagccgagaatggaacccgggaagcgaaggaaactgctacggggagaagaaaccaatataggaagagagttattggggaagtgggtcggacattccgacaatgaggatggtgaagagagttttggagagattgggaccaaaggtctcagttataaacatcactcagttgtctgagtatcgaaaagatggtcatccatcggtgtaccggaaattctgggaacctctaaatgaagaccggttgaaaaacccggcatcgtattctgactgtactcattggtgtgtacctggagttcctgatgtctggaatcaattgcttttccattttttgtgaaaatgaaatgaatataaccttaccttgatggccgaatatcacccataaattatataacggggtgattttagctagctataaggatccaaatttgttacatcccttgcctatagtcaggcgtcatgagcttaacttagcaaaatgtaaagattttttattttgtacgaaattgatgtagcaaaatgggctttaatagatacaatcagcagagggctagatttataaacaaaaacttaagagaaatggtgttgtgaaaaaaaaaaaaagagaagaggtggtgtatgatttatcttcagcatgaaggtgatttacaagcaccgattataaataggactctttgccgaagttcatggatgacctgaaaattgagcaaaccaagaaggcttaatacaatagaacaatctttttgaaccgaatacttatagaaagaggaagtcgacgagaacgaacggatttggaagaatagagcttagcccatgtttggatatgggcactgcgggttttaaggtgagaagagtaggcagcttctgcgtttatgaagtagactgagttctctgttgtctcagcaacccacatttcgtttgtcgcatcctttgctcttttaattagattgcaaaatccgacctgccaaaaattaagcccacaaagcatatatttttcaaacaataatttctcggtgcatattctctcagtgtaaaactagacaaatattagaatttgtacataccacggatccaaccaaattatggctgatgtgggaaacagagctatcatccatgaatggggtgctgaagcttatagcaagaagactgtttgagatttcccctgaatgttgtgtggatccatctgtcacaaacacccactgcttcttttgtagaacatctgtgtatgcatctccaacatatacaacgtacgcagcgatatcaaattcactgaaggacataattagagatgatagagtatagattagcaaagtgcggtaaatagtgttttataaaaagcttggactactgagattaaccttgacagaggaatttcaccaagatttgacaaagagattggtttacgagggttgaaaaaaggcctgaaaacatcatcagggaaattgaacaaattaatgagatagattccagtgtctactaaagaaaaccacttactgaaaattttcagaatcttttggagacaaaggctgccatcttgagcttgaccctctggcatgtaagtaaagtgtttctgaatctgagttcattggtactagccctttcattatgtatattttcccctccgtcagctcggttctctgtcacagtagtagacaatgataactgttttaagaatctacaagaaaaaagttgaacaagctaatcgatgatgctcttaatgcaaaagtacagtgatggtaacgattttttgatatgcatttcagtccattcgaggtccacagcaactctgacgagcttatatttggaactccccgttccatataagctcatatggataaggttcgtgtaaacttattagccattagaaaaatgccttattttaaattgtgcatgaaacattcagatttaggcatttgaatgtacctgtctctccgtgggatcccagattgttacaatgccttcttttggattgtgctctccttcataacttaagctcgtcaggccaacaagcctaatcctcatgaacggggtgacgttcctttcacctaaaccagcgtcttccagagtttctgccactgatttttccttccgcatttgcttggctgcctgaggtttagattgaagcagttaattactgtaatcaatatatcaagaaaaggaaattactattctacctcaaattttgctttatatgtagtgaaagatctcaactgctctgggctcatttctgccataagaaattcaggttcagcagccgtctctaacagcttaaagatcttggctccttcttcgctgtcagtatcgttctggctgtgaacaccattaattcctctctggtactcacacataataccctcaacaagagctgagcgcctacggaaaatagaaaaagaaagaaagaaaagtatgaatgagaataaaccatgaggaactgcaatctttggctcttctgttggcaaaaccatccatattcagaaggccagaagcttttctaataaatacaaagattctttgtctgtcccaaaaactacttagaaccctaatattggtgtatgtaacaaatgtctctagctttgatgagttaatctgacacttcttagaaagtgatgtgctaaattgatcacataaatgttactaaaaattgctactctacagttataaggaaacttgcctctgattatgcagctgtataattctactttctattctctctgatcgaactattgacttcttttcacctaacctgtatacatcaagaaaatataatgctttgcgagaagtataaggaagaccaaagtgcattaacaggcacacatttatattgacctttccttgtacaggatggggtatattcgtg

SEQ ID NO: 16798 - DNA, 840 bp, Arabidopsis thaliana landsberg
taaagttgtttacaattctaaaggaatggtttaattgaacttacaaacatgcaacgtgaatttgatatctcctacaaggtggatataggtcctgtaggcataatcattgatttgtttatgggtcttagaaaacttaaggacgtaagttaaggaattaacttagattccaagtatgcaatattttgtatttagcaactaactaaaacttcatttttcttcaatcgtttttacagggaatgtacatggtccctaagccaaaagatggagcaccaaaacatgcccttacaatcgtagcttatgggatgactaaagaagatgagttgctttttgttgtgcaaaacacatggggtaccatttggggagttaatggcgaaggtaggatgatcatcactgacacttgtcatatgttttatctagatgaagtgattgacgacaaaaagaagaagggaaaggctcctatagcttagttctttaggaaactattttttaaaatttgaaaattgcaatgactattttgtcttaaatcatatttcccattcttaaatcaagtactcttttggaacatatttgcaactgttttttaagaaacatactcttgattatccaaatgaaattcaaatgccatcgatcatcaccaagttgataatcaaacaacttatattatacaatgaccacattatattctttttatttgtctttaacaccaataatcatattatcaaacaacatagctatgagtgaagcagttgattctttactatcatatcaatatatgtatgtatatctatatatatatatatatatatgtataaaagagacatagttcactatccattaaac

SEQ ID NO: 16799 - DNA, 1818 bp, Arabidopsis thaliana landsberg
gcctttgttttctgaaacatgggctataaacattttagaccatggttcattctacagaaggtcaaaccctctgtcgctatcagaggctattgaatattttgctggtaaggtctcaattctcatcatccttcacctgcctatgaatcttccttgttaaccgtaacctaatattgattgacttctaatcaaagtaatttaatctaccatttcatcatttcctctaatctgaccctttttcatataaaatgtatctaatagtaactttataagaaaaatattatacctttttcttggtatctttgttgtacaaaaaaatacaaattaaatgcgagttcgattattgcattaatagagatagacccatctggcatttaatatggtggcggctgaataatcgctaacaaggtattagttgaaaattttcaaatcattcggatagattatgtctggcattgaactaattatcctctataaattcaataatgacagaatttagtagatgttctaaatactaaaattatttaataatcttacatatgcaattttccatgtacgtgttttggtctttggagcgtttaaaccgaattaaagtactactgtataagtttgggtaaataaattgaaccgaatttaccgaaccaaaattaagaaaaaaactaaaccgaatcagaccaaaaattggaaactaatcgaatgaatattaaattttataaccgaaatatttgaaataaaaccgaataaatacaaaccaaaatattttacccaaaatatctaaatataaatatattttcaaaagtgttaattatttctagactaaataactaaaaatacttgaaaatataaataaaatagtaaaaatatttaaaaatattcaaaataaccgaaatattttaaataaaataaccaaatgaatactaaattttaaaatcgaaaccgaacagaactttcaaataaccgaatggatactaaactttaaaaccgaaaaaatcgataacggaatggataactgaacgccgagaactactcttatatacgaagtatttagttattcaataaaatttgaaaccaatcgttttttttcaaaattaataattatcgaatttaaatctaaggaataaaaaagcttattacaaatcattagacaaaatgtaataaaaaaaggaaattatacacatttattatcttagcttgtcgggtttaaattttgttaattagagaaacgtcaagttgtacagctggcgtcaataaatatccaaaacagtcgtctttttcatatcgaagaagaaaaagttgaaaaaattgtaaagtcagtctctccgattcttccttccttccgtgttcaccattgctacacgttctccacgaactttccgatgcccagtcgtcggagacatagctacaccgtcggatctcctgcaaccacatcttccaattacagtaacactactttcaccgatcgttccttcccgacaacccctgcccgtacatccaccgacacaaccacctccatcgctcgtcgcatctccggtatcttcatcaactgcttcactcctcccgattccgtttcctccaaatacatcgacaattcaaagtcctcttccggtatagtttgatcagtaattcttagattttagacttttagtggaaacagttgatgatgattttatttggtctctgtgtgagcagacaataatatccgtagtagacgtagctcaacaggaagtagtagtgtacagaggagttatggaaatgcaaacgcaacagagcatacaagattcactttcgatgaaatctacgacgctactaagaacttctctc

SEQ ID NO: 16800 - DNA, 1234 bp, Arabidopsis thaliana landsberg
catacgtctaattgtgcatttggattgaatatggtagtcattactccaaaacagttagcaatttagcaaattgatcggctccttttttaggagactagttccctaaccagcaatagaaaagtatttccctgcttcattgcttctaaatatttattaacttaatatatactaattcatctttagagttgtttcgtttaaaaaaatgattgtgctgatttaataataataataataaaaaaaaaaatctctaacaagtctttgagaatgtatccaactccagtaaaaaaaaacataagattatgagaatttggtgaaaactttaattaaaaatgaagaaagaaaaattatgtcttagttatattagtactttatatttaatcgtttatttagttacggaattattttattttaaatttttttggaaaggctcgtaatctcaacttcgcattaagcgaagtcttggaaccctgggaacctcggtgcttagcactgacaacagtgaccacatctactacagattctagcactcgttgtacaagttaaagccttcagtatctccactgtaagatttggatgattgttggcgaataccttgaactcaacagaagtagaaatcgcacctaaattagttatgatattagtgaaagcggaatcatgaaaccacttataggtgggccagtggtaggagagatttcgggctgagggtgaaattcccaataatcccgggttcgaatccccacggctgcaaacaccttaagtgaccaccgcagacaatttaaaatcgggctatgcggcctccaggaactactcttgccgccttcgggacgcacgcagtgggctagtctgggtccattgggcttgggatacctgggttatccaaaaaaaaaaaaaaaaaaaaaaggaaagcggaatcatgaagggctttgtcaaaagggatttgggcgagctcaaggatgtcaagagcatttgaagatttaagagatgatataagctcgattctgcataggtctcgtagatgcggaatctcgtatttgtcccccgcaatatagagtgacctaacgtgttgcttctcttttgcagaaagcatagagccgtcgctgtatatgaattcaatgaaagcctctaattcttcgtgtttcatctcacagagagtgattgtctctagttgagccgaagccttgatctcgtctgactccaccatcttcttaaacacctctgatcttgcagactaata

SEQ ID NO: 16801 - DNA, 782 bp, Arabidopsis thaliana landsberg
  unsure (1)..(782): unsure at all n locations
gtaacacactagtaaacgccaaaacccgttatccaacaatagaaaattggcactagctgtcattatgtcagctcgtaaacaaagactgtacttccaattgcaccccatagtggtgatgacatcccaaccaatccaaaccattttgcaccatcccactcaatcaggaggtctcgctaaatgggccatagaactgagcgaatacgatatagagtatcgtaccaggactagcttgaaagcgcatgtcctggccgacttcgtaatcaagctcctgttagtggacctggaccgaaccaacatcaataagaaatggctcctcctcgtcgacggctcctcaaatcgacaaggatccggagtcagaatacaactcacctccatcactggagaggtcattgaacaatcattccgacttggatttaatgcattgaacaacgaatcagaatatgaagccctcctctctggcataaagctagctcaaggaatggggatccgtgaatacgaggctaaagacgaatgcatggaagcgtacctcgaacttgtcaaaacgctgtccaaacaattcgaatcgttcgagctgactaggatccctagggnangagatctcacttccacttcagatccttttgtcaaacaaataatcacagtcgaaagaatagaacacccgagcgttaacttaacggttaaacacgctgggacagaacctcggcaacgtgcaattttaccagcgtttccggcccttcatggtatgcacctagatgcaagagataagacctcatgagagcatg

SEQ ID NO: 16802 - DNA, 574 bp, Arabidopsis thaliana landsberg
tgcatgctgccgagggagtatagagtcacatgggtcaattgaccctggtgaaatttaaaaaattagctgaagttttatttaatatgttagattgactctaatcaaataagaaaattgacccctataaaacaatttacttgagaagacttctaatagttaagcccaacaactatattgtatttaggtaattgtacttgtatatagaattcacctcaataatattttgttttaaaagtaaatatactataattaagcccattaatatactttaacctattatttaacattatttgtattctaaaaacgttatagtttcttttttcttattttttttctttgtttcaatcttcaatcttgagtttataacttatgcggttttagaaagaatttttttttgaccccgatggatcgttacgctggctccgccacgtgccagacaatccctacttctttagattccaagattacaatatttgtaaacccggtaatttacaacagctctcttattgacatttttttccgttaatattttctaaatacaaattgggaattttaccaccaaaaccaaaaacca

SEQ ID NO: 16803 - DNA, 977 bp, Arabidopsis thaliana landsberg
gatgggcttgattactggggcagatctttgattcggcccatacattatgcagtgcaaatcctaacacctgagccatgaactacatacgtttgccaagttgggaaaattcatttcaaaaccctaacacctgagccatgagcgacgatgaagagccaccgctgaagaagaataagctgccagtagaagaaccaaccttgattccttcacttccagaggagttgatattgagtatcttagcccgcgtctcgagattgtcttatcgatctctctccttagtctgcaagcgcttccactcgctccttacttcaggagagatttaccggttccggtcactatcaggttataccgagaattgtctctatgtgtgcttacgtttctctcatactggccgtagccatcgctggttcatgcttcgtgagaagaacaagtcaagtgggtatgttttggcaccaatcccaatttcccattctccttctttgcacgcgtcgagtatcgtggcggttggttctaaaatctacaaaattggcggagtcatggatggatctagtgtttcaatcctagactgctggtctcacaggtggctcgaagctccaagcatgcagatggaacgggaccgcccatcagccaatttaattgatggaaagatatacgtaacaggaggctgtcacagaggctcctacaatccatcaaagtggatggaggttttcgatctaaaaaccgaaacttgggagcctgtattgtgccgttcagatagattgacgttcgagagttatcatgaacgaactaataacttattggttgatggaaagctatacattttttggtctgataagggtgtggtttacaaatcccaaggatgatacatgggatagtttagacgtaccggagatggatatgtgtttgacattgttttattgttgggtgaataaaaacgggctttatgattttttttacgaagaacttggatttcaaatggt

SEQ ID NO: 16804 - DNA, 3828 bp, Arabidopsis thaliana landsberg
  unsure (1)..(3828): unsure at all n locations
aagcgtcaggtctaaggaattatcttgggagatagataaattgtagatctagcttatataaggattgttatcgcaccgttctcgaactcaaactatgattctagagtaaccggtggtgttccgcaagactctctatacttagagctaagataaccggagaagccgagaaatcctatcctaaagcatgcattgttttcaagcttgattagttcacctagtatctaaaccagaacccttctatgagcctacctgttctttcttaaatgcctaggctcatttatgatagttcaaacaacaagtacctatggtgggaatacctattatctaatatcaagttattggtgatcaatttaaaactagcaataagaataatcaagatggagaactctaagaataatcctaaggggttttcgatctactaatccatctaaatccctattaactccttaaacccgacaatgtgattactcagacatgataacagaaacacaaatcataatctgaatagtttgcattgatgaattaagaataatagtaaaggagttcagaatcctctctaaaaggattggattcttctctcaaaaatgtgtcacaagaactaaaacaaaacttaggtctaacaatgaccaaacaattaggtatattcgtgactaaaaacgtgcatggactactttacaaataaggaagacttcagggcttctcaaagacttggtagaaaacgagaattcccttgacagcaataagagtgtcaatcaacacaagtgtggtgtcgatcgacaccagcttctgaaaaacgtccttcaagatcttcgttgctgaaaagctttcaaaattccttattgtgctccatagttcccaaatgtgtaagtgtacctgaaatgactcaaaacctatgaaaaagactagaaacactctagaaaccattatgaaactatgttagaaatcagtaaaagccaggacataacaactcccccagacttagcttttgcttgccctcaagcaaaacaaaaggttgaatctgtgaaagaggtttgaaaaacatagaaactcccaatctctctagtttattaccttgatcatacaaaccaaatccatgcactaaatagttctaatcaaatcctgatcaccatgtaattctccgctagtccacacaacatcctagattccataccaaagcactcaactatatctactaggccatcatcactgggtctcatcaataaagtaaatgcttaagaactttttagactcattcatgtactataccatgatatatcgaccattctttatatattttttctttggtgttctttctctcccccagacttattctttttttagagagtaaacaaaggggaactcgcatactggatcgacaccctcggcagttttccaacctttgtaattgatcattccaaataatgtataataatggggtcataagaaacattcctacccttatacactattcgaaaattctatcaatctctcatatttttattatatatttttttataaggggagaggaatacttttttttatcacattagccgacttatcaggtatgaacaagcagtcaagtcctatgaacactaaccgttttgatgaggtaaaaggaagagcaatgagattagctccagcctctgtggattatgttgggaatggatgtccttaagtttgttgattggctttctggattttccattagtcgaattgatttgaatctgcagtacttaaaccatccaggcaataaactcgagagatagatcataatttcagacaaaagttttaactcaataaacgactatctaagttagaatgacgcaactgactcataagaagagaaaagatgaagttagtaactgactcccccagacttagataacactgtccccagagttattaagctagaggaatcgaaagaaaaataatcaaaagttaaaagttagagaaacgtgagttgccacctgagagtggtgtcgatcgataccatgttggtgtcgatcgataccatgttggtgtcgatcgacactctggtcgtttcgcttacctttgtgaattctgctcattgttgtagacccttggttagtgttttcacatggatccttcagttagactgttaaatcactaaaacacacatcaatagttccaacaaagcataggaaaataagtgcaacaagtttcaaaaacaaataaccaatagtctgaaatgaaccaaaacaaagtcagaaaacaaagcaagataaggaggatggctagtcctcatgctctaagccagaggtgggtgcggaagagcgaggacgacgacgagtgggagcaacacccccgcagcgagaaagtgaagctatggcgttccagacgctcttgaaactgtcgacgacgtactgttgaaagacctgtagctccatcaggatgggtggaggagnnnnnnnnnnnnnnnnnngagcggaagaggaagatccaactctcggacccccagcaaggtcaacgacctcgtcctcggtatgtgtaggcgcagatccggaagttgcacctctctgtcacctggtgcgtggtgcggcatgtagaagggaaggatcaggatgaaagcctgtctcctcatgctctcctgtaatctctgtaagtgcgaggtaacttaatcatatgctgccatgtatcttctctgaaacaccacagtaagttgcctttaagccagtgagagttcttcaggtaagtctcatcaatagtgaatcgcgtggtgttgacctcttctccctcaaagatgatccggaaatgctcaaatacaggagtgagaaggctgccaactctctctaatttcttccctctacctgtaaagggcttggtcttgagtgagaccaagtgatgagcaaacacagcgccaaagttgacatcgcggtcaacctcctcaaatcctaagctgtctggaaagaagtcatgaacaacatgatagagcaacaacagctcagagagtctcatctttccaggctccatcttgcaaaacagtgtgctactaatcagcctaaccaagtatcttagaacaaggtgacgaatctctgaatgtactgcgtccttggaatcataaattccattgctaaatctgctccagaagatctgagcatctttaaactgtccaggcagagcaactccagtgagatcattgtcaaaaccatagatgtcacataactctctcagtggtagactgtatcttacaccgcgaacgaagaagataagggctccttcctgaacattgagtttcctgtcattcacataatagaccctaacagaagccatgaattgtctaactagctcaggatacagatcgtactacctagaacagatggttccaaacctatatcatctagcaatcctaaaacagatttctccatctgcaaaccctgcatcaaaccaaaattcgtaacccgagtaggcaaaatttctacactcatccaggcattatagaacaaagtgtcataatcatcccaatatggggaaaaagggcgattgatatagtcacctttagtgaattatgtgttgacatctttctcccaaaccctttgagaaggaattctctcttttggaagctttggccaagaaaattgataaacaggaggttgaggggctgcagcttgtggttgcggttgggaagggcggagatcggcggcggtggagaagcttatcggtggaggaggaggatggaggaaagctctttcttgccttctttttctgcccagtcatcttgcagattgatagaattgatacttggggaagatagaggatggaattttgatgagtttagagcctgaaaacacaagaaacggtgaagaatcg

SEQ ID NO: 16805 - DNA, 989 bp, Arabidopsis thaliana landsberg
aatacaatccaattttgcaattcaaatacaatccaattttgcaatacaaatacaatttaattatataaactccatcttattgttagtttttctcttttaattaagaaaattataagtgaattttttttaatataaaaatataaattagtatatgtaaatatgtttatttctttttaaaaaaaaaatattttcttgacacatgtcaacatctcaatgatagacctgaaacgtcttatgatctcgtgagttaataattttcaaaaccttactttatataataagatatatatatatatatatatatatatatatatatataacaaacaaaaaatcagtttcagtaatatggaactgtaactgtgtcaagaagcctgatttctctctcttttctatttttaatatctttcagagagagaaagcatcaaaacagatcattgccgtccggtacgaaattcggtattacgtccgacatattccggcttataaaacgatatttggtcggctttacatctagcatcgattggcttttctagcgacgatggctagctttcgtttacctctgagccccggcgttgtccggtttatctcgcttatggtacgactatccttctgttttgtttttggttttgttcattcggtgtgtccaacttggattcagatgtagacaagataattctggtgatgtttggcatgaacataaaacagaaaagtctagagaagaagatcaagtagagtttatgcgtttatctagatcatgtccacctgatttttgttttcttcaaattaacgatggagatcttcatctatttggaaatcagatttagatccaccgatattttgatgttgatttaaagaagagacaaaaatatggtgaaattgaaggtgttgagttttgcttggtgaagcatgacggtttacttatatagtttgttctctagatctagtcttagtttaagttttcttcactaattcaagatgaacttgggaag

SEQ ID NO: 16806 - DNA, 1113 bp, Arabidopsis thaliana landsberg
gtccagatttcatctatatatcccttctctctctctctcctttatataaccgactgaatcgttcacctctttgcaacattacacacagttcaagaaagagatcgatgtcgaccttggaatctccattagaggcgttggcgtttgaatacgctagcttcggtgttttcgcgcgtcgcaacaacgtctggacatggatcgccgtcgtgactgccgccgtcagcttctggaggatcagagtcacaaccatcggagtcggagacggccatgcatgtgtcttgatagaagaattaaccggttctaaatctgaaaacgaatccggtcgtctcgaaccaaaatcaataaccggtccggtcaaagaaacggttgcacgagtgaaggaaacggttacgaaaacggagccgttaatatgcgatgacggagtgacaaaggggaagctgacgatgtactacgaggtagacgttgacgttgacggtgggaggtgtgttaacggagatttaacggcagttagctacggaggaggtttgggtaattgtggcggggattggtgggagaaatgggatggagtggtgaggatgagaaatggtgatgacagttggtaccgttacgtggatttaacggtgattaatggaaatgtggtaaggttatgggacgacaacaaaacactagtaacggcggcatgtgtctaaattagacaagtttcatatttcggaaagtttttaaatctagagaaactttcttgctttaaagttttttttttttttggttgattaagttgtaatttgtaaataattttcacacaagagaccaagaaggaacgcttgaacaagaagaaaaccaatatcatcaattggtgttgattcccagctatttctagtccaactttgtaggtaacacttccattgcgatgatgaattcgtgacaaggggtcaactatttgaacacaaaaaacaagtacgttttcttgttaaggcccatctaaaattgactacacacatttacttttaggcccattttaaacttgactgtagcctgtaggcatatatttgttcgtattgctccatgcctcaaccccgcaaaatccacgaagggatcctctagagtcgacctgcagca

SEQ ID NO: 16807 - DNA, 2135 bp, Arabidopsis thaliana landsberg
acagagtcaagtatggtcttccagcacggtgatgtggtgacaaagccggatatgatcgctgcgacgcctcctcctcgactgagaaccattccgatgggacaccaaaatcgatcttaagactgtaggaataaactatttcatctgttctacacctggtcactgcagtctcaatggcggcatgaagctagccgttaatgtcgtagccggttctgcggacctccggccactcccacgccaccttcttcaactccggaactcctaccacaccggaatcacctccgtctggcggatcacccacacccaccacacccacacctggtgcaggttcaacttctcctcctcctccaccaaaggcaagtggtgcgtctaagggagtgatgagttacgttttggtgggagtctcgatggttttgggttatggtttgtggatgtaattggtttagagagccagggtggagtcagtgcttttgcctttttaaattattttggtttttggttgtaagagaatttgggtttgtgtgccacgtcagaagctcttcattattcgtaggatttttattatctcggcatttgattatcgttatcatcatcatcatcacattcacttattctcttgttgtaataaattatactattaattttcattttcgttcatgtggaaccactccatcgttcgtaattatcatctgttctcttcttcatattcgtttttaatttatcggttttggaatcacatgtacagttgttttccacaccatcccttcgtattttacatatatagtatgttatcaagaatgaatcacgtacaacaacaactaagagatatgatcaattcctgaaagaaatgatttctagcaatgtgttcaaactctagttgttgctatgggttaaaagatcacataaacaaatgcaacttgggataggtagtattcgattagctgtagctagcttttaaattaaaaactcttatcttatatttttctatttagattggttgtatatttgaagaattctggaccgaactcatctctccataagagtcaaaaccttatattgacgcaaacttaactaccctttatatatgatagaacttaagttatatatgataatatgaagataagtttctctaattttcttataaatagtattgtcaaagactttttatttgacccatgaccatgagtaccttgtcaataacacatgagcaatgccaatggaatttgaccctaatcaggagtgtcctttacggacataactcaaaaataattaagaagaggggacctttcagacattcccttaattaagcttaatttctcattagtcgttctcatgcctctttgttatataaaccatcaccgtcaccattatttcctcctcttcacatctttaatttaaaatagctctccacgttcaaaacctaaagatggcaacgaatggtcttttccttgttatgggcttcatggctatcgccccaggcccagctgcaggcctgcagtctctatgacttaattagaggctaatcaatgggccagttgcgtggactacacagattgggttgcgggaaagactttcagggttggtattataacttatcgtacaagaaaactctgtttcgttttaggtaagtggctaatgttaatctttgaaacagagttcaagtacggtggatgtggatgtggttgacaaagccacatatgaatggagacggctcatccgcgacagagaaccattccgatggagacaccaaagttgatctgacgacagtaggaccaaactatttcatctgtcctacacccggtcactgtctaggtgacattacggtcgtagcctctcctttctctcctccaccccagactcgcagccgtctgatggaacacatgaagctgattcagggtcaaccacgccatcaaatgatgcatcaagcggactaatagtaataagctacgtggtggactggtggtcgggatgtcgttggtgttggcttgcaatgtatggattatcaaggtgtgtgtgaattgatgtgtgagccactgatcagcccttcgtattcgacatgattattgtgcttaactgaatttaataacagattagtgagagcgctaatcagttttctgatacatcaaattatcaattag

SEQ ID NO: 16808 - DNA, 836 bp, Arabidopsis thaliana landsberg
  unsure (1)..(836): unsure at all n locations
cgaattcgtctcctctagaacattgacaaaccgttgcgcttccaaagactctttccaattttggaagtattattacgagaaactttggaatttgtgctccaattgcggcatactatcccatgaagttgttgaccggaggatgatgatgatgatgaagacttggagatcaatcccaaagaaacaaaggccaatcctcccgaggataactaagacccaaaagaaaaacatgtcacggaatgcagacatgaagaagatactcaggcttttccaaagaagaggaaaatggaggcttcttcctaaggagagcatatcacggtctgtccgcttgtgtgttgtgagatgaaagtgggttatgcgatagagaatacagagcacaagatggtgaagcggcaacgaagatagtcttaagtttnnnnnnnnnnnnnnnnnnnnnnnnnnnnnnnnnnnnnnnnagcacaatcgtcaacaacaacagggagttccactctgactaccccaataaccaaccgagaatgaacggtgggcagaagccaccatagccgcaatgaatacatccttttggaattgtcggggcttaaaagggtccttggcagtttgacgcctaaaagggattaagacaactttcttcataaactaactctttttgcttgagacaaagaatcctgatgatgtcgttagagatgttgcagctatgttgggatatgatcaagtgaagtgtgtttctccgttgggaatagtggtagtttagtgtttatgtggaagaaatttgttttgttggtttttatgatgttgatgcgagactcattgattgtaagatgagtaatcaagatgtgtct

SEQ ID NO: 16809 - DNA, 560 bp, Arabidopsis thaliana landsberg
ctaaaacacagattcaaacaaaaagcaagcattgttttcatatcacaaaggatcaatcaaactacactttttcttgagacgtagattctaatcctacacaatccaccttcctagttttaaacagctgataagatcttacattctaacaatacggtaccgcgccaaaacacagattcgaaccaaaaacaaactgcacatacggataaagaaaggttaaatcaaattgcattttaactgaaaacagagattccaaaatccatcttcttagttacaaacaactaatcaaacaattctgagccaaaaacaaagtcaagaaacgagctttaaacaatccaccttcctagttttaaacagctgataagattttacattctatcgatacggtaccgcgccaaaacacagattcgaacaaaaaaaaactttcggggatcttacatcctaacgatacagtaccaagctttaaacaatccacctttctagttttaaacacagattcgaaaaaaggttcaatcaaaatgcatttcaacccaaaacagagattccagtccctccacaatcta

SEQ ID NO: 16810 - DNA, 976 bp, Arabidopsis thaliana landsberg
attaatcaaggcttcttactgttgggcctattataattggcctgaattcggcccagataggggaaacgggatcttatatctttatcaactaatttaatttcaaaaagattttattctattttatcgtacatagtttgcataatatggttagatttcaaattttatatggaagcaactaattttggcagataattggattcataagaatagaataaaatctctatatatttatctatactattaaaagacatcctagaaaatagtataatacaatgtatttcacccattatgcacatcattttgcaatattaccttaaacaaaggctaaaaattacaacaacccccaaaatgataaaacttatataagaatctcatgattgatgctgtcggagaagaagaaaaacatagaaacagatccaaagttgagacactcttgttttttatatggattcctctccatcagaagtaaagattatctcaaaatgcttcgtcaaacccaaaaccatacctgaaaaatggaaagagccataccatttttcaccaatggatcatgtaatactctcaatccattacatccaaaagggtcttctctttctcaaaccatcgatttctgaatctgtcacaccaaaagagttcatggagactttgctgcagaagcttaaagactctctagccatagcacttgtccatttctatccgcttgcaggtcgcatctcgactttgaaaaccaacgactcaagatctcactcggtgtttgtggattgtaataacagtcctgctggatttatccatgctgaatcagatctaagtgtatcagacattcttggttccaaatatgttcctttggttgttcaatctttctttgaccatcacaaagcattgagtcgtgatggtgacaccatgactctcttatcagtcaaggtacactttcttcatcttgctatatcatattattcaaatatgtcagcacatttgt

SEQ ID NO: 16811 - DNA, 1689 bp, Arabidopsis thaliana landsberg
ggttgtcaatccacactaaccaagcttcgtttttgtcaatgttgaaggacgactagtcgcccacaagatatcagataccagataaagcaaatcttggttttcagttagtccctgagcggctcgtttggttgctgagatagcgaccaaagatcggcatcatatgtgcccagatcaataagcattgagtattgcttgagaaaaagtgtcgaaagttgctggaaactatcaacagaatttccttcaagtctcgagaaccaatctaaagcctgtcctttcaagtgttcgacgaacagataacagagaccaccgtctctctcctccggcttgaacttggctcgggccacagaaatttttgtgttagaggtcttgcgagtgaatggcatgttgtgggagtcttctagaatgcggtcaaatgtttgaaacggagaagactgcgttgtgtatctgtgatcttacgagcttcatctcgttttctgccttggctagggagagcttgatggcgcttatttcctgttctctggcgtattcctcagcccacctaacgttctcttccgaatctttatcatctgagacctcgatctgatcagccttggcaatttctgctcagggaggagggagctgcggatcgtttccctttgctcgattcgtttctcgatttcccaagattgccggttcggttcgatctcttccaatttccggtgcggttcggcggatgggccttgtagtattgctaggcgtgtggaacacgagcctttttgggttgagatctgctgctgttcgtcgatcctgaagatgcctcgcgccgaaacgggtagtcctgatctgtccttgggaggtagctgcttcgagttgttgtgccaaagatcgatttgcttgttcttgatcattcacctttttctgaagttgagccatcatacttcttagttctgctagggccgcgagagcggcggcttcaggaacgtctgtctggtttggagggatcgggtttccctctccgtcaactgtgttaccaggaatctgattgttgaccatagtggtttgggtggttggttctgtgttctaggagtaagagaaatctcaaattcttctccttctagcgcctaatagtgatagtcaaaacggacacaggggaaattgtatttagggtttcttcaaagaatggatctttgtgagattctcaaagaacaacaaaattattgattaccgcggaccctgttcttgattttattattgagataatgataattttatcgtacaagtgtttagaaatatataaattaggtgttttgccttcaaagtcagagcgtttttgatagcctgaagttgggagcgtttttgtgtgtgtcccctttctttgttctttgcggcgctttatatagggctctggcaaaccgcctctcacggtattctcgggagatttctctttatctaaatggagattttccttattcttcgggagcttcggagaaatcttccagatttgacgatatcctcggagattctctaatatcgtctccggtcttttcaataatcaggttttgatccttcgcctggtttgcacaagtattctccttgggcgaacatgtggtattcggcttggactaacagttgttctgtccgggccgagtttataaagcaaacgaaatgtactcgcatcaggttcggatgtgttatctggtttaacagccg

SEQ ID NO: 16812 - DNA, 1673 bp, Arabidopsis thaliana landsberg
  unsure (1)..(1673): unsure at all n locations
ccggtttgactttgctcctcatgagtttcttgagagagatgagctcttgagtctttgaacttggcgggcttgagatgtggatgtagcagccaacatttgtctttggtgtggcccttcttcttacaatgatcacaagtcaacagttttctatcctcattcttgtacacacctttgttcgccactacttctcctttgttagccgtgatgagttcactttttccaccaaatagcccggttgatccttgctctttctgaatcttagagcacacctcatcaagacttggtaacttctccgatctaagcaagtgtttaattaggtcattgtaccctggatttaaggtgagaaggagtccaaacaccttgtcttgctcacgcctttcgtggagaatcttccggtcaagcgttcctggcctcaagctctcaagttcagaccataaggacctgaacttaccaaagtgtttagtaaactctaagtcttcttttcttagttcgttaatcgccttcttgacttgaaacacgcgggtcagattcgattcgttcccatacacgtttttaagtgtatcccacaactcttttgctgtctcacagtaagagtatccctctagaatagaggtttcaagagagttttgaagaagagcaaggacggcttgatcctcttggaaccatttttcttcctcgggagatatagtctccgtttcttcttcgtctccttcttctttggcttcttttggagcttgagatgagattacatggctccaaagcccacgaccacacaacaccgtttttgttgttcttgaccaagttaggtagtttcccccttgaagtatcaccgtagtaatcaccttttgagaagtctccatgattcaagtacaaacggactgatgaataaagctattatctgttggctaaaagagatgaagctagagaatgatgaatagatttcgagaaaatgaagaataaaatgagaatagaagatttataagcataaggacatgatcttatgctctgataccatgaaagaatatgcggaattgtattaaagagtaagagagttatgaagaacaagagagtttgtatatgagagaaaatgagaccaaatcatgttgatagaattagatagtaacctttgtgtgtttacaatgcttttaaagacacacaaagggaatatggccgtttacaattaacgtaagactgaaagagacataagagaagaggttccttggtcttgatgatgagagcgactgatccttggttgaccatgttgctaaagacactcgtgagtcctcttcaacggctacaagagatatttgtgtgccttcacttcttctagaagctcttcatagacttctcatatgttcggcccactctcttgtagcacatatccaatactaggcctttctccttatttgaatcttgatcaatacctctaaccaccagatagagaatggatgctacagtgacaaccattgattctcaacgactggccttttctccacacaccagcagaagccacttgacttcttcagtggttactaccaataatccttgcaagaacaattaccatccttaaaatggtggaaccgattagtatctctcacaatgatttctctcccaaccacctttgacgccaactntattgctgtatggcaatccccacaaacacggatgttctt

SEQ ID NO: 16813 - DNA, 841 bp, Arabidopsis thaliana landsberg
tttcactgccaagaagaacctcactgcttctcgagctctctcccaaaacgggaatatcgaaaaccctagaccaagtaagttaattgatccttttttgtcttccaaacttgattaaatatatgattacagagactcaaaatcaagaacacaattcacaaactgagtttgttttttcaggcaaagttcaagaactgagtgtgtacgaaatcaacgaattagatcgacacagccccaagattcttaaaaacgcattcagcttaatgttcggtctcggagatctcgtaccattcacaaacaaactctacacaggcgatctcaagaaacgcgtgggcatcacggcaggtctctgcgtcgtcatcgaacacgtcccagagaagaaaggtgaaagattcgaagctacttatagcttctacttcggagactatggccacttgtccgttcaaggaccatacttgacttacgaggattcgttcctcgccatcactggtggtgctggaatctttgaaggtgcctacggacaggtcaagcttcaacagcttgtatatccgacaaaactgttctacactttttaccttaaagggttggctaatgatttgccgttggagctcaccggaacaccggtaccgccgtctaaggacatagagccggcgccggaagctaaggcactggagcctagcggagttataagtaactataccaactaattcatgaaattaaaatgtttctcgtatcgctgtgtaatgatataaagatttgtagttttgtgctcttatctgtaataaaatcattgaggaataatatctcgagtatgtttgaagtcgtttggacgttggtaaacgaa

SEQ ID NO: 16814 - DNA, 1057 bp, Arabidopsis thaliana landsberg
aaattctttttaagagtaaaaaaagatttaaagactttataagagttttaaaaagattttaaaatgatttacaaagtgataataggtttttgagatcaattaatcctaaagcactatcatgtcgttgtagtactaaaggttgtcaatccaaatggttgtgatgctaacaatcaagatgtgatcagaagtcactaagtcaagcgaagcaataacaggttttggtgtgttctagcagttctaattgaacatgtagaaaacagaaaatcaagcagaaacaataaaacactcgaccaacacagctcgttgcagagtactgggtgtggtcgagtgacaggtcaagtaacaaacagaaaatataacagggatactcggctgcacaatttgttgccagataactgggtggtcgagtaccaggtggtgatggtgatactcgacttccaggtagagtggtgtgatcgagtgatggtcaggtggtggagctgaagacactcaacctgggggtcgagtgaagtgatcgagtatcaatcgtggtggtactcggccaaggggtcgagtgatgagatgaaatcgtgaagtcccatactcgaccagggggtcgagtggtctattgaggtcgtgaagcttctacttgaccagggggttgagtggtttgacatgatcaggtccgcttcttccaattagctcgttaacagctccaaatcacctaaaaacaacacaaatatgcaaacatatcctaaacatgtaaagtgatgacaaatgatgagaaatggtataaaacagtgatgatatgatgcaatagtgataacaaatggatgctcaaaacatgtaaaatgcacacttatcaaaactaaacaagaggtctctccaaaggtggcatgcgtgttctccaagattctgaactgtcatgtctagggctgtttctggatgaatctcttgccctccactggtaatttgggttgtcatagttgaatgatctattggacgaccctcttcttggaccctctcgagaaaactcctgagtccctgaggtacccctaatatgccttagctctctact

SEQ ID NO: 16815 - DNA, 723 bp, Arabidopsis thaliana landsberg
tgaaatggtatcatatcagaagactttgagtcgtctgattgccatctctctggacctgggtcagcttaataaaaagcaaagatcttccccacctccagtgaagataaactctgcaaatgatcataccagccacggccaaactcttctctactatacttaagatcatcatcctgtggtttctccggttctgtaaccagcattttgatcttccccacattctccttggtcaaatgtgtcccgactccttcgatcttgaccattaaatccaacacaaattggcattgatccttactatacttatacagattcatctctcgcgagaagaatctctcgaaatcttcaagccctcttaccaaaaactcttctctttccttctccactagcttcttcactgaattcacaacagatgtaatccgaatctccattaacgcctttattaacaccaacatcatctttgtatccacaagctgaatccacattttaacaaaaacttgtaaagccaagctccaatcttcaactctataaggatcaagaaagacattactagcttcatctaagattttgtgcttaaacttgtctatgaaactcttgtagactggtggcaaatcgataaagacgtgaaaggccttgacaggttctttgctattcactagcgttaagatacaatcaccaagctcgtcccatttgcctttatgcaactccacaacattgtaagctacacaa

SEQ ID NO: 16816 - DNA, 1605 bp, Arabidopsis thaliana landsberg
  unsure (1)..(1605): unsure at all n locations
tgcttactctgggcaagtctttcgaggaccaggcgaaagtattaacgttctccatgaggaaagaggttagttttggctgtcagcttttcgcctagatctccgccaatttccacgcatcgctcggggttttcnnnnnnnnnnnnnnnnnnnnnnnccaggtcagggactggtcttgttgactcccgaccctcctcgatttttagctgctataactgctcgaagattgctttctcttcggctcggcccagcttagccttcttgtgatttgcgtcggctgtcgactcggtgacgaagttgttaagcttgtgcgctgccataaagcaaattcgggcatttttctgatttcccctgatggtcttcacgccgttgcttgtgggaaacttcaggcagagatgatcagtcgaggcgacggctcgaaactgatttaaccatggcgtgccaataattgtgttataaacggtcggctggtcagtaacggagaaatcaatgattttcgttatccccttgggtcggactagtaacttgatggtaccgagggtcatggtggtttcctcagagaactcgagcataggtcgcggagtcggtacaatttgcgtcatctcgaccttcatttctcgtagggtcgttagaaaaatgatgtctagtgtgctccccgtgtcgaccagaactctttcgacgttaaaatccccaatagttagtgtaatgtccaaggaatcattaagcggacggtccaagccgttagtgtcgctctcgtgaaaagtcacttcgtcatcttgtccgttaaacagtcgcgtccagttgcgatttgagtcggccttcctctgataagctttgattgatgccgctgtgtcttgacagaaagctgaatctcctaaaattgtgaagattcttccccgagcagcttctggttcgtcgtcatctgcctcgcgattgcctctgcctctcctggatcattcgaggttcgtcgcgggggctgtctgttcaggatttgccacaacattgacctgctcggttttggctttctccgcttctaaatcctcgatggttaggcctccaccgatttctccggctaggaatttagctgccaactttgccccgaggctataacatctggaagtatgatggccgtagctcttatgtaattcgcagtattcctgctcgtttttttttgcaatccggttaagccgaatgtaattcgtagctcttatgtaattcgcaatccggttaagccaaatatactcttgaaacttctagtttttttttttttttgaaaacttctgatttactattcattgcttatcagttactcccttaatgggatcttataatcaaaattacttccatatatcaatcatatgttaataaagcaataaacgagacaataattgaaactttatattctagtataaatgatattaaattaaattttactagctatgtaaggttgaaaaccaattcaatcttcttttcccattccaaataagcatctggatcattctttccatggaatggtggaattttaagcttaaaaccaacgagattgtcttgcaaacgatctctaccttctctagcacgtctatggtgtctcttttgactattgtgaga

SEQ ID NO: 16817 - DNA, 2397 bp, Arabidopsis thaliana landsberg
cccgatgaatatttctcttggttatcgcgatattactgaagatgctatgactccttctagattgctaatgagctaccctgtccaaccaatggccaaactaaattacaataatgtggttacaccaatagaagaaaatataacaaccaatgcagtcgctagttttaggttgtttggagtctctctggccactccttcggtgatcaaagatcccgttgaacaaattggcttggagatttctagacttactcaggaaaaaaagtttggtcaaagccaaattttgagatcaccaatagagatccaaagcaagcagttaagttctaccagaacttgtaccaaagtaagtataagttcaatatattcttattctttatatatgaaattttttctcattatactcaactcacgcaatcttaatatggaataggttcaaatgcaaggtgtaacaataggaagagctgtggatttaagtgttcttaatggatatgatcagctaatactagaattggagaagctctttgatatcaaaggtcaattgcaaactcgcaaccaatgggaaatagctttcacaaatagtgacgaagataagatgcttgttggagacgatccatggccgtaagtttcctttctatttctatcgattgaaagattagttaacatcttgagagacattgatatttcattttttgtgttgtttgcatgtagtgaattctgcaacatggtgaagaagatattcattcaaaagaggaggtaagaaatttgaagtccaggaagagtctctcaagttgaattaagaatcaaaacatatgtaataaaaagggatcgaaaatgttaccggtgtctcgttctatttttatttttctcttatttgtagttgcatgcatctgtattatgtacttttgttttcatcgtccataaataaaataaaatcctcttgttgtcgtgatattgagctttctttctaatttatacaatttacagatcacatctacattctaaacatttgagtatagtatttattttatgatattttgaaaaggaaattgtgtaacacgaagtatatggttattcaataaattaaagattttcttctacctattattgtacttgcaaaaccggatattttggagacataaaccaaatgatactgttaaatatgttatactattagtaaatatttccttaaatctatcactacaattgtgtcatcactcataactagttaatatataatgatggaaaactagggagtttggccaattcatattcaaataaaactactaagtcgaaattatacataaactaaagtattgtgtgaataaatacttcaactatcatgattgggaaaaaattcataaataaataagtagaggcagaaaaagatataaaagttatcatagatcggatgtaacggcatcacaagtattcaaattttggtaaagagttttttcttcatttcacatgcttgaattgtggtaaaacaatcaataaaacaatcaataacgtacattgttttttgggagattaagaaataagatactactatgtgattgtttttaaaacagcatcgtcatctaattttacatatttttttcgatatattaatttattttccagtaacgttttgataaccgtagataatatgagcatttaccatttgactaaactttttacggtgagtatagctgtcgagtagtctattcaccaagttttatgaaagatctaaaacaagaataagactatttcgtttatactatcaatttcttttatagtggtatttctgattcatcaagcaatcatcgagcagttctagccctcaacagtagtcatctactacgaagacatcaatgagttaactaccaccttaattatatgtttacattaggcctgggagttcggagataaccgagaaaaccgaaccgatcaaaccgaaattttcggttatcggcgtaaaccgaacagaatccacgtaaccgatcggcaaaattaatttgggtaatcggatttcggttcgggtcggttcggtaaccggaagcgatcggttttacctaaaccgagaatctgcagccatatataaagattatgggtcattaaccctaatttagtctcaattttttggatctgcgctgcctcttacgaaactcaaatagagagttcttcttcttcctttaccaaatccataatcagtccataaccagcctaacgtttcttctccatcatgaattcatcatcttcaacttgctctttcattctctcaaatctcaatctttgttagctcttctctattctcgttaatcgtatcttcgtctgattctttgatgattgctcgataagctttccttatcaccaaaatcatggattcattggtaattctctagatcctattgattttcatcggat

SEQ ID NO: 16818 - DNA, 1253 bp, Arabidopsis thaliana landsberg
attacgtgattagacattttttcaaaagttagttcatgattaggcacttaaaaatcattaggcactttgactaattgcaattacttgtttatcctcaaatcgtcggttatatataaccaaacaaatcaaacccattttcattaaaccaattccggttacggaacccacgattttgattttgcagttaccataatctctcgttttattttttccagaactgtaaaaaaaaacaaatccagaaaaaatctaaactacagtttcggaaaaggtaactccgacgacgggatatcaatctcctccgtcactgtctaccaccattacggttaacactactttctttcttcttctctccaccgtaaaactccaataatcgatttcgtaatcacaaccactttatacccttgcgactccggcgacgggatatcaatctcctctttaatggatttggatttcgttactctaattcaacttcaattgagtagatttcgagaaaaagttcttgaattaccaaggtaaagttatgtgatgttgggttctatattcttttgtttatccaatttgatatggcgtccgcaaatattcctcgattcgaatctccggcgatcataaatcttgcagtgaatactatggaagagaagctaccaagatcgctcaagaatctcgacttgaatacgaaccttgtaccaaagattaagattcttctttcagcatatctatcttcctcacgtaagtctcactttcgacatttttttttctcgagctgggctaaatttggtgttaagcatggctggtgatatttaggagttggaatttgacaaagttttctactactttgcttcaatcgctagaatgtctccattgaaatcgaaacctccatctcttgtgagattatgttattaggaaacatttagaggaaatgattccttgtttagctgaagtctatgttatatttccataaagcgacgtttatgtgaacaaatttatgtggacttgttatcatggatatgttatagacaaattagtatttgaaaatgtaattgacggttgtgtaacggattgtgttatggactcaccattctcgtaacatgattaaagataatgaaacgagattgactattgataattgtgtatttattaaaccttcgcaccggtgaagagattagtcccttgaacttgtgatcatttatgttatatcttgagatgtttggtatttaaaatcaaactttgacttgtatttaaaacttaaaatccaa

SEQ ID NO: 16819 - DNA, 2657 bp, Arabidopsis thaliana landsberg
tgagtcaaaaatgaaaaatcctacacttaggaacgcttctatcggtttctgtattacatggcatatatacaaccaattttttatatatatatattgtagctttagaaaacatggatcaattaggaaaaactcccttttactgattatcattgctaaaagtagaacttttcattgccttaacaagaatagacaatttcattttattgaaaatacattattttccttaatcacataaacaagtttcaatccaattaaaagcattgaccgtacattttttctcgagaacttttacacagctctagaattgtgattttcttagctgaacaacaccatctcagtcaattaatcgatcctataattttattttattttgctcgaaactccggccaaacgtttcatgaatctccgatttcgaagcttaaatgaaaattgcagtgtgaagcccaaactggccatcctatgaaagtgatttccccttttaatctccggtggtacaaaccgaccatcacttttttgaagcttcaatgaaaagttatttcccctttgcttttgaattttgataaattgaggaataatttatataattcttgtctaaagactagagcttttgggttccctagatattatctttaaggtttagatttctttaatcaaagctcgtttaattggattcattggatttttggcgttgctaaagcaagtgccaatggtggaaacgacggttgttggtcggacgctacggagaagacgatgaagagattggtttgtcaacaacaaaattgagggcaaactcgttatttcaaacgtcaaaaagttcccagccttgtaagcacacccaaaatgtgctttctcattattttttggacttaaatatgcctaattgaacaaaagcccaaaaaaaactggtaatatatttttactgtagaagaaaaattaggttgtagataggtcctacagcccaaccaattatcctctttaataatataaagactacaatttttttttcagtcaactataaaattgttgtattttgttttattctatagatagttttgtaaaatctggattgtttgaaaattaacaatttttttgatttgtatgatcttatgtttatttttttgggggaaaatatgatcttatgtttattcaatagaggattgctgaaaaagtattttgtattgataatttattttaattttatgtggaaaactttaataatgtttttaatagatatttaattttaggaaagtaatttttgtagtttaaatgcattaaattttagtttatatattaaacaattgttcacagttagtggtaagaactaaatttgaattttggaataactatttttttggcaaaattaggattcttcagattgtttagcaattggtgttagtatgataaaaatagttattctataaaatatatctaatatatatagtagaattaaattaaattaaacaaactaagaaatttgttgatttcacacgtagcacaagtgtttctcctctaatatgatcaatgatgatttgttaggaacaccatacacttgtgacttgtcaaataatataattatttacaatttatttcgtaatatatattgccaaacattatttagttttctataataaccttattattaaaaatatctaaactcatttaatgaatttttaacaataggtgtccacattagtaaactataaagatttggaaaatctacttagataaattcaataatctatactattaattgggaagcattgtatactacaatattgtaagggtagtttaaaactaactaaatgaattttttgcatgggtaatttagtaaattaacaactactacaactaaataaatatcttgaattttgttttaaaaaaaaacgaattaaatcaataaattaataactacccaatattttcggaaatcatttaaaaacgtttccataacatattaggttattttaattcgaattgtatatatgtaaacttatttattttggtaatatgttattagataatttggaaacttcaatctaatttaataacaaattatcatttactttagattttatacaatttccttaacaaaactatgttaattgtttctgattagtacaaataaaaaataattttaagttatgatttagcatattcaaaacataatttttggattttagatctggcttcatctagaaaatattttcagtatagattaaaatatttaacatttttattataatttaaatgatataaacttttaaagtattttttaaaacaggaaattttcattattttaaaaatatatcactaaactaaatttgaattataaaaaagaatatatttttaaacgtattataatagttacaagcttttggaatattcataattataagaactacatcttattgaaaggtatataataaaaatcggttttataaactacaatatcataaattaataaattacaaattatttttaaatatattaatccaagatgtaccacaggtcaagccctcgatttttttatatattacaagaaaaatatttgaaaataacaaaataatatttaattttatggaatgaagttgtatggtggaacgagtttgagttgatattaatacggaaagataatcaacgagtgatatcttaaaagg

SEQ ID NO: 16820 - DNA, 654 bp, Arabidopsis thaliana landsberg
atcctcgctttctcttttcgtcttcagtactcgtcacggaaggttttgcagtgaaacggcatgaattcgccttgaaaccgacgacgaagacggtgaagctcttctcggttaagtctcgccagacggattacttcgagaagcagaggttcggtgactcttcttcttctccttcacctggtaagccatctcacttggttactttagggttttagcttgcttaattaagaaattggaagcttaaaaacacaaaagggtactcttaattacgagaaatttgtaaccttgaagcttgaaatccaaaaagagaactctttttatatctatagatggagctcgtaggtgatgtttacttgtgttctttgtttcgatttgatagctgaaggattgcctgctagattttacgtgggtcattcgatatacaaagggaaagctgcgttaacagtggacccaagagcaccagagtttgtggctttagacgtaagtctctatcccaaaattaaagatcaaagagctctaactgaataatcatggtttgagttttccatttgatttctgctgcttatctgcggcctggagctttcaagatgtcaaaaggatggtttcttattgctccaggttgctccttctgctggtgtacaacaatatgattggagc

SEQ ID NO: 16821 - DNA, 2483 bp, Arabidopsis thaliana landsberg
  unsure (1)..(2483): unsure at all n locations
aataagacacgatcatggagagtgttatttcgttttctatatgtttcgattaagtagacattgcaatccaggtgtcatcacctttttttttttaagatgtcactacaattcatcggttcatcattatctaccatatgttttttcttaaaacatatattcgtattcgattttttcctacactaaaatcataattcgtaactttgaattttacttttctaattatatgaaatttaaaacaaaaagaaataccaattattacctgtaaaagaggcaattaggaaaggattggtaataaattccaaatgtgaaaccactctcttcaagtgattcgaacactgtcctctgaggaaagccacgaacaagcgtgttagtgtcattactaaacgcaccgtttgatgtcgccgcgtggacgtagagtcggttaggctgcgtggacgagggcaacgacgagaaccaccgatcgcagacagcgaattcttgaactagttccttgaataccggaagtttctccggcggaaaaccttgcatcactactttctccgacatcccttttgttatcgcctctgcgttttgtacgaacccgttcattttcggatccgggtacggactctcgtcgctgaatggttttccaaacacttgttcgtagatcgcctgaaattcaaagatcgtagataaaccatttcatcaatgtcccggtttagatcccgaaccgaattatttaagaagatatttatgttcactagaccggttaagaagtgtatatttctatacaaaattaacgatgctttggaactaaaccggagttgtacctgaaaagagtgaccgggatcaggatcaatgttctgagattctttgccgaagaagatttgagcagagttcgggtcagatgtagaaagtgggtggatcttggttcggattcggatactccatcgatttctgggttaagctccttgaaccaacctaacatgtgatcgaacgacctgttctcctgaaccaaaacaacgatggttttgatcggagaagccgatgagccaccaccagagctcgtttcctccaccatacttcttttacttttttagaacagaaaatttgacttgtgtagttgttttccctctctgtctatctctcataattagctgtgtccgtctaaatggtagccttattatatactgctaactaaacgatgtgtatttaatttattttatatgattagtaaatcacataaatggtatagtcttaaacttttacatgtatatgattgtttgcaaaactcttggggccccgggagtgtattcaatcttctattttgaatgatttaagttattttgaatttttatataattttaaagaatttgggtgaatttaaggaagttgttatgatttattgtaaaattttctcaaaattcacctaaaatcatgagatttgaattttttttatttttatctgagaaatcaactaanattcacttaaagtgttttaaagtcattaacaatctaatccttaaaatgtttttaataacaagggatttttaaatagattttaaaaccactagttcaataacattagatttttgagattttaaaaactataattgaataacgtatgatttgttaatttaacacaaatcacttgaaatgtttgtgtcaaaaatcacttgaaaggttttgtcccttggaataaaatcataaatgatagaaacaacaatccttttattttgtattaaaaggaatcttttatgacgagtgtttttataagaaaggtaggtctagaaaagtgtggggtttctagtgtttagtgactagatgatttagaaaagtgtgggattttgatggttgttgatacttttgttgggagaaatcgaaagagtaaaagcatttgtgatacaacataatacaatcataaaaaaacaagattagagtttaagaagcatcacatgtaaaatgacttggtatagagtgaaatcatgttcctctccttccatacctcacatagatgactatgtgacattcatatcatatatcttgagtacctttgtaagttggaaatgtgataaatttaacaagtacatcaacccaattgctgatgaataactttggttcagtttcaattcgaaccaaagttaatttgctgatgaataattttactagttaatcttctccaaatctaatgagattaaatgcgaaaatacgacatcgtcacaagaaggaataataacttccccgtaggtatagaattcaaacaatttcattctccctctttaccgttccaaactaaattgaaatcaaaccctcaaaattgacactgagagtcagagactcagagatttccaaaacaaaaaaaaaaatggagaaaaggctccggtcatctctcaagacatccgccgaagaattcctctcatccgccgtcaaattaacccttaaatcctcaaaaccctcactaaaaaccatcatcaacgccgtcaaaccttcctctgacctctcat

SEQ ID NO: 16822 - DNA, 739 bp, Arabidopsis thaliana landsberg
gtttgaattttttagcgtaagtgggaaagtggctttttttaaaagcgtaatttcttgattctagtcatttacacctctctgagtttagtgtgtgtcgaatttaacttttttttgtagtagttgactgtatttttttgtgctattattttgatctgtatgtaaccaaattttttgtgacttcttattttctcaaaatttaaagggtttgaggataattttcttccctttttacttgtacgtttttttcatttttgtgaactcctaactcaaatgaaaacgtgcaacctaattggcaataaaagaaacccccttaaaaaaatgagaaaacaaatgccaatttttattatataggacttgcattgaacatatcaagggtcaatggaaagataacaataatataattattaaaaagatatccatacaagggacaaacaacaatcactggagcgagcatatcacacaagactaggaatggaacataacatgacaatctcaaacaatccgacttgattttcaaattttcttgaaggagaggacttggtccaacaatagtggtcatcaatgtggactatatagacttattgggaggaaatttcagagaacttgagagaaacactgttgacgcagtggcgctcatcggtcgctgtgggaaaaccttctcctttgacaacatgacctaaatgtccgtcacatgccgcgcacgtgatctccattcttctccctcctgcctcgggctgat

SEQ ID NO: 16823 - DNA, 695 bp, Arabidopsis thaliana landsberg
tttccttccatagattttcttactatcatagagttttgggttctgattaggggtatacctatgctttatgtctgtgtggaaactgttagtgagattgctcaagaacttggtcatattatccatatagacttccatgaggccactactaatcaaatagcctacatccgagtaagagttaaggtttggaataactgatcgcctaaggttctttcaaaggattaggtttcactctggggagactgttgtacttcgttttcagtatgaaaggtcaagaagaatatgcagtcactgtcttcgttttacgcatcagaggaatcattgtccctactctttaccattaccggccctaagacatgaagacatagttcagatttcggctgagagggtaaaaagggctttacatgatgaattatgtaggttgaatatgaactctcaatcccaaatatcagatcattcgttttcacacctatcacgacctctaccgcggcctagaccacgcccacatttcacgacatgcatcacaagccaaaaggtaaatgtaatatcttaactatttaaagacaaacaaatgatcataccagttttctaatagtttttttgacacagttactcaataaaatgataaaacatgatgagtttgtagtcatggacgtcgtggtgggcagattgcggatacaatagcggacaaattcgag

SEQ ID NO: 16824 - DNA, 987 bp, Arabidopsis thaliana landsberg
tgcccttaaattagattttgaatgtggagtcatcgcatggtaagtcttacccatgaattattagtatgtaattgtgtgtttttcataatataatagccgaaaacttggttcgtctttcttttcgttttgtgtcttcaatgtttgatttggattgacgggttaacaggtgagatgtttacagaggaacagaatgaattgatcgagtcagcagcagagatgctatatggaatgattcatgctcgtttcatattgactagcaaagggctggcttctatggtaaagaacttttttagactcaagttagatacttaacatatcctatagaacatacactgattgttgttttctttacaatggttttgcagttagacaaatacaaaaactatgactttggaagatgcccaagagtttattgttgtggccaaccttgtttaccagttggtcaatccgatatccctagagcaagcaccgtaaagatatactgcccaaaatgtgaagatgtctattacccacgatcaaaataccaaggaagtatcctttttctaatctcagtggtaaatgcagttctgtgcggttacacacacttagctttactttgattgtcattagataattttatcatgctgttttcgttgctgctatctttggtttttgtcattctttaacacacaaaaaaacagacatagatggagcttactttgggacaacgtttccacatctgttcttgatgacgtacgggcatctgaagccacaaaaggcatcacaaagctacactcaaagagtgtttgggttcaagctacacaagccgtgaaggaaacaaggaagaagaaatgcacccttgggttttgagaaacaagaaatgtgtgtaaacaaaacaaaaagaaaaagaccatttgtatcacagaaggtgaaactagttccatctctctctctttctctctttttctttgtttttggtattgtgtttaggtttagataaaacattag

SEQ ID NO: 16825 - DNA, 2350 bp, Arabidopsis thaliana landsberg
atgactactgttgttattgaccttgcggcgccactaaggccaaacgggatcatccagacggttcctgatgtattaaggctgcaaatttattaccacactcaatcacaaggtaatgactaaatttggttctgaattatgacgaagagataacaattattaatatcgttcttgccagattgcgaggacaagaagtttctagaaccgggttcggaagaagtcctgacgagagaaccaaaagctcaaatgaccacatctctaagctgctcaaacaacatcaccaaaataaaaagatactataagaggaaaggatactaataagagatgtaacatttttcaaatctcaactaggtttaggctaattttatcactacatagggacaattggatagtatatccatgctttcttataatgtgtctgtttcataaaaaccttgtttccaagttacgtccaataattaattaatgtagggcatttttttcttagacttaccaaaccataaatgcagaaggaatagctagtttcataaaagggatgatatcgcgccgagcttccttagagaaaccggtccaggtcagggagcaagaaggcgaaaacttgacgtaacacgacaagagaatgacattgagccaatacgagatcgcattagcgacagcagctcctctaaaccctaaaccagatttcaacaccaagacccaacagatgatcacgtgaagagaagtggtgactccagaacagataaccacaggaattacattgttctgcgcctgcaaaaacctgttgagacattgaagaagaccgtaggcgaagatgctagggatcatgaatctggcgtaggagccagagaggtgtgcaatggacttgtcttggccgaagaagaccaggaagtgctctgtgttggcccaaacgatggagagaggaacagataaaagagtaagaacaagcattgctctttgcatctgtatgcctaacataccgtacatttttgctccgtacgattgaccacaaactgtgtccatcgcacttgctgttcccatctgttcagaggtgaatagttttcttatgataagatttcttgctttacaagtaagtgttcaacgtaaatcttcacatcgttagatagttaatttggactgtccatactccatgtcatttaccatgcaatgtaaacatgtgcgggtagcaaaaacaaaagaaaaaagaaaatatttatacacaaaacactttttcttgtttatttttggcgttttcgctttcttcttaaaatgacaaaatgtttttgttcttggagtagcatagaagaatcaaatatgcatacgcaacttggaaattcagaaaaggtggcctgatagctacatcgtagctgaattaaaatatatatcatacaattccttgagaagattttttagtattaattaggtttctaaattttcaattagccgtttaaactatagggttctaattcatagaaatcttgtatttaatagatttttatatttagtcacttcttttcgcttttttttattaactattggtaattttcaacattgctaaatagaaaataattaaatatcaatatctataaagaaatgaattactagatatttgtccatctaataattctcggtgtctcataaaaaaaactttgtagtaaaagaatagaatgatttgataatagagagagagggttgatagaaagaactgacgaggaaggtgaagccggtgacggaggcgaaggaggtggcaatagaggcggcggatagaggaagagagccaagatggccgacgaacatgactgagattatttgcagacaaaactgaagaagactcactgcgattagtggtccagacaacagtagctgcttctccacttcctcctttacaaatctacttctcttctctttctctccgatcagaggccatgacaacatatcctctctctcctccctcatcagcgctttgcttcagagaatgtagactcttgagagagaaagagtgagcgacagtacttgcaaggttatggagacaacacagaaaaaagagagaaaaaaaaaaggttagggattatccctgtctttggggattcgtgttttgttcggtttctctaatgatgtgtaatgttagggattagtgttttatattatcttttaaggttatggagacaacacagaaaaaagaaagaaaaaaaaaaggttacgaagacaattacatgtgacctatacatgtgtctttttttttttttttttataggagatgatcccatctcaccattgttgccttgtgtcgcatattaatttttgttagtatatgtttacgggccggatagtaatttgtctctttttttgggtctag

SEQ ID NO: 16826 - DNA, 3011 bp, Arabidopsis thaliana landsberg
  unsure (1)..(3011): unsure at all n locations
tactaataaaagtgcagcaactaagggaaagagctatgagatagctcaacaacatatgcaaaatctagcaaaaaaaataaaaaattaatgagtttattcagtttgaactactaagaattatacccaaaaacaaaattcaaaaaaaaaaaaaaaaccttcgatcacatcaaatttgtatatatataatactttgtattgttgtagtattttatttcttgtaacatttatgtgttcatgtaactttatttcttttattactcaattttgtattaaatttgtttaatataatattgttatgtgaagaaaaaaaaatatgtaggatttcttttctattaatactttaaatttattttgtttatttaattttatatgtataaaattaaatttataaggatatatgtgaaatagttatgaaatctaaaattaggaattaaaatgataaacaataagattagtaaacttatttgtttgatgtataagtaagtgtaggcgctgaaatgcaaaaaaaaaaaaaaaaaaattatttttgggagtcaagtttaaagttttgaagttatttttctagtacaaaaaaaatccatatttgaaaataaagagtaatttttgaagatgtcctaacttgttttggctctttttctcgattataatcatatatatgaagttggacaactctgtccatatgaatgacacatcatcacacaagaaaaatgatatgtgtcattctatattttttaaattatttttttttttaaattaaataagcaacttaattgtatcatcaatcctactcttaatagattttttctaaaaaaaaaaaaaaaaatattttataaaactaagcactactttaattatactctttttatttgtaataattttttattataaataattactactctatgatgactaaaattatactctttatagtactaattgcccaactttcatatatatgattttattttgagtctttgatgacattgacatttaagttgttcaaatattaaacgtttaagacattatagctaccaataatttaatacacgatcatttcttttatatagatatatatatgcaatgacagaacatctaaaagtattgatttaaataatactttaacttttgctttcttttaattattatcatatgaatactcttgaaatcttgttcagtttatatcaattctatatatttaatcatgagcctataacaatgttgttggattattatatttggagattaaataaaaccataaatagtttatttataatcaagttgaacaattttcaaatcatccaagacacgatcatttctctaatattgatatatgcagtgacaaaaaatccaaaagtgttgacttcaatgacattcaatttttgctatctttttatttttttgtacaaatactcttcagatctttttcagttgatgtcaatccaaactttaatcatgaatctatcacaatctacatatacatttttgcagccattttgtgaaataaatcctggagttgggacttatttacaatgcctgccactggcatttattatttagtattaaaaaattaaaaaaagatattaaccaaacgatatctggcctaatttgctgctaaaaatctggacacaatctttccatatatcttttaaaaaaaaaatcgtgaattctactccacaaaatatgcataaatccgatttataacaaatattcatatcaacattttgcatagcaataaaaatactaatttattataaataaaatattcgcatagaaatcatatacacatagtggaaaaaaaaacttgtcaaaacaaaatgtgcacttcttgaggttaacataaaggccttccttccgaagtgttttgagaattaactctaaatgttgaatgtgatcagaataactcttactgtagtatgtcgtcaaagtaaacaacaacaaatttaccaataaaagaccttaggacctggttcattaggcgcatgaaggtgcttggcgcgttggttagcccgaacggcatgacaagccactcgtagagaccttgcttggtcttgaaggttgtcttccactcgtctccttctctcattcggacctggtgatagccactcctcaagtcaactttagaaaatatgatggcaccactaagctcatccaacatgtcgtctagtctcggaatggggtgtcggtacttgatggtgatattgttgattgcacagcagtctacacacatcctccatgtaccatccttctttgggaccaataggacagatactgcacacgggttgaggctctctatgatgtaccctttctccattaggtcacgcacttgcttctcaagctccttagactccggattcatcctgtaggcgggcttgttaggtaaagcagagtctggtacaaaatccatctgatgttttatgccatgaataggtggcagtccgggttgaatctcctcggggaatatgtctttgtacagatctagtccagcttgtacttcagcgggtagctcaagatcacttattcatgtactaagacattctttgaaaagcattagtagcacggtgcccttggcactcatggttttacaaacatctttagagcttaaataaagactagaacttattaccttgtcctccttgttcatgtgaatttgtaagtcatgaacttctgagggactaagaggggcaaggttgtacttacggtcattaaacgtgaaaaagtaattgttggtacgcccattgtgacatgtagctcgatcaaactgccatggacgtcaaaggagaagatgtctagctctcattggcactacgtcacaaacgacttgatcgtggtactttcnnnnnnnnnnnnnnnnnnnnnnnnnnnnnnnnnnnnnnagtttgtatcgacattgagccacgtaagcttgtatggactggggtgctttgttttatgaagacctaacctgggtaccatgtacttgctagcaacattagtgcatgaactttaatcaataatcaacttacataccttgt

SEQ ID NO: 16827 - DNA, 2146 bp, Arabidopsis thaliana landsberg
gcagggaaacgaaaaagtagaagccaccaacaaagttatatttagcaacataaagaaaagactcgactccaaaaagttactgtggttcgaaatactccctggagttctctaggcatactcgactacgccttgcaaaccaacccgagaaaccctttctctctcgcttacggcttagaagtagtaattcctttcgagaccatagtaccaagcgtgagaagagtcgcaagtcctgcaaactcggacctgaacacccaaatgttgcaggaaaacatggacttcatcgacgaacgcagagatcatgcaatgatccgagttcaaaattatcagcaagctgttgaccgctattacaactccaatcaaaatttggagattcgtcatggaagagctcgttttacaaaagtgttcagcaacacgagagagctaaacgacagaaaattgggcaccaactgggaaggtccctaccgaatcaccgaggtggtagtgacggcgtctctacgctcgaaaaactaatcaacggagtacctgaattttacggcgttggaatgctatgcatctcaagaaatatcattaataagtaccctaaaataattgaactacgataaggcttgataccctaaccggctacataggcagttcccccgggtacgtaggccaccatcttaactccttctattttaaaaggtcctttgacaaggaaagcaggcatcacgctctcaatataaccaagacacgatcggacgtgcccctctgtcgaagaacgcaggtggctcacctaaacatctagccattttccaacctcaaacaagtcgctttcctgtgacgagattagatcgtcatatgctttattttatttgtactcgaccatctcaaaattagaataaaggcaatttcgatatacaatgtcaccctttgcaaatcaatcgctgttgaatgttggcggatccattttgtgatctcatttccagaaagtcaacaacacctctaagccataaaagcataccatttcgacttcatcggtgctcacctacaacaaccatatctatctccttcctgcgctataaaaacataaccaactaaacaaggaagaaacgaaggttccattccattcgcaatcttgcgataccttaagcccggcatccaaaaactggcaggtcccttgtgtgacctcacttcaataggttcccgagataagcaacacaaacctgcctagattcgaacctacgaaggacatactatttcacatctgcaatacttaggcttaaaacaagacctaatacaattatttttaaaaggggaggggggggggataacgcatacaaaagatattcgatagaacaaaagtaatttcaaatggataaaagccttcccaggcaccgaatattcgatagaacaaaagataaaagccttccctggcaccaagttcaaaagtaaacaaaaggatgaaaccatagccaggtcaacatagctcttctcgaggtccttcgaggtagacaactccattttcagtctgtagatctttgcctaaaaccatagccaggtcagcatcattacaccatcaaaccaacacaaagcacaaaaacgaaaaaatgataggagtgtacctggtacgaagcctcgcgctcctgacctgacttcacagtctccgttatctccttgataagcgtcagggaagaccttgcttaagtgttgataataaagagcaatcagcttgttcgtaatagcaatctcctgccgaaaacgaaacaggaatgaaaacaagcacaaaatttggaattaaagggaaacgataatcgattgttacccggccctccttcaccaccatatcagcataggtcgccgcctcgaccatgttcttcacacctgggacctggtaattctgtcctttgatgtggcaaagcagattcgctagcccagcctcgtcctccactttagttggaagtctgtctaacctcttgagatcggttcggaactcgagaagaggacctacccccacctctcgaggactgacctccactctgggatcgtcccgaggatcgcctgtccgcagacacaggtgcttccggattagaagccacgggttctgcccccccccgcttctagaaggacgacatcctggtcagctatgaccaatccagctgctgggtgc

SEQ ID NO: 16828 - DNA, 1882 bp, Arabidopsis thaliana landsberg
cttgttcggagatatacctaaagcacaagcaaccacaagtaactataactaactaacgtttaagccagattgaatttatagaaactccttcaaatccaggactggtcacgtcattaatatgtaattgtaaaaatggtttggcaaattgtgtgccaaacaaacaaaggaagatgcagagattgggaaatagacttgtacgtgatttgcaattttctgtgtaataattgtcagcaggcccgtgacctttatctgcattcccctttggctttcttcttctcagtttctcaacaatatatattcactatgacacacatgcatattcatttgatccatctttacatgttttcaataaatgtgtgtatacgtaactgttagcaagctttctttatgagaatatatctaagaattttcgtttcttctggatccaccttctcactaataactccatcttaatttggactttaatctctaatgatctcttcaatatctgactctctcttgtcttactgtcgcatcctggttacatcaccgtttgaccacaattatattcgctgagttctatgtaacgcaaaaattcaaaatgacagaaaagacaaaataattaaccaaaaggtcaaaaaacaaataagaaagaaaaaaagactgaaaaattgtcaatttcattggaaaatacaaaacattccaaactcaagcatcaataaattctctttacaacactcacttcccttctccaacctttaaacatttctctcaaaatggagtcgtatcactttatccacctcttccatctcctacgccaaacctctttcaccgctcctcctcacggcggagcaaccttccttcatcctccgcaacatcactctcacctctcatccttcccaaatcctcgccattattggccctagcggcgccggaaaatcaactctccttgatatccttgccgcaagaacctccccgacctcaggctcaatacttctaaactccgtccttattaacccttcttcttaccgtaaaatctcctcctacgttcctcaacacgacaccttcttccctctcctcaccgtctccgagaccttcactttctccgcctctctcttgctcccaaaaaaactatcaaaagtctccagtgtcgttgcttctctcctcaaagaactaaacctaacacatcttgcacatacaagactaggtcaaggcttgtccggtggtgaacgcaggagggtttcaattggtctaagtcttcttcatgatccggaagtactactcctcgacgaacccacctcgggtttagacagtaaatccgctttcgatgtcgttcaaattctcaaatctattgcgacgtccagagaaaggatcgtgatcttgtccatacaccaacctagcttcaagatcctgtctctcatcgatcgcgtgttactcctttctaaaggaaccattgtatatcatggaaggcttgacttacttgaaacattcttgctctccaagggattcacggttccttctcagctgaattctcttgagtacgctatggagatacttcagaacatccatgatccctacgaaaacgccaacattgctcttccagaccactgccctgaaagtaaaaaacagaaccaaaaacagagcattgttcgagataaaagctcgagaatcaccgaaattagccttctctctagcaggttttggaagatcatataccgtacaaggcagttgcttctaacaaacatcttagaatctcttgtagtcggtcttgtcttaggcactatctaccttaatatcggaactggcaaagaaagaatcaggaaacgatttggcctttttcgcattcaccctcacatttccttctcttcctccactaacccaaaacccctttcaaatattttca

SEQ ID NO: 16829 - DNA, 1013 bp, Arabidopsis thaliana landsberg
tcttcttgaattgctgcaatccagaaatcaaaagaatttaggagaatgtgacagtaatggataatcatttggtaaaaattaaacataaatgaattatttacatattattcactgttaaaataaactatattatgtgatgtataataaactttacttattttttaggttcagagtctgatatatatgatgatcttgaaaatggttttcaagttgaagttgattatgattcatataccaactacaaaaaaaaagtgtcaaggttactgaactagttaaaaaattttatcagttttcgatgatcttgagaagagtttgcttgccatttttggcccgggatgtcgtacctctaatgaaaatatagaggaacattcttacggtgtgttgtattcaataaactttgtaaataaattataataaacattttgcaaatgctcaatcaaggttgtaacaaatctagaagctctaatgacatctatgtttcacaggaaaagaacatgaagactttgagcgtcaatttaatatgaattcaagaaaaaacaaaacaggtatgattatatattagtactctgtgtatcctctatatttaacattttataatttcaaatgcagtatacattgatcatggtgatcctatttactcatgtgaatattgtggagctataatgtggcatggtgagcgtattgaaaagacagtcaagaataagaagcctaagtttacatcatgttgtttgcaaggtcaagtgaagttaccttttcttaaaaattcatcagaattactttatgcattgctaatcaatgacgatgaaatcagtagacatttcagagaaaatgttaaggcttgtaacgcccatgaacaggaaaatcggttagagtttgattttaaatcctccggtttaatcggttgggttaattggaaaccataaagtgtgcctataaaagaaaaaaactcgaaattagggctttagttagccatttttcgttttataaaggacaaaaagagagagaaggagaag

SEQ ID NO: 16830 - DNA, 763 bp, Arabidopsis thaliana landsberg
ataaatgtttaaagattcactcggctactataaattcgctttttatatcatttcatttcatcatcactgggcaccgggacgagagatcaaagcaattatacattttgagaaatggctgctacattcgcataccttaaagacgtgaggccttacaaaaacgcatggagagtccaggtcaagattcttcactcttggaagcagtacacaagcaacacctgtgaaaccattgagttggtcatctctgatgaatatgtaagaactactgttatctatgcaaaatttacgtttacatatacacaagtgctaatatagatttctgttgtctttgtcataagggaaaaaaatgcatgctaccatgaagaaggagttggtttctaagtttgttcacaagcttattgttggcgaatgggtcttcattgagatttttggtcttacctatgcgtctagccagtttcgcccaaccaaccatctatacaagatggcgttccaggttagaactgaagtcatgggttgtgcttctgtctctgactccaacttcttgactttggcgccattttcaaaaatccagagtggtgagcttaaccctcacatgttggttggtgagttttccgattctatattatatttttgctttattccattcacttgctatcattagattatgaacacagtcatgtttcactgcagatgctattggccaaatcattactgttggtgagttggaggaactcgaggctaacaataagcctacaacaaagattga

SEQ ID NO: 16831 - DNA, 1772 bp, Arabidopsis thaliana landsberg
caatacacatcctatgtcctgttttggtctttgtgggtatcagttcatctttcgaattcttaataactgtcatacctccctttttaggaacacaatgaactgcagatacccaagtgctatcagatattggatagattacacccgcatctaatagtttaagtatctccttttttactacttctttcaagtttggatttaatctcctctgaggttcaatgctagaatattattcattttctagatggattctatgagtgcacaaagtgggtgaaatccccttgatgtcatctagtgaataacctatggctttcctatactttttcaattcaattacaagcaaatttacttgttcagtatctagttcatcattcactatcacaggataggtgaaattgattccaagaaaaacataccttagccctttcggaagcggtttcaggtcaaccttgggtgccttgagctcggaccaatcgtcaggtggtgattcagcgtccgagatggaatcgtgatcgagtgaagcgatcgagtgatgtagctcaccttgcgatcgagtgacgtgatcgagtggtctcaactcctcaaagtcttctgagtcatcaacttccctgctcatatccatcagcttctggtatcccaaagtttccacatgtaagtctttttctctactgtctttggtcagggcgctttgtaagtggtcctcctctgctagtccttctaaaaactcgtcagctagcaattccgtctcttctatccagaaaactttaccctctattgtgggctttttcatcatgttggtgatgtcgaaagtcatccgaagatctttcccgaggttgaggttgatctttcctttcttgacatcgatgatggctcctgctgtagctaaaactggtcttcccaaaattaatgggtctttcggctcttcgtccatatccagcaccacaaagtcggtaggtacttctatagaacctatcttgacaggtaagtcttccaacaggccatgaggtatcctgatggatctgtccgctagaattagcgaaattttgcaagttttatatttatcaaaaccaagtttcttggctactgagagaggcatcagactgactgaagcacgtagatcgcataagcatgttgtgaatgttagagggcctagtgagcatggcagagtgaatgagcctggatctcccaatttcctaggtatgaccttctgttggataattgcactacactcatgacttaatatcaccattccttggacttcattgatcctttctgtgatcaggtctttcacgtacttgtgagagtcaggtatcagcgcgaaataatctaccaagggcatagtgacataaagatcctttatctgtttttccaaaagagcacggtatttcgcaatcagaatttttttgaaacgaccagggaatggaagcggtggtttgtagggcggtggtatgaagactgcgtctttggtttttgcggctactggtttttcaacagagggagtagctggtggaacttgtggttgagtgcgcttatcgattgttttgtcagccaaaacatcatcttgataaaaatcctccccctctgggaccacactgtcctcagtgttggggtttggctctcctcttggtggtaactctcgtccgcttcttagagtgattgcgtgggcatactcctttgaattatgtattggtttccctggcatataacctggtgtggttgatgtaaaagcgaaatgtgccttctatatattgtacccttttgttcaatagtgccat

SEQ ID NO: 16832 - DNA, 1657 bp, Arabidopsis thaliana landsberg
gagacttacccacaaaagtccatcggatggtaaaccgtagaactcttgttggactgaagtgccatatccttatcattacagattcgatcatgtcaaacacgggcatcgcatacacctaggaggacaaagcagatcagttaaggcggggaactacaagtttttttttgcttctaatgagaggcgttttctggtgtacctggtagcttcccaagagatgtatgaccacaaacatgttggccacaatgacaagtgccgttggttttgttagtgattcgaggatgctctcttcaacactgtttccaaaggtcttgaaacctacaagtgccacagggaagtagcagaaagctacaatgatataggctacaaccgctcccttccacatgggtcgttttgatgggttctctggtgttgatgggatcgttgcttgaatttccaaaacaacgttatgacctgcgtacgcaaaagccatttcacccagtgcacttaagaaggctaatggcactgaggttgttctttttctatagccgtactctacactcccggtggtggcacccttcctcagcgaggctacccaagcaattgtagaatagctgtgcattggaaacaaacatttgataatttcttctcttggagtcatgttatgttttcacgagatgaaaatagcaaaaggaaggagctacctgacagacatgacagcagctaccaaggagacaccagaaatggagttgaagttcttaagaagggagagcacgaactgtgaagaggcaaagatcaaaatgaagtgttgaattctaagctttgtgcacttgtcaccatctcccaaagcaaggtcatgtacattcttcagggatttacctccagtgaccatatagactatgcacacactgatctcgacaagtagttgtaggggcacgatgatgtacaaaccaagctttttaccaaaggctgcctgacccagctcatggtacctatcgaaccgttgcccttcaaacatctcatgcatctcaatcatttgccagagggtgtataacgtgatcacccatgacaggatcaacaccacaaccccaggtcccctgaaaacatcattggtaaagtctaatatatacatatgtacatcttcaaataaatttggtgtatttgaaatctcagttggaagataccatccaagctctgacatggcgtaaggaagaccgagaacgccagcaccaacaatggcagtgacgttgtggaaagctgaataataccaattggcattccttgatgctgtgattggaagccaatcttccagatcaaagggttgatcctgtaagtagagtaacaaaaactctttaagaataaagtttttcaatgtaacaaaatcataaaaagcatatacctcctccacaagatgttggtcttggatatgatctgggattcccgccattgcaaacttaggaatgttgtgacttgtgaggaaatctttcctatctgtttttcttgtcttgtgtggttccaaaagttgggagcaagagagatagagaatgaaagttgacctttacccccactgaggtttattagctgtgcaaatgattgaaattacctggaaattttgtgttgttcttcaattcatattaaaaatggtcgttgattgggatacatgttcataatgactccattg

SEQ ID NO: 16833 - DNA, 1647 bp, Arabidopsis thaliana landsberg
  unsure (1)..(1647): unsure at all n locations
gaagataaaaaagttgttgctgaaacgaagctgagcctttctgaggagaagaatcttggctttcttgagtcaatagcaaagacgaatacgaagaagattacaagggagattttagaaggtttatctgacgatactggtgatagtgacagttatgatgtggaaagcagcggggaagactccgaagatcgaccctggcgaccaagccatgcagtttttggaaaatcaactattaaacagagccatcttgacaatatgagggggagatattttcgggatatgtctattgtgagagctgacaacggagagaagacttgtcctactcccgaagaaaatgaagctgtgatcttccgaagctttttgaaggctgggctttgttttcctctaagcagttctgtggttgaggttttgaagatattccagatttttcttcaccagattactcccgaagccattataaggatgcaagtcttcgtgtgggctgtgaaaagtcagggcttggagccaaatgctaaaagtttttgcagcatgcatgaactttcgtatgagacgaagccctagggtatagaacagtatcataacaattttggttgctatggcttcgttgctcgttctggctcaagctacccagtgccaacttttcagaagagatggcccggggctagatggaagagtggttttacgtgaaaaatgatttgaaagcaagagaagatattaaagaaatcattatgcgacccatctggtcccgcttcagccttcggaagccgaaagtagaaactgatgaggcagccgaagcataccgaaggtctttcagcacagtttgttcttttattgggacaagggacttagtccaagaacatgtagcttacaggatatggccactgatagatagatgggaaatgccaaaagagaccatcagcaaccctagcgaaggtggtttagttcgattgaaatacaccttcaggtttggagaccaatttatcgaaccagacgatgtctggttgaagtgtgttgaaaatactagtgatgaactacttggagcctactccaagtctgaagataacacactatctgcagccttcgggagccgaaaaaagaagaggctaaatagagtttttgatgctatcggatttatgtatcccgactaccgctacccgcaaagggggcagaagagaaagagtgcaacttctgggaaggatgttactttagctgctccgagtgagcccgcgctgaagaggagaaaattgaaggttcttactcaccgaccacgctacattgaaccggccacagtgcccgaatttggcggtgagacctctttggctactgaagccaaagaacctgcgcttacgcataagattgaagagccggctgcaatgccgaacgtcncntcagccaaattagctgagccgaacgcgataatattgaagagataggggtcgaaggaacaaagatgttagaagttataagcccttcggcagaagtgacagtgccgacgnanaacaggtcttacaacgacccccaataggaaaaggatggtcaacgtactagatgcgctggagacgataaagacttcaagatctactccaaggaaaactgccgaagcttcaaaaacgcagactgagacaaactaaccgaagccgaactgcaaag

SEQ ID NO: 16834 - DNA, 882 bp, Arabidopsis thaliana landsberg
actccgctttatcggtttcagaaaccaggaggtagcccgattactagagtttgccaagttcttgtagctgcataccgtaaattgaagcttaatctccctgaagatatctcatttctgtatgaaacacgagagaaaaactccatgattgctggaagcaggaagattcaacacactgacggttacaagcaaatacctgtcccctttcagtttctcagtttgagcttttggaaatgttcattggaacataaacctttgtttttatatctgtgcaggtttcttgacaaagctgctgttatctcagaatatgaatctaaatccggtgctttttccaacccatggaagctatgtactgtaactcaagtcgaagaagttaagactctgatccgtatgtttccaatctgggcctcggggatcgtctactcggtcctatattcacagatttccactctattcgtgcaacaaggacggtccatgaaccgaataatccgttctttcgagatccctcctgcttcattcggggttttcgacacacttatcgtgctcatatccatcccaatatatgaccgtttcctcgtaccctttgtaagacggttcacagggataccaaaagggttaactgatctgcagcgaatgggcattggtctttttctctctgtcctaagcattgcagctgcagctattgttgagacagtgcggttgcagcttgctcaagactttgttgcaatgagtatattttggcagatccctcagtacatactaatgggaatagcagaggtctttttcttcattggtcgagtcgagtttttctatgacgaatctcctgatgcaatgagaagcgtatgcagcgctttggcactactcaataccgcagtaggaagctac

SEQ ID NO: 16835 - DNA, 2525 bp, Arabidopsis thaliana landsberg
  unsure (1)..(2525): unsure at all n locations
ccttggttgttcctcgcaaaatcctagcaagtattgcgaaggatttgagacgtgtcaaatatctatatattggaataacctagtttgtgcggagctcaaacccagccgcacatcacgaaaaccctaatctctccgatctcttccttcgccgattctctctcttctccgatctcttccaatcgccgaatgtcttttcgattgtcttcctatctccgatctctcctctctgattcacttcacacacaccgattctctcctctttccgaagatttgaagatttgttgaaaggttaatttttctttcactccgattctctcttcaaaacgctgatttgttttactctagtctgatttcgtgttttaattccatttagggtttctttagggtttaatttagggtttgatttcgggtttaaaccgatttagggtttagttccattacgttttctatgtttagttctatgttttcttactaatgtttttttcttttctcgtagctggtatctgaaaacgactacacttggtatctatccactcaacaagtacctgttcctcctactcgtggttccatatctcaagggaatgcatctagaaaccgtgatccaccctcacctgcgagtcaaaaccaacaagccggtttgtctcctccacaatccaattcaaactcgcctaatcattcagctactcaaccaccaactgcccgtctcaacgatatgacattggatgagctcctcgacagtccggggcgtcagtctttgcagaagctagatccaaatcgtcctccgggaactctctggtaaggatgattttggttatactttaaatttagtttcagttttagattttcggtatgtagattctcattgtattttaggtatgtagactaagtactaatttggttatacattgtattttaggtatgttgattctcattgtaatgatttttttttgtaggtttgacattgatggttcagttgcagcttctgtccgaaaggtttttgaaagagattttaaggcacctcatgccaattggacacaaactcctaaagcagtgatcactcgttggttcgagacttttgcggtaagtgaaattgcttagtttagctttgttttactctacaaatgtatgtgatgctatttctgactttgtttttttattttgaagcaaatgtacaactgggacaagtccataaatgatagagttagagatgagtttgagaacaagttgaaggataggatgtctgatcaaatttgccggtggaagggaaagtggaaggagaaaggtgatgagcaaagcctaaatggattgatcctcaagtgtgggctggacttgttcgtttttggcgtgatccggcatcagaaattaggagtatcaacagtagaaatgcccgatatcatgatcccgatggccttggtatatctaagcaccgttctggccagacctctttcaaatcccgtgccagaaagcatgtaagttaactttgttttctttctcagacatatacttatgtattgaactgacacttaacttttttcttttgttttagtctgaggagaccggtgatttaactccagattttctggtggttcttgagatgactcatcgcaaacctgatgggactttcattgatagaaagtcagaggagatctacaaggaagtgtcatcaaggattgaagaggcagagtctctgctgtgttcaggggacactacggagagctctgcttcaggtgggttatttgttcaggccaagaacaagatttatgctcaggtatcttatctctttcaactcnnnnnnnnnnnnnnnnnnnnagtttatgattactatggattttggccattgtgtcttagtcattgtgtttcaaactgatttgattatgttgtggcttgcattttttcataacattgtgtttcagatgcgctttgattattttgcttcttggcctttgtgttatgacattgtgtttcaaacttctatgattatgttgtggcttgcattttgtcctaatgtcattaagtttcagcctgctttgattatgttgtgttatgactttgtgtttcaaactgatatgattatgttgtggcttgcattttgtcataatgtcattgagtttcagcctgctttgactatgttgtgttatgactttgtgtttcaaacttgtgtttcaaactgatgtgattatgttgtggcttgcattttgttataatgtcattgagtttcagccttctttgacaatgttgtgttatgactttgtgtttcaaactgttatgatgtatgtgtttttggttgtgttgttatatcattgagtttcagcctgctttgactatgttgtgttttttttggttttgagtttctcacaggttgctccaaagaagaaaggcaggatttatggtgctggttcattgcagcttgaaacatcttcagctcatgctggtccagttcttcctcgagaagatccggttgcgctctcgcaaaagctggctgccgctgaagcactcattgcaaaccaagctgagaagatcacaag

SEQ ID NO: 16836 - DNA, 1236 bp, Arabidopsis thaliana landsberg
cggcgacatccgtcggtatgccaggcatgtccgagggactccacgaaaaaaccttggcaatcacgcggagaaagtcgacgagcactgcttcctatttggggtcgagctcggagccgatccagacttgcttgcaggcgtcgttgctggggtcgagagggacggacttaactgcctctgctggatcggagttgccggcgtggcgcttcacgtcgagcacctccttggagaggcattccaggtcggcgatgagggcctcggactcagcgagggcctcagcatactccacgcactccacgtcgcattcgtacgtgtgtcggtacgtggagccgacggtgatgacccgttggagccgggcatcttgagcttgaggtaggtgtagttggggacaaccatgaacttggcgtagcacggtctccccagcactgcatggtaggttcctcggaacccgaccacctcgaacgtgagggtttccttctagaaattggagggagtcccgaagcagacgggcagatcgagttgtccaaggggttggacgcgtttcccggggatgatcccgtgaaaaggcgtcgcgtcggcccggatcgaggacagatcgatctgcaggagcccgagggtctcagcgtagatgatgttgaggctgctgcctccgtccatgaggaccttggtaagcctgatgttgccgatgacgggatcgacaacgagcgggtacatccctgggctcggcacgcggtcgaggtggtccctctggtcgaaggtgatgggcttgtcgaaccagtctaggtagattggcgccgccacctttaccgagcagacctcccgacgctcttgcttgcggtgccgagccgatgcgttcgccgcttgcccaccgtagatcatgaagcagtcgctgtggggatagatatcccccgggtccactaaaagagtaaaatacctcacgaaaggcccaagggaccaataaatcgtaaggtcattctttcgtgggcctggggggagacaaccagcaaagcggagtgacatgaggccggattggtgcgaacccggacgacccacaacgttgggcgagtgaccgcaacagagatccgactttcccgcgctggagctcccatgcaacggagccatgcaaggataagtcggcaggattacctggagataaactcaagcagttcactatcttttagctacttgttgttatcatatccaactgtgttgccccacggtcgagtatataaggcctag

SEQ ID NO: 16837 - DNA, 1766 bp, Arabidopsis thaliana landsberg
gcacaggattagcccatggtctggtcatcctctttcaaagtgcggtattcgtgaaaactccctccatctatggataaggtcgtttccttacccaacacaagctttcccatgttcctcacaatattggatagatcaaagcagatgcagagccaactccaacaatctataggtttctcctttccttcaacattgtctgatgccgagtccaagctcactgtatgatcattgttgttgtcctcatcgacttcaataatcctgttatcccttggcaaaccaaattcctcttttagtaaataaccaatcatttttttctgtttccttttatgtaagcaagctttcaaaattttggcatgggacctgagccccctagagacggtcttcttgctgcttctctccggttcattagtcaagattcgtacaccacattcgagaatcttgaagttatcaaattgattcgaggcatcgatgcagaattcaaacaatgcctcgttgctgctaacttcagacacgctaccatgaaatatacacaaatgttcggtttgaattctggtcgattcatttgggtgttctacgcaaataactttattgtaactgcctacgatacaccgtatatcagtgtgttcccatgagtgttgttgctggttaggtgaaatcacgacgcatgctttaaacttgaaggatgcagaagaaagacgaatattcaaggaattattaccgctagttctttggttgaactcatcaggcattactcttcccggtaagcatgcatacccgtcaagaaactgagtcgcgcatcgttggatgattagtctccttgattcttcaccaagtttgaagcagttggtgaaattgagtcgcgcacttggagtgtttaaagggtatgttattatctccagtgattcacaatctaaagccactaagagtccgagtgacatagggagctcaggcaatgatgtgagttttctgcagccggctacatcaagagactttagcccatgaaaacctttgatgcaatctggaatcttctcaatatcagtatagcttagatctagcagctctaccttctctggaaaatatgttaagctcttaagatcttcattgttttttatacaaaaatccgaaagagaagaccaatgcctgattgatgcaggcacttcttctaccgatgtgccgattagaaggagtctctcaatgtttgtagaaaaatctggaaatgttttcagtcgtgagcatccagtcatggtgatatgctcaagagatgccaagttgatgtgagttggtatgacttctagacttatgcagttagccatcactaagttctctagtttatgaagattcccaatagactttggaagctctaccaaagccctgcaatcacatagttccagtctctccaggtttgtagcatttgaaagatctgggagttccttcaaatgaactgatcttgacaaatccatcttcttaagatttgtcaacagctgaatgtcaaatcatagaagagagaaggaacatcagaacttcaaatgagaaacttcttatttcatatgttgctatttaactactgctaaaatgaaaacacagaatactatggtaactaacctgagttccttcccagagcttttcgagctggctatctttcatattgagttcgacaagattttccaggcaaaatccaagaggaagactcttgctagaatatagattcccaatgtagtaaccttaggcgaggtggaaacttcatgtcctcaggtatatgcattatgtat

SEQ ID NO: 16838 - DNA, 1583 bp, Arabidopsis thaliana landsberg
gatgagttttaaattattacggcgtgaagagaactaacccgagatgagtggcggcatggagtaggaatctttcgcgaattacagggcgccacctatcaaaggctggcaggatggtgtcttttcgagttttgaagcatcgaaagatatttccctctgtttccatcgctgttagaataaagaaaggattagaccaggcaaggagcgttaagtcagtaaatcgaaacgataaggcaggtataaacaaaaggaaggtaatttctaacccgtgagcgacttggtctgaggaaccagaacaaccttagttccagcatctcggacctcagcttcttctcgtcgggggtttgcactccggtcggccttttcacctccggatccagacgaaggagatatggtgactggaggaggaggacccatagagcggggtggtggcgatggccgaggagagtgatcagttcgggctctcgtcttatctcttttggggaggagctaccccgggttgatctgtctctctatttctgaatcaggtcagcaagcggctcgctgcttagtctagttcgggaggcaggccgaggtgatttgcggcgcggtgatcgttctctgcgggatgactggccgctatggccttcgcggtgaggaatgggtctgtaggcaccagcagattttgccccttcggcgctgccattgtcaactagcaaggttctgctatattctttcttgtcgactgcggattgaaggaatgatttgttcgtttcgcaagcctccacgatcgacttggatagcgtcttgcgtcgagctgcgatgacccgagcagaagtcccttgaggtaagggagggggcaatggcagttggagaagatgtccaggggggctcatccttagcttgtggttggcctctacgaatcggtcgagagtaaaggagttccagagagttccagagagtttccccttcggcgaattcaatagtcggaagggtcggtgcgatgaaagctgcgaattgaaaattaagagttggtcagataaggcaagaagtaaataacggtcatatgcatgacctaacatctatcgggcttagtagtccacttcgaggagagcaagtccgaaaggtttccaatcgaagcatggctctttttgattaagaaccacgagtgatgccagttctcgtccttattagggagatgcgagatgaggttcctgttggcgttcggataggccgagaagtatcctaccttctttgaagaactcctcacactgagaagttcaatcagttcgggaaccccgatgacatatctggcttcctccgcgacagtgataatccccataatagtccggaggaggttgggggttaattggggcaaggcgatttcaagggctgacaagtatcgaacgaaatcttcgggaaggggagaagtcaagccgcaacccttgaaatagatctcgtatacgcaaaagaatccgggacggtggcttctcggcgactcagtgggctccggcatttgcgagtccttcataacttcagccgggatcctgcagagatctcccaattgattaagagattggagagtgcatgtggtttgatagtggggc

SEQ ID NO: 16839 - DNA, 322 bp, Arabidopsis thaliana landsberg
ctccccttttttccttataactttaaattacgcagcagcaacagttccagtgcggaaagcatagtcacgagatctagttggcagaagaagaagagcttcgcttttcattgcttctcatagctttcacagatgtccacagactctgattcttctcttttgcttcggctctcactatctgaacttctctacactcttcactacagaacggagtgtctcctctgttttaacacaaacattggaacacattagacacacattatgtagatcatacaccatccttagttcccaaggcaaatcagaattacggtttcttccgtttggt

SEQ ID NO: 16840 - DNA, 1784 bp, Arabidopsis thaliana landsberg
  unsure (1)..(1784): unsure at all n locations
caagcctaacgatcggagcgacctgagctccggtgtcctcatcctcgttagctccggcctcttcctcgtctctgtgctcgtgctcgggttcgttggtcgccatagtatttactgagatttcctcgtggattnnnnnnnnnnnnnnnnnnnnnnnnagcgagagagatagagagaagagaatttgggggtttcgcaacacaggaaatcggaacgactcatagttatacggcgttgaattgaagctaactatgggccgatttcttatgacaaaaaatatatatggcccatataaacccattgtatctgggttatttttaaagctatttatctcaagggaaattaatccttttttagagaaatcttaatgatttatagcatagagattagagaaaaatcttaaagatcgaaaaaagaatatgatgatatgcttgagctaaactctatgtaacgacttcgtttcagtttgatacataatcgtacatgcataaccttggtccttgaggcctagtcgaaacaaacaaccatcttcaaccggtccggttccctctatgattcatttaaatgctccaaaatccgaatacttattaggatgaatcaaaagtcttctaaagcataaaaccaaagtctcttttggcctcttgagtcttccaccagcttacgaaccaaaaccatttgtcgcaatattttttcacattaaaatacaactatttggctgtaaacgagagttatcaatataaggcaatggctcgtaattaagacactcgatctcatctcaccgcgtaaaagatagttttgtccgatccgaatcacatgtgcaaacaaacaaaacttgaggctgtgattaaaagacaacgtttcgagtttattgctttgattatactgatacaacaaatacatagtgagaacaatttccctaaagatacatgtagtataaaccataatttccattaataaatgtaaaaccaccacaaattcatatggcagcgccgccgccgatcccccgtttccaggcggtaaattctgagacatagaaacgtcaattatcgccgagtcaccagccacgtcatcgtttggatccgatgatgtgttatattccgattctacccttgtggatcccgaatattccattgttgtcccttcctcttccgaagcgtggcatctaacttccacccaaccatctgactcccaaattactcctccggtcgtcgccaaattacaaattattgccttcgccgcgtcttcgaattctgatctccctacttcctcttcttcttcttctaagtcaaaccccgagttgacccagtcaagtacgcaacgcggagatgactcagtcggagatgagttgtgacactgagagagaaatggatgctgcaaaagctgatcgcaactccacctctgattcgggtctcgcttcagacacttttctaggaaatcacggccgatttccgacaacttcgaggggaaaaccggtaactcgtcagagaaactgattcgactcagcgagtcaattccgtggtcttcccaagcgggtttcccagtgaacatctcgatgatcgtgcagccgagagaccagacgtcactctccggaccttggtactctcgtctgatcacctccggagccatccaaagcggacttccacgtggcgtgatcagagccctcggtgtgtggattctgaacgccgacccaaaatcggctaacttgaccatggagctttggctaacgaggatgttcctcgccttgacgtcgcagtgaacgaagccttgagagtgtacgtggccgagag

SEQ ID NO: 16841 - DNA, 279 bp, Arabidopsis thaliana landsberg
aatactcgaaactggttcaatgccacgatgaaagacctatattgggcgcgttaactgcagaggagataaagcagttctcagctacgaattcgccaaggaaatcgccaagtagaagccctgaatcaccgataattggaacagttggtggttactggaacagtcactcaatggcaacgaacaagtacagtcgaagttattagaacttcaatttccacatcagataaagaattccacacatgttatggtttctactttgcctttgtgatattatttttattc

SEQ ID NO: 16842 - DNA, 491 bp, Arabidopsis thaliana landsberg
cccgctctaatatcgcatattcaagcgaccaagaatagtcattggaatagcgccttgacatacccttagatatagctttctagagctatatgtatctctatatatctctatatatgtgtgtctctcatcataattcagacaagggagtttattatccaatatatcaatgataaaatcttcttaaataagtatatagagtagagctaataataattacctttgatgtcgttaaacgtaatccgagttacttgattgaagtaagaaaagaaagaatctgctcagtatgagtaacataaacatttgcggtttcaatcttaggcatactatgctcaatgccacaaaacccatctggatattcttgaactccaagagctgcaaagaatgagcatctatcaaaaatccaccatcatttttgatgtctgattctgtaagattgtgtaagtctcccttgagaagatatctttgcattataatgaatatatacactattt

SEQ ID NO: 16843 - DNA, 763 bp, Arabidopsis thaliana landsberg
aaaaaataaacagtaacggtcacttttcctaacggaaattgctatggctcgatcttggacatcaacatacatcatacatggagacaacctgagaacaccttctttgcgaattccatgatttgcctagagctaacggtacaagcgcaggctgcaaccatatatgatcacatcctttttatcacttgccatgaagaaacctgtgaggaaggatcttgcaatgactgggagactcactctaactggaaagattctcggaagtctagtgaagactataatattcccggaagctgaccggagagacgttgatgagctgcccaacaatgggaaagaagggatccatgttttcactttgtggatgaatatgagcagatattcgagctagcattcaaaacaagatatgaacatgtctcaactatgaatttcttattaggacctcttgtctaacataatattaaccaaaaaaaataaaatgtgaagttataggcttattacaccgaccagcgatgtcggaagtatagtaaggatgctagaaggagaagggcttgcagagagatgggatgaatggcagaatcttgaagtgacgagacaagaagagtttcagaggaaatttaattgccttgtcacactaatagaagaagaagcgactagtacggtttcgtaagaaaatatcaagagagtattcacaaatttccttttcctttgaacctctttgtattaaaataagaaaacataaccgcctccaacggctctattgtatctctct

SEQ ID NO: 16844 - DNA, 1635 bp, Arabidopsis thaliana landsberg
  unsure (1)..(1635): unsure at all n locations
aaacccctctctttctctcattacactcgtgtgaaagaaacttagaaagaaagacttgaagcagagtagaaacagagaaattgcagagaaagtaaagtgcaagagagagtttttacgtgttcaggtctcagtgtgaaaccctactcacgccgggaaacttgttgtcccggaatccactagaatcaatccttatatacagttggctcttactagagcttgtacatacacaactcattaactacattcaaccaaacacgccattccatctcatctactctctgcatctttgattctttgtcccctgtttttcctgttttgttcgaacacttttacaaaggacaaaacgacacaaacctttaaaaggaaacaatgctgcaggcgtgcttcctcttcaacgacttgtacgagatgggcttcttgcgtatgggcctgaagttttctaactttgaatcaaaccttctgattccttgagagtcttctcttgccttctcttcttattcatgaaactcgaagacaaactctcacactagtattggtttctcaccagatttttttcttaaaacattctcctacgaaattgaactgatttgaaatatgaaaaatatatatttgttagtagttaagataccagtaaagtctattaaattcttcattttttttttgtaaaaagctggacaaaaaatgatatgtattaatcaaacctatgtttatatgcaataaacctatgttgtagttttttaattaaaagatattgtcattattttagctattttcaaacacacaaaaaaaatatagataacttgaaaatgtttagtaaaatctaactacaaaatgcccattttctatgtctattttcaataatatcccataatgttgtctattttgaaaaataccccatttatgtacaaatgactaaattacttttttagtaagagtagataatgaaaatgtgaatgttcctgccaaaaaaaaacaacaaatttgcaccaaaacaattttcgcaacgtgcaaaattttccttaaaagtaatctcataatttatggtagaaccatgattccgcaatttttaaccgaaacgtgatctcactttnnnnnnnnnnnnnnnnnnnnnnnnnnnnnnnnnnttgcttgcgaaacattatacctttaaaactttataaaaaccttgtaaaacgattttacaaggtatttagaaagttatacaaaatatttaaaatctttgagttaactttgtaaaatttataactcatctcattaaagagttctttttaaaagaaaagcaaacgagcggaaaaacaaattagaagtagtactatacaccattctcattctctggtggtatatgcatgcacatgtgcagcagagtataaaggcttaccaaaatccaatgtttgttgacttcattaattggaagcagaaaccagaaatgcaatcaggttcagatgtgagaaatctattagagacaatcatagaaaatcagagaataaagtatcattcaacaaaagtgttctatatgttcaacgtctctcgtcgacacaactattataacaacaggtgtgtatcacacctttgtatatcatctctggttgtacatcggagactttaattaattgtatcatataatacctattaaat

SEQ ID NO: 16845 - DNA, 2408 bp, Arabidopsis thaliana landsberg
gataaataacacacacattagcgatatatctatctgtttatatatccgttactaacaatgttaccttaaactctcccctagagaatagtctcctcttacgcggccttcccggtggcctacgaacgtaaggtggcgcaactttccgcctccgacatcactagggaaggtgccagtgtatccatgtccgggacgggcatgatcatccccttgtacgctaatttcagatatgggatggtgtggtggacgccgaccattgtttcgacacggatcccttcttttattgtcgctgctatggcatgggaacaaggaatagttagtagttggaattccctgcatgtgcatgacctttcccaaaggttaaccgcgaacgccgaatcttccttgtctcgcacctcataaaatgcatctcctattttaagcacaacaaaccctgcccctttttccaaattttcaatgaccatctcattgaccttggggggcaaaagatttccctcgtgttgtgcagcttcttgccgtagggcaaaccacgtaaccagtgtggttcgcagggtctctaagagagagattaccggataatcccttgccatggttaagacattgtttagcgactcagctatgttgcttgtcatgaaaaaaatacctatctcccacaaaatgcgaccgcgtccaatgctcaaaaccaatgccttcgaggtaatcagcacaagctgggtgcatagcccttacctcgacgaagatgcgattgaagtcgcttggacggtaagctcgggccgcactagccacgagaaagctcaacccttccgacttgaatatcgagacaatgtttctttttagatgcaccacgcatgccgcgtgcgatgacatcggataaacctagaaattagagccaatgtatcagtgttattgataaaacatactccatggataaaacacaaactataaagaaactgacgttcgaatattctgttagcaactaatagaaaacgtctcagctaacactgctgcgttattttaacgacactatttacaaccgttgtcaaaataaaatataagttatcctgtaagatcacactatcaatatgactagggaaattccacagacttttaagtatggataactccttagttaacaggtaacagtaaaatttatatatcatttaaccctattgttaacgattgataaatactgcataatagtggggttatagattcctataaaaataactatattcatatcgctgtaatattaatattatccgttatcagtaaataagttaccttgcgtatgcttgcatatattgacaagtgcctgtccgaaacgaagaccaaatccggatcatctgatattgtgtctgttagcctctccataaaccatgtccacacatcatcattctcgctgttcactatcccaaaagcaatggggaacacttgaaaattggcatcttgagcgctcacagctattagacagcctccgtatcggcctctcaaatgagtcccatcaatgattatgacctttcgcatataggcatatccctggactgcagcagctagagcgaaaatagatacttaaaacgctccacacccttgttgtccttctccgtgtctagggcgactaatgagttaggattggtttctagtaggagtttgaaatacggatgaatcaatgcgtagcttcccatcgccgatcccatagcgttatccattgctatctcacgagccctccatgccttccagtacaacacgttaaggctgaattcattacggattatcttcctcaactcatttggccttggcccctaccaactcccaagtactttgttctccttaatttcccaatcacagctatagacgcctgcttgtgaaagtctcccttggcgtctacactacaagtgtgttgttgggttgcacattttgcctcaaaacgctcactgttctccagttttggtgcataaacacgccatgggaaagtatggctgacgcacacggccaggagaatatttgggcaagatttggcgtaaatgaaatgaaactttctccgtattgcatggattgtcagtttagtcgcacaatcttctttattttttaacaatctgccaatgaatagatcatctccttcgtagtcggcatctttcagggctcgctgcaagtaatctgcaataggtgtaccatttgttagataaagtttttgttacatgttaaccttttactagcgaaatagaatagtagctacatgatagctacaagattcataacaataatatatccataagtataccagaaaaacacatgctacactaaaatttagtttctaaactttgaattagatcctaacatgttttaccttcttctcccggatcgtcgaaatatggtggggcgtccttgtcatacaacactgatggtactggtgt

SEQ ID NO: 16846 - DNA, 554 bp, Arabidopsis thaliana landsberg
ggaagaacttctccacatttggttcgtttggtcctgtcttaccctttccaacgattacactacataagaaatatagcacagctaccctcagacgagcatcagaaggttttttcatagacaataacttattctccacatcaagatactgaactgttgctccgggtccaaacatcttgccagcaaaagtggtacagctcaagctgtccaagggtttgggataattatggcagtataatcctgacatgagtggaaattcttcgagagaataccggatcggtacgccattgacaataaaccatacttccttcttcttatctaaacatgctgtacgaagaaataacagccacatacccatcaccttatgatttggatccttatgcatgtggaagaagtgtttgaattgtgggtgctccaaaaaccacttcaactcagactctttaagatgagtctccaataatccgactgccttatgaagataacactttgttgtaatcttgaatggctttgtatactcactcggaccgaagtacattttaagaggttgaagagcttca

SEQ ID NO: 16847 - DNA, 1866 bp, Arabidopsis thaliana landsberg
aatggttgtccaattatatctaagtttcggcctacagtctgcattcctctgataccacttctgtcacacccggattttaggggccaaaacccgggcgcgaacataaacaccaggtgtgctgggaccaagtctcacacatatgatgcatagtggcacatgatcgaatgtcacatatttactatataacaggagttctgtacaaaaataattagataattacatcatatgaggaaacgatccagcaacccaaagttgactgggagacgacggcctagacctctcacgaactcgtcgcagcatcctccaagcgcctcatcctgcggtacctgttcttgacctgtgggggtgtgagacagcaagagtgagctcacatacgttcatcgctcaacaagttgtggggaataatgtgtatgaactcgccaaaggtgggagctcatgtgaagtgtaaggcttaccaaagaggatggttaaagctaagcattgcttttaaagttgatcaaagttttattagcagttactaagtataagtagatatcatcccaaataaataagaggtcaaaattaataataaacccacgatgcaatgcatatgacagattaagtttaattccataaattaatcatgtgagggtccaaactactcatgaccgtgaatacgactgatataccagttttacactctgcagaggttgcacatctttaccccccagtcatgaaacccattttgcaagggatcgcgacttctcattcatctctgtcgaggagacaaggcagggtaccactacgaggcctttacaaagttccactagcttcagaaaacccgctacagtttataggaagctccagtgcaggaatccctcgcctgacctccatcgcagcaaaatcaacccaaggacctccctacactgaccactcccctactgcccttgcccctttcgggtaaggtagtcatccactagcttttctatttaatcagccaagggtgtcccattatacccttgtggtagcactgttttcccgggtggttctccatgttcccattaacataatgatcttatcatgaacagtaaataataaacagataacaaaagtgtgaacaatgagtaatgtatatctttatacccaaaaccatataaagcaatagcatgtactacccaaaattcagtggtaaaacaaggtataaagatagccaaactagggtaacctattgggtcccatcaaaattaacctatgcagatcattatgattaataagaacatgaatgggtaaaaagaagtgatcaaaggcacaacctgccttcaacgagctcctgctaaactacttctatctgctgaacctcaggatccacagtagctcaacacaatacatacatagtatagcaaaaattaacatctcaccaaacatgtaaataagatacacgacaaaaatctacacattaaaataagaacctaggaacatgattcattaattttggagttatggattttaagttatgaatttccaaaggttttatgtgcttgaaataggattaaatgataaataaattttcttattgttttcatgccaacacagagactctaggtgataaacaataatattacaaaattttagaaattggaatggaacaatttggagctaaaatgaatttaatatgaattaattaagttctaagaattgtttttgtattaaaaatgcattttctaaatcatttattctgattttccaattttttggattgtgcaccaattcttggaaagcgcaggggcttatcctataaaaattcctagactcagtctattgttactgtggacagcgggttgttttctaaaacacccagggtcttttatgtaaaaccgtcagcgcgaa

SEQ ID NO: 16848 - DNA, 641 bp, Arabidopsis thaliana landsberg
ttgaattgtttttagcattttgatttcacatttcacataaaaacacgcggttctttttatcccgtttaaaaaaatcggattctcgcgtctaatcctggccattgaatagatttattactagccatacgattttttagtttcacgcaaaaaatcttccgactatatttcaggcaacgaatcgcattaatttcatttaattcattgcgtatattcgtttccagctttcaaatatatcacttctccataattatacatctaatatttcgtttggatcttcatttagaattatcataaattttccacaagtattccatatatatacataaccacttttacggtaaatgctaaacattttcctataattatgggatttgtgatatggaataaacttgaattccacgaataatatcttctgcgcatatgtttttgacctaagcatttattcttataaatatcggacgcctcatgtcaatctactcactcatcttcacctcatacattcatttctaaaatcgctcaagccttacaagaacgcttggcgtattcaggttaaattgcttcatgtttggaggcaatattctgtaaaggctggtgaatccatcgaaatgattttggttgatgaagtcggacgtattatattt

SEQ ID NO: 16849 - DNA, 1595 bp, Arabidopsis thaliana landsberg
cgttaagtgattctcggtttaaaaattttttcaccttaaaatcatatgtttaaaatgttaatgtcatgaaaaagttaccctttgactaagaatcacttaacttacgttataatcttggccactcgattgaagtgtttgtgtccgttcgatctctcgccttcacttaaaaaacacgcggatccttttgacccaggtttataacttgtgggttatacgttataatcttggccattcaattgaattgtttttatccgtttgatttccaggcttcgcttaagaaaccacgcgcttctttttttcctgttttaaaaatatgggattctccttttaatcctggccgttgaatagatttatttcaagccgtccgattttgtagtttcatgcataaattcatttctttatatttcaggaaactaatcgtattaagttgagttcaatatcttgcgtatctttgttaacaattaagtatatatcacttctccataattatccatgaaacaatatttcgtttggatcttcttttggaattatcttacattttttccataattatagcacatataatatttcgtttggatcttcttttggaattatcttatattttctccataattatagcacatctaatatttctttgccattttcttttggaattattttacatttctccataattctatatatgaaacgtgatatcttacattttttataagtatttcctatattcatacctacttttacggaaaataataaatattttcctataattatgggatttgtgatatggaataaccttgaattccacgaataatatcttctgcgcatatgtttttgacctaagcatttattcttataaatatcggacgcgcgtcatgtcaatctactcactcatcttcacctcatacattcatttctaaaatcgctcaagccttacaagaacgcttggcgtattcaggttaaattgcttcatgtttggaggcaatattctgtaaaggctggtgaatccatcgaaatgattttggttgatgaagtcgtacgtattatatttttaacattatattttgtccagccttatagtgtgggcaagcatcattttcacttattaatgtagatttttaattcatatagggtgataagatgagtgctgctgtgagaaaagagcagatcaagaagtttaaaaggtgcttaactgagggtgtttggaaaatcattttggagagcctttcaggcagagatgggtactaaggtacagatgagcacggcttatcatccacagacagatgggcaatctgagaggactattcagacgcttgaggatatgttgcggatgtgtgtcttggattggggaggtcattgggcggatcacttgaatctggtagagtttggttataacaatagctatcaggcgagtattgggatggctcttttaaggcgttgtacgggaggccatgcaggacaccgttatgctggacccaagtgggggagaggagcatatatggtgcagattatgttcaggagacccggagaggatccgggtttttaactgaacaaaaggaactcaggatcgacacggagttatctgacagagaggagag

SEQ ID NO: 16850 - DNA, 612 bp, Arabidopsis thaliana landsberg
tagaaagagaagtgttgaaagacgagcaggtggagaagtacatagaagacataacaatcatgctcccgtaccttattagaaagcatggagtaaacatgagaatgctaacacagaggttggatccaatgacaatgagtagacccaacatacaatgcagttgttcttcattaggtatgtttgtgtttcatttttgagtttcactaattgtgtacaacgtgattggtttaataaaaattgtaacgagaaagagtgacttacatactgacaacatgaaattaataaaaaataattttagcaccctaatcattgttgaattacaggcattttgtagttggaacttgcatatgtttccaagtagtacaattattatgaaatataatagtataacatataaaactatttctcctatatgcatatgcactttgcttgtttgcctatttaatcataatattcataaacctgtagctgaaagataaaatcttgcgttggaatgaaattttatattctcatacagcataaactgaaactatgtatatgtcattcatgaacatatggtattattccttaagtttcatcaaacgtttaataaaactgattgattgggctcatgag

SEQ ID NO: 16851 - DNA, 1928 bp, Arabidopsis thaliana landsberg
aaaaacacgttctttcaacgatgtttagccctcttctaaaaccacattattgtatcatggaatgttgagtcacacattgcacacatatcactgcaactctgcaactaagagactgatcataaataaatcaatcatacaaattaaactgtcacacgtgatctcattaatttcaagaaatggaggatgataagagtcaagagacgacggaaaaaaaaaaagagtcaagagatgactagaagaaccaggaccggtccgccatgtaggaattttgtacgcaaataaaacatttatgccctttattgtttttatataatcacaaataataataatatacaaaagttctactaaaactttatagaacagtttttttaaaaattttataagcattttgtaagcaaaaaatggaggaaaaatcacaattatattctttaaatatacatctatttagatttttgcctgcaaaaccattcatcaaattcacataatcgaatttttcaaacatagttgtcttaatggatagcaaaaccaactcatttatttgattaatcaaaacaaagttttttattttgtaatcaaagttcaagcaccttacattagaaagtttttgattttttattttgtaatcaaagtcttagagtttaaatttttatttttcttaaatctaaaattttactaaactaaattcattaacaagacattttattgatttaaagagattaaagaaagatagtaaataaaaagcttaccaaatataaatatatagaaaatggctataattgttttaaaaaaaaacataaaagacttaaaaacctttttataaaaatatgttcttctactgtaatttcctaagttgtgtagaacgatggactataaccaaagtgttattcaatatatggttttaatagagctgtatattccaatatgctatgccacatcacgatatttttataatcaaacagtaacttatgactcttaaaatttttaaaaaacatattaatcttataacttcacgaaacagagcaacaaagggtgtcttgataggcattgattctgcaacgataaacgaccgtcgcatcagcgctaatacggagagccacggcctgccgcttctctggccctgctatgtttagaatgcacaaatcttgagccataaatgcactcctatcgacagctgcacacagagaaaacgataagattaatgaacaactttaagtgaaagcttcaaacaaataaaaggttatgagaaaacgcggataaaacgtttcaacagggtgtatacaactacaccactttggttggatgtattcgataattaatattcacaaactccatgctaaaggatttacccgagattaatttccattgacatgtctttgtcaaaccatgtttttaagtacaaacagttatcataaattaaaataaagtttttagtatctatagtcacgcttcaactgcagtgtcatttcgttccatgtggatcaaaatttttactcagctcgcctccccttagattactgatccttgaatctctctcagctaggtaatcacgtctatcacggggatatggtttaccccacattgatgttctctgcgtcacttcttgaagcacttcctgtactactcggggatttgtgtgaaagatcttgtgtatcgattttgcttgacgtgaggctttaggccctcgatataacagggtgtgatggtcaagcttctcttcatgccttggaaggcgttggcaattgtattctttcatcgttgcccctttatactccaagacttctccctgcttaacataattctcttttcctgagaaagaaatatctcgagtcaatggagatttcgcaccatgattgcaaaaatcatcatcaaattaggtccatggtttagaatagcctatattggtgttgtatgagtcaggcggttggggt

SEQ ID NO: 16852 - DNA, 1286 bp, Arabidopsis thaliana landsberg
aaacaccaagagtaaccatctgatatcattgtctagagtcttgtagcaatagtagatatagtcattagagttattcttgagggctggctttgtggctgactatggcagattcgggctatattgatggatccttcttgctctggctccggcacgattacagatcgattggaccatctgcttccttctcattcagaaaggattagctgatcttctgtgtgtgtgttatgttacgaagtgactgaaccttaacacacctttccatgtagataataacatgaactatgactccatgagactacacaagctcgctgttttccagaagaaggcccttgcccatgcactatcctgtgagtacatacttgtctcatgttagctaaagcattataagggttttacttagcttttgaagaatctccttaacacgttgatctatgttaaacgcttactctagatatagatatgaatgaatgagaactaaaaattagtattgaacctatgcctatacactgtagttcctcaggttgagagagtagtatacagcacatgctccatccaccaaatagaaaacgaagatgtcgtctcatctgttttaccactggcttcaaccttgggcttcaaactcgctaccccctttcctcagtggcagcgtcgtggtctccctgtatttgaaggatgtaagtatcgcccttaccatctggtttcacctgatttactttgtttctaacaatgtgatcatgttggctttggcttgcagctgaacatctactccggatggatccggtggaggacaaagaagggttcttcatcgctttatttgtcagggaaaacaaactcgataacccaaaatcgtctgaacttcccaatagagtttgtagacgaagacgcaaagaaagaaccatgcaattacatccctatctttgtcccaaaatgttcagagcttggagtgggaccttgcacaggctcaagactaggttcctgttatcacgtaatggttgttgaattttcgattttgtttatgccttgatcttcatgttgtcgtcaaaattttgcaacaaaggcatgaaaggaacatcgtaagggtaaaatcagaacctctttaactttttgtcacattacaaattgcaatacacaacattttggttttttcatcaaaacagaaaacagtcaaagagagataataagctcaagcgacttgagcctgaatggtttttggtttcttaggctcgggagaaggaagcttctcaacagtcacccctcaacatattgtctatgtccgggttctttgc

SEQ ID NO: 16853 - DNA, 1122 bp, Arabidopsis thaliana landsberg
agagaattttaggcgttcagcgcccttgttgcttctgtgcttctttttctttggccctgactgcttctccttccttttcttttcctcggttaaaagttcttcttctaatgcagctaacttggctttggcatccatatctacaattccttccaactcctcctaaaagaagattcatcaattataaggtacatgcgtcaataaaaatatcagatggaagataaaatctctatgaaccaatttgattaaaaaccaacccgcaagaaacgtttcagcaagggaaggatataagagcggtagtcaaaaacagaaagcctgatgaggtcgtttagcaaatgtattcttgaattttcaaccagcaaaatctttgaatcggctagcagaacctgcaagtcaatatagattttaagaaaacaataacggttatttcgttgtaaattaaaacttagatcaggattgaaccttgctagtgaccactgatttcagaaggtcaatggactttaacactatatcatcactgatatttataagcccatgtataagttccaggcaatcttctgcattagtgaaatcaaatgtcggatgtgatgctccttcgagaacatctcgtactgcacacaagtataattctgtaaaaagaggatcttcagtgtctatcgttaactgctcttcacaactgtcgcatagaagagatgcatatatgttcctttgatcttccggaacattcattctactttcatcttcttgtatacataagttcctggcgtcattaagacattcgtcgtaacataggatctgccacttctttgcatatctggttgccaaagtcctacgcgtgaagtgaatggctctcagaacagccatccttatatcaagattgtgtgccccaatagatctggggaacccaaagctcttatctattaaagaatagtcgtcaagtaaccaagttatgatatcatcgccctgaggatgtgtcttggcgtagtgaacattgtgatcacaaacatctattgacccttcatcatcaaatgaagcaatcttgcctctcagcaatctcttatccagaagcataagtgaacactcatggtcaatatcaatcttttctttaacttgagtacgacgcca

SEQ ID NO: 16854 - DNA, 1447 bp, Arabidopsis thaliana landsberg
gatttccgtgccgggtactggcattatcagtgctttgtatgacaatctaagctcggggtttttgtgatggactccaaccatcgtgtccacgcagattccttcttctatagccgctactatggcatgagagcaagggatagttaggagctggaactccctgcacgtacatgttctctcccataggttaactgcaaatgctgagcctctcttttctctaacctcatatagcccatccccaatctttagcacggcacatcctgctcctttctcgtaattttcgatcacgatatcgtgcactttaggcaggaggatattatcctcacttttggcagcttgcctcctaagcgcaaaccatgttacgagtggtgtgcaaattgactataatatggaaattaccggataatctcgagccatagttaacacattatttagcgactccacaatattacttgtcatgacgttatatctattctcaacaaaatgtgactttgtccaatgctcgaatccaatacctgctaggtattcagcgcacggtccatgtgtagcctaaattttagcaaatatcatgttgaagtcacttaggcgatgagctcttgctgcacttgataccaaggcacttaggtgatcagattaaaagtaaacctcaatgttccttttcagatggacgatgcaagcaacatgagatgacattgagcaaagctgcacaatgaccaaaggcgttactgtttaatttagcagataaaaagattttccgttaagttcatttgtatgtggtaaagtttatgttactctattaccttgcagatgttggcataaataaaggagtgtctgtcagacacaaacaccaactcaggatgatccggtatagcttataatgaaccaattccacgcctcatcgttctcgatgtttactattccaaatgcaatgggaacacctggaaatttgcgtcttgtgcactagctgcaatgaagcaccctgcatattgtcctcgtaggtgcattccatcaattacaatgactttcctcatgtaagcatacccttgaacacatgcatgaagcgcaaagaacaagtacttgaacctctctacgccagagttatctttttcggtctccattaccaccagagaatttggatttgtctttaaaagacgcttgaagtaaggttggattaaagcgtaactccccatagcggaccccaatgcattgtccatggcaatttcccgtgcccgacatgctttccaataggaaacgttgaggctgaattctgggcgtagcattcttctcagctcattagcgcgagccccggcctactccaatatatttagtacgcatcaactttccaatcacagccgttgaaacctgcttgtggaagtctcctcttgcatccatgctacatgtgtgggttcgggtggtgcttctgacctcgaaccgatcgctatcttgcagc

SEQ ID NO: 16855 - DNA, 807 bp, Arabidopsis thaliana landsberg
tgcttcacttgaaatcctaagaagtacttcaactcccccatcatagacatctcgaatttctgtgtcatgatcctactaaaaaaatcacatgtagatacgttagtagacccaaatataataacatcaacataaatatggcatacaaacaaatcattgtcaagagtattagatagataaagtaggatcggcctttccgactttgaagccattagtgataagaaaatctcttaggcattcataccatgctcttggggcttgtttgatcccataaaacgccttatagagtttgtaaacatggttagggtactcactatcttcaaagccgggaggttgctcaacatagacctcttccttgattggtccgttgaggaaggcacttttcacgtccatttgataaagcttaaagccatggtaagtagcataggcaagtaaaatgtgaattgattctagcctagctacaggtgcataggtttcaccaaaatccaaaccttcgacttgtgaatatcccttggccacaagtcgggctttgttccttgtcaccacaccatgctcatcttgcttgttgcggaagacccacttggttcctacaacattttggttaggacgtggaactaaatgccatacctcattccttgtgaagttgttgagctcctcttgcatcgccaccacccaatccaaatcttgaagtgcttcctctaccttgtgtggctcaatagaggaaacaaaagagtaatgtcacaaaaatgagcaacacgagatcgagtagttaccccatttgaatatcacgaggatggtgttacggggtga

SEQ ID NO: 16856 - DNA, 1401 bp, Arabidopsis thaliana landsberg
cataacatctttcttttgaagacagaagttctgcagttgttttctcccaatgattcttccagtaatcgctggcgtttcggtcagcttcggcagttgcacacttcaatttcgcttcagccagctgtttctgaagattttcaatttcgcacttctgggcttcagcttgggccttggaagtagcttcgtcttcttgtattttgttaagcaatgaatttaatattttatctttctcaagaccttcgctccttagctcaatcacttcggaacgaaggttatttaatgccatggtacatccttcgtcttcagcgcttttctgcgctctgagggcattgctaaaaataaggccctgcaataggaatgtggtattaagaaataaacacacgaatttttaaccacgcaaaaagtttattttccacctttaagttgttgtacactaagctgtcggccaattcatcttttgacagcaccgaaagtccgtcttctaaagttgggaatccgaagcttttgctcatctcccgacagacagaaatttccttgttgtcggggagacaatacaagaaatcttcctctccactgccattaaatatcaacgcccccttcggatatttcaacttttgggcatagtgctgggcctcttgttcttctttttctgataatttcttccccgaagcatgacgaaaaatagaatcacgaattttgggggatgcttcgggggtaacaactccagtttcttttgcaagggttggctttgttattttttctgcctcactttccaaggtctttgcctttgagggctctgagggcccagcttcgacttcagtatcttgctctggagctttagaacccgaagcttcgactgttgtttcaggagtgacggcagccttcttcggaggggtgcttgaagatttgatcgtttccagcacatctagcacattagccattctccttcttttcggagtcactgctggcactttttgattacttactgtttcaatgattgccacaggactcaaaacttctgatgttttggagtcctcggttgcttcctttacctcttccattttttctgtgaatggcgcttcggccttctctttcgtttctgataacaaaatttttgattgctccaattttgtcttcgtaggtatttcggctgtttctgtggcttctggcagcaaagttggctcggctggtttttcagcttcggtggccgaagagtttcaccgacatattcaggcactgtggccggttcaatatagcgtggccggtgcgtaagaacctttatctttttcctctccggccctggctcaataggagcggctgaagcaacttccttcgctgaagcagtatttttccttttctgaccccgtgttgggtaacggtagtcagggtacacgaactcaa

SEQ ID NO: 16857 - DNA, 1005 bp, Arabidopsis thaliana landsberg
tccaagactccgcgtcgtcgccgtcgataatcgcaccgccaccgctaccgttcattactccggcacgctctccgccacacccaccaaaaccacttcaccaccgcctcaaaacgccacctctgtcgcaaatacattcgttaattccctcagaagtctcaattccaagacatatccggctaacgttccgatcaccgttgaccacgatcttctattcaccgttggattaggaatcaaccgatgtcacagctgtaaagccggaaacttctcacgagtcgtcgccgccataaacaacattacattcaagatgcctaaaacggctctgcttcaagcgcattactttaacctaaccggaatatacacaaccgattttcctgcaaaaccaagacgggttttcgattttaccggaaaaccgccttccaatttagcaaccatgaaggctacaaagctttacaagcttccatataattcgacggtgcaagttgttttgcaagacaccggaaatgtagcgccggagaatcatccgattcatctacatggatttaatttctttgtggttggtttaggaactggaaactataattccaagaaagattctaacaagtttaatcttgttgatccggtggagagaaataccgtcggtgtaccttccggtggttgggcggcgatcagattccgagcagataatccaggtttttatcttattatactagtacataatatctacaaactttgtatatgaatttttgtaacaatgactatttgaaataatatatatatatatatatatatgtatatttgtgtggtttcaggggtttggtttatgcattgccatttagaggtacatacaacatggggactaaaaatggctttcttggtggagaatggtaaaggcccaaaccaatcaattcttcctcctccaagtgatcttcccaaatgttgaaagctccattattattttttgaatcgattaattcgtttcctgacattttaaaattttaatatgtg

SEQ ID NO: 16858 - DNA, 752 bp, Arabidopsis thaliana landsberg
agttacaaataccaactattatagaagctgctaagctattgttcatcaagttacatcaattacttatgatagaaccatacaaaagctcatgtaatctcttatgagaacctatctttcttttaatcaaaaatattttctaagaagatcatcttgttggtatgtatattcagcaaaacccttaatctattttcttgcgtatatccaaaggatctaaatttcggtatcttgaagcccttccgcaagcttctgtgatatgcatcgattcattcaaatctatccaacatcacggcttcacagccacctctatcatttgctcaacttaaaagtgtcgagtccttgggatgatctcatcagaagccaacccgattcaaatcctatttggcgacgaggggaacgatgttcttcagcccaaatcaaagcggaagaagagaaaatggaagaacaaagtttaaatgtgtttcaacagacaaaataacgtcgttttgtctctacaataaacgatgtcgttttgttcctaatagagcaaataaatgagacattaatgccgtaaaaattatgttaacctatttaacgacatgactcaaatagcaagtcaacaaaaactttgtcatttatttggaaagttaacaaaaactttacgatttatttgttttccgtgaagttcaagattaaatcgtcccaaatttgaaagtttgtgatttttttgacaattttccccatttttttaggtgaattggaataaatgggcttgg

SEQ ID NO: 16859 - DNA, 219 bp, Arabidopsis thaliana landsberg
gattctgccagcaactaaactctatatgaagaaacacaacatttcttcacttaaagttgaatattgtaacgaatacctgttgatcaaattcggggaattcgtagacagcacgaacaactgctgaactagcgaggcttccacaggtcaaatgagggaacttaagccggaaccaagcacttaaagctccagacaagatactccaaagaaaaaccacggatt

SEQ ID NO: 16860 - DNA, 2167 bp, Arabidopsis thaliana landsberg
attgttgtttgtgggtgtgtgctgtggatgagcggttatttttgagtttggctgttggtgttaggtagttcaagtgacttcagctcagtgtttttctattgattttgtaaagtttcttattgattttttctatttgattattgaatatttggtggagacaatttatcgtgtcttatgatctttaaatcaactactgtagtgtacttagaattagatatcacagtgtttaagcatttacaaaacttagagatgaagttagagcagacaatgaaaatggaattcaaaagctttgtttttttattagtctgtaaaatacattatacacttgtagacttgtagtatatttataggcaagatagagataattttcatctatatgagccaataattcccagtttatatgtacatttatatctgtattctatcaatgacttgcagagagccttaaatttgttacaaagaaacagattttatcctgaaaaaaatggagtcagaaagctattatttggctgttctttttacaagagagatcccattgggttcaccaccccattcttcaagtacaatgacaaggttattagttggcttcagccatgaacgaggcacatggtacctgtaaacgaagataaagttcaaacctttgattcaaatttggactcaagaagaagaagaatttaggcagttttactcaccatctttgtgaagcttctccacagttactcaaacatttcttctctgtgaaagtcccggcatagctgcagcgttcgcatttcccacgagctgtatatgctggccagtggcgtccgatgttctgcccatttatccacatttgacctttccccattgtgttcatgtctaaagccaatggttcattgcctgttggtgagtcaaaagtagactgcaaaaagagatggtgaaaattctgccctgtggatttcggttttcattatattgatctaactttgttggtggtcatgattcattgattactctgtttctcttaccttgtaccaggtcaagggctgctttttagccactaatgatccttctttccattctaccgttgaactcccggctaaggtatgaacgctcagagcttcacccttagtaccaatctgcttgaacacaaatgaacaaatgtttatttcattgttaatgattgttggtaagtcaaactcgtttctcttgaatttcaggaggaccttgtaagaccatttccatttagtcatgtcccatgttccggagttaactccattcagtgtcactgggccaagaactccagtattccaagtctcataatgcacgccaacgttctgtgagcaatgaaggaccaggaagcttagaacgtaatcagtgtatgagaaaaaagcgcagagataaactgaggagaactaaccggcagacccgctgcagtactcaatagagcaagtttgttgacccctgcatgtaatttgatcttctgactaaatgctagctttggcttctccagcgatccatatgcactgcctgaaacacagaaatgtgtaacagatgacaaaggcgatctaccatgaggatgagtatggcctatcttaatgctacctgcgagctggccattaacgaatacatgaagagcatgcccagctgacccaatagtaagaagagggtgctgcaccagttaggaacttttcatcaggactgattgtaatactgatttatatccacagacaaaaccaaccgtgagttctccctttgagacaggaagatagatagtaaccaaaatgttgtcaagaattttctagtattactcactctgtcagataccagaaatagtctgtcttgtctctggtgatacttatctgttccacaagcccatcttgtgaaaaggtaccattgtcatttgcagaaggaatctcttcgttgtatgaaccccaagagaatggtgtgtttgtaggaaccatcttcatgtgtatgcttgatgtacggacctgtaccttgtaacacagaggtcaatttcagtgataccatcacccttaacatatcaacaaggtaatgtgtttgataagtttttttctcaaagttgatataccttggcagtgttgtaatactcagttttgcagtcgggtagaatactgacagaccaaggaggcagatcatatgtagatccgccaaacaagactcttgcagc

SEQ ID NO: 16861 - DNA, 1062 bp, Arabidopsis thaliana landsberg
acaaccgaagatgctattctagcaaaccaatgcagaggagtgatacaatcagaggttttgatgcttgactttctagctgaatctgataatgacatatcaactatagcgtctgctgctgctacagatttttcttgttcctcttcctctctaacaagaaagctccctctggtctttgatttagttcttgaactctttctcataaccttgtctggttctacttgtggtttacaacattttctcttaaactcaggctgtgaacttgaactaacttcctccagattatgggcagattcagggatgtatgaggcatcttcattaacaccgaagttcgagtcaagatttgagcctttccgggatttggtgcgaggattttttttaacatattttgctccacgtttagctttcttccttggctgtgagcaacgtgtgtggaagagtgaaatggtttccaaacatgggagcgctagaactaacgatcttgacggttctgatccgtgttttccgtgcaatgaagctgaaacaaactctcggggttgctcagattctataggtacttcttcttcaggtgaaaggggagacatattcaagtcaattccattctctgcaccaagacattgatagctttcaataaatcaagacaatgttacaaaaacaataataagtaccataaagtaaacattactcaccagcttgacattcttctccaggtgaacgttctgctctttcactccttgtttgggctggagtagggaactgattaagctcataatctgaatgttcctcgatactggaaggttcatttaaatcgagtatacatttgaaacttgacaaatcaggtaaatcctgcacactttccggctggagaactgattcgagagacctgcttcttgtagattgatctttaggaaagtagggaacttcaaggaattctccattctttgaaccttcttcttcccatatatcacgatacccgtaagatggtaattcaaaatccaagaccttctctccagactaacaatctcatttccagaaataccagcttcatcaatcttggcagatggg

SEQ ID NO: 16862 - DNA, 929 bp, Arabidopsis thaliana landsberg
  unsure (1)..(929): unsure at all n locations
tgtggaaggtggaagtggaggcagggctagaggtgtagggagattgggtaagtaggaattagtatattggtggatgtaggagagagtaagtgaggttgtaaagtgatctagtcctaattaggagttgattactctctaagtgtttggaacacatctcaaaaaggaaatgtagtaattacacaaagcaagagattaaattataagatgaactaatctcatttagaacttgattattctttaagtgttgtccataattacataacctaattatattcatttcattgagacctcaaagttacaccagcgatgaattcatgtaatacctattatcaatctcacaagatcaaatatactttaacttctagggatttccgttcatatatttcattcaatgaataaatcaacacctacattaaacttatactctaggtgtaaaatttaaagtgtacaaactatagatgaacataatttatttggacagagaataatcttatgaacattttgcaatttgaaccactaaatttggagttcatatgaaaaagatatgaaataaacaagtttggaagtttgaaatatgaaattagggctaattatgtgattaaataaaagcatagggggctatccaaaagaaaccaggggtctgcgtgctaaaatccaggacggcgggttgatttcctaaaagccgagggtctcttaagtaaaactcacacgcgaaggggtacggggtaatctcgaccgtcggatccgagatcaacggacaggattagatcgcgaggcgccgtgcgggcgcgccgangngacgcgactgacaggcggagcggggcgtccgagccagggtgggctgatcggttgggctagggcagggcgcaggtgaggggagaggggaacggccgatcagacggaggctcgacagatctcctatgaactac

SEQ ID NO: 16863 - DNA, 760 bp, Arabidopsis thaliana landsberg
ggatcatgacgcaaaacagattgaaccgaaggagcagaatggtggcaaaaagggtgggaagtcaaatgattctacgggtgccaaacaatatacattgaagaatattcttggtgacgctttaggctatgggccacagctctcagagcacattattctggatgctggtctagttccaactaccaaactttcagaagacaagaaattagatgataatgagattcagttattggttcaagcggtgatcgtttttgaagattggcttgaagatattataaatggtcaaaaagttcctgaaggttatattctaatgcaaaaacaaattttggcaaatgacacgacttctgaatcaggaggtgttaaaaaggtcactattttactctatgcttcttcatttttgtattgtttaatggcaatggattttatgtattgaattttcgtttgcctggttgcctacagatgtatgatgagttctgttcaatcttactaaatcaattcaaatcaagagtgtatgaaaagtttgaaactttcgatgcggctttagatgagttctacagcaaaattgagagccaaaggtctgaacaacaacaaaaggcaaaagaagattctgccagtgtgaaactcaataagattcgccaagatcaggtttgtggtatttattaatgtactggtttggaacttccatttccatatatctctgtaaaacttttctttaaacttatcttaattgcaatgtttctatacttgtgttttaggaggaccg

SEQ ID NO: 16864 - DNA, 1318 bp, Arabidopsis thaliana landsberg
ctgcgatgaatgctatgaaagatggatgaaactgatgtgtaaaattttcattttatagacatatcaaaactcagcttgtgtagagcttagtacaacgttctaagacttcaaagaaagaaacaaaacattaatgaaaatattggacattaattgtaaaatatgtccaaataagtcaagtgaggtgtgccttgtatcttgtcaacctggggaggaagttgtgacgtcttggaaggttcttgatgctctggaatgtcttaagtagacgctcaaacaaaaggggaaattgccatgagacaatgatgacaaacaagtccaaatttggtaattattgctcctaattgatctgcctgatcaagtgtggtttggtgtatcttagagcttgtagtgaagcatctaagtgatctagaaactctctaggctgccaaacaaagctttgagacacatcaaaatgtacaataagtaagatttccttgtgtatagcttcatttggtatggtacaacaaaaggtagttcagcgtgtagattagcaagtggttcagcaagtagattagcgagtagttgagccggtctgtcaacaagttcatcagctatatgtacttgtgatatcttcgaatcaattattttgtaaatgattccttgatgacttgatgttgtctcgttaaaaacctttctaggtaaacccattctgacaaacactagataagagaaaaagaatacaacagtcatatttccacaatatggtgactcggctcgttggtctttgactccacttgaaccatcatttgacttcttagggttaatttgctggtgaataattaaccctaggccttgtgcttgttgagactccaattggacaagagtcctgcataatgctccttattaattggtatgatacatgtaccggctagtttggtgtgctcccgatttggtttggtttggatgtccgcatcagatagccaagtcaaggtctcatctacctgctttgtggatagcatatctacatcaattcacattttctattaaccataagtcgggcaatttgaatcgcgtagccgacgcattgagtaggcgtcattctttgttgactataatgcacgttgttgttcgaggttttgcgtctttctcggatctttatgaaacaaacacatttttagtccaatctttggcgaagttaaagatggttcttgttccgacattttgctcgcggatggggttctttaacttgttggtcgtgaccggactcgccaacttgtttttgcttcatatttttggtctacactttaacgtgatgttgagagatttgtggaacgttgtcagg

SEQ ID NO: 16865 - DNA, 766 bp, Arabidopsis thaliana landsberg
taagacataaactatttcctttagttcttcgtgtaagaaggcagttttgacgtcgaggtgatgaatctcccaactatgagctgctgctaagtcgatgagcaatcttattgtttcaattcgtgctacaggtgcaaaggcttcttcgaaatcaactccatacttctggacataccctttagcaacaaggcgacccttgtatttgtttatgcttccatcagagtttgttttaagtttgaatacccacttcagaccaatcggcttcactcaaactggtaagtccacgagattccatgcctctagtctctgaatagagttgatttcttcttcacaggcgcgtatccactccttatgttctcttgcttcataaaaacatctaggctcgttgtttagagtcaaaagtaacatctcaccctcctcttctgcaagcaatacgtaatcctcaaggtattttggtctactaacctgtctagttgatcttcttaatgcttgcagaggagaaacactttcacttgactctgttgcttcttctattgcttcttgacttgtctcagaattagaatcatcattttgttctaaaaaaatataatatgtgtgtgcatctccctctttctctttaaggtcatgatcaccaagttcttcaatcatgactttgaagcttccttttccgtcatgtgttgagtcatcccgtgtccccttccagccctttgtctcgtcaaagactaattcacgactgaccactactttctttgtttgtagattgagtaat

SEQ ID NO: 16866 - DNA, 2810 bp, Arabidopsis thaliana landsberg
agaaatgttggagcataatccattcttttgacgaattcagtattcggcatatctctagagttgagaatcatagagctaacaacttggcacaagatgcatcgggttatcggataaagagagggaaatttcacaaaactgaaaatctgataaccagtgcagagccaaattcccaggtcgcggaccgtccgcgtgttgacgccggaccgtccgaggttaccagaaaggttctcttaatcgattcggctgacaatgaagccgatacaagtgattggaggacacctatacttaattatttgcaaaatcccaatatcaggacagataagaacattcggcgaacaactttcaagtatgtcttgatgagtgatgaactttaccgccgaacagtcaatgacatcctgcttaagtgcttgggcccagatgatgctatattagccatggccgaagtacatgaaggaatttgtggtactcatcaaccggctccgaagatgaagtggttattgcgaaggtctgggttatattggcccaacatgatagctgattgtttcaagtactacaaagggtgccaagtatgtcagaaattcagcgacctagagttggttcccgcagccgaattacatcctatcattaaatcttgacctttcagaggatggggattggactttataggagagattcatcattcatcatcaaaagggcatcggttcgtgtaagttgccactaactactttaccaaatggactgaagtcgttgctctgaagaacatgacacactgggaggtaattgagtttgtaactaaacatattattcatagattcggtattccccagactttgactacagaccaggggcttctttttttgtcaaagaaggtacatgagtttgctgaattatatagaattaaattgctcaattcatctttgtattatgctcaggccaatggacaggccgagactattaataggacattgattaatttgataaaaaagaagatatctgataatcctaaacattggcataagattttgtctgaagctttatgggctcataggatatctaaacatagggctactcaagtatctccttttgagcttgtctatgggcaggaagcaatgttgcctgtagagataagtttaaatgttgtcaggttcgctagacagaatgatctaactgctactgattattataattcaatgatggataatattgatgaggtgaccgacaaaaggatgatagctttgggagcaatagaaaaggacaagatcatggtagccagagcctacaacaagaaggtcaaagcaaaatcatttcaagtaggggacctggtgtggaagaccattctgcctctaaggaataaagaccggaagttcgggaaatggtcaccaagctgggaaggtccttataaagtaaaacaggtgatgtctggcaacgcctatttactacaaacattacaaggcaaggacttacctaaggctttgaatgggcgtttcctcaaacagtaccatcctagtatgtggcaagatgcctaagagaaccgatgtaatcacatcgagttagttgcttttggtttgctcagctccaccaaaaggcaggggggcatatgttgagcaccaaattgagcaggcggacggtccggccctgaggccggacggtccacggtcctggacagtccgcgcatgtgggctggacgtgccgcgcatcgcagagcagtttagggtccgagttttgtgctatgtttgttggctatatccgcggaattagctcggaatccggtcgtgtaaaaggtccagcccccctcctctataaaaagagaggcctacgaccgatttgtaatcaacaatcgaatcaatacaacttctattcgcattttatcctaggagtagttctagtcttgtttaggtttagcctctcaatccccaaattctccgcctctcctcgactctacgtcgattagaggagtctaggtcggtctgcccgagcctagacaccacctaggatctctacttcccgacggggtcctcccgggagcgagatccaggcgccgccgacgatcttccgccgtccctgcgtacgcgcggaccgtccggccccagggcgcggaccgtccggccgtcaggcaggaaaccttagcccctgcgccaggccgcggaccgtccggccccaggtcgcggactgtccgcgcctgaccagagagcaccagccgctcctcgcaccagctcgtggaccgtccggcccctgtgccacggaccgtccgcccctccgcggagagcaccaccacggttcttttatagtgtttggcgctccgaaaaggcgtcaacacactttttggcgactccgctggggaaacaaatatagacgcatcaaatcggccctcaatggccagttcaagggatagctctgatatttccccaagcaacatcattgagccgacttgggaaaccttgccggctgatgaacagctccagtttgaggagcacaaggagcgtatgatccaggaggcaaaaacaaaattcttggccagcttcaaagtggacaggaacaacaaggtcgtccgacatcgggcgacggatccgcgtcgctccaacccacaccagatatccccaatgtaagtaataccaacgagctacaatctcttagaaattatgtagaagagcaacgtgagcaaatgcagaacatcatagggggtatgcaaagtgattttaggaaactagtacgtgcatttgataaatctaatatcgcaaattttccttctcacgaggttgagttagggggtaacacgcgtaatacatcggctacaggttgtcacgaccagt

SEQ ID NO: 16867 - DNA, 1952 bp, Arabidopsis thaliana landsberg
ttgttatattgagtctattgaagacgaaaaatgctctctctctttatgtgatcttcttctcgccgtcaggtatttatccggctaaatgtccagcatcttgtgttgttcataacggtgatggtcggctctctttggtttctccactaacggtgactagctcatgcccgacatcgaccgcttttctagtggcgatggccggtttcgtttcttctataatttctaaatttgttttgtttttgctaataattgttggtgtttatttacataaatattagatttaaaattcaaaaataaatgataaactaaatttctttttcaataaaacaacatgcacactatatatttttgcttaaaagattgaataacttattatatatatttctctttaaaaatagggaatgttccaaaataaggcacttatagagaaagtttggacgtttgggacacttttgagggagtgggcacttttctaccttttttactgattttatgaccaatttacccttttaaacgtgagaaggaaaaaaaacaggagatcaattaattttgttgccaattactaaaaaataatatacgtgacattagatagagataacaagttaaaaattaatggtaagatcagttaaaatttagtttaatcaaataaaaatatttaagtcaaatattatattaaataaaaatatttaagcctaagtaatattatatatttctaacaaatatcagatattaaactatgttcctaattatgtatccaatatatattgtccacgtaaacatattcaaacagttcgcattatatgaaatgctttaaatcaaataaaaatatttaagcgtaagtagtattatatatttccaacaaatatcagatattaaactatgttcctaattatgtatccaatatatattgtaagcgtaaacattatatgaaatgctttaatcaaaataaaaatatttcagcgtgagtagtattatatattctaaacaaatatcagatattaaactatgttcataattacgtattaacgtatccaatatatattgtccacataaacttatccaaaaaattcattttatatatatatcaatacaaggtccatcaacaaactttttttagaatatgatacaacgtcgttgacacaagcaaatggtttgtggtgtgtaaaccttatacccttaaggctctgcactaaagcctacattccttaccctaaaattaaacccaaaccctcaattcctaatccttatccactaaatccaaaatcgtaaaacaaaactctaaaccataaaatatattgtaagcataaacaagaaagtgataattttactgagagataaaacaaattcacagcaaatcaaagacaacatgtgtccattgatgatcgtccaaccggtttagtccatgtggtcatctaatgacacacaggatcgtttcatttcaatacacaagttcatatatgaacgattatcgccagaatcaaattcgatggaaaaaaaaacgaaaatttttggaacaattcaaattgtaaaaatgtgatctttacgaaattcgaccaatatcaattgcagatctagatgctaaacataagaacaatgaacaaaggaaacaattttttttaatcaatttcttatatcaaattgaaacccaaaattagctggagaacgaatctaagatctaagtaaagatttgaagaaatgtaaaatggagcattggagataatgacataaatcaaagacatgaacacatgtgcttagtgtgttagatggagaattggagataatgacatgaaaatcaatatgaatcatgtgagagagagagagagtactaacttagagaaggcagcggaggattctttttcgagccaatcgcggatgtgcttgatgttacgccttaagatggtgacagattgccttcacatcgtttttgtaatccgaaacttgactaatgaagctat

SEQ ID NO: 16868 - DNA, 1428 bp, Arabidopsis thaliana landsberg
atatctaatggtgtggattgcaatctcggaggttagtcactattggccaagaataattttttcgtttcaaatcccaaattagcatatacaatttttttattaatcaaaaaatataaattatttttaaataatttcaatataattatttcatttttaaaatattatttcttataaatataaaattttaaaattaaaaacaattaatataagatagtattccaactatctaaggggggtttattcaaacttgatttacgtggatttttaatgactacaatagtttaggaatctcgtgattctctaatatttacaaaagtattgtatcacggaatctgacatattctcacaatctttctcatttttaaggatatattattgtagagttttgttaactttgtagatatcattgtaaagatcgtattagaaatatatttctcttgctcttttaatttttgtgaaataaattggtttttcctctacttcattatatatatcgttgctttttcacgctcttaacaacatcatcattagcaagaacttgataaacagtggtacgtataaattttcttttttctttttgtcttgtttgtataatttctttcttttatgtgttttgcacgttagtttttatatttttattgcattggttgtctttgtttctttagaattgttctagattttgaaacttttattttcaataaagtaatatagttatcatataatactagtattatgattagttaacagtgatttatgatgggagatccaccacgtggtaaagaaaaaggtccatataaccaatggactcccgacgaaaccgacgtgttgatcaaattacttgtagaaggaatcatacaaaattggtgtcattctagtgcaattatcggctagctaacagtggagagtaaattattacctgctctgaataaacgtcttggctgcaacaagaatcacaagaactatctgagcagattgaagtttttgaaaaacttataccaaagttgcttggatttaaaacgttttacttctggatttgggtgggatcctgaaacaaaaaagtttatagctcctgatgaggtgtggagagattatttaaaggtatgcattatttggttttcataaaattttgattaataatttattttctaatcatcacaatgttaacagtttttttaataaatatttacctgcaggcacatccaaatcataaacatatgcaaactgaatcgattgatcattttgaagatctccaaattatatttggagatgttgtagcaactggtagttttgctgttgggatgagtgatagtacatgtcctcgtatctacacagttggtgaaaggagtcaatccaccccgacggtgaatcaagatgagaacaaagagaaggtttatgaattttcatttcaacacccatcatcagcagaat

SEQ ID NO: 16869 - DNA, 1897 bp, Arabidopsis thaliana landsberg
aaacgaggccttgaggtagagataatctggcttccctctttcgcccctcgccataatcgcaaactattagaaattggagattatgcatgccttcgaaggacttttcacgcatgacaagtggctcactggtatatgatgtattgaaatatattcctaccagagtttccgtgccctgaaaaatcccaagtaaactattattaagcatgtggaagcggaaactattgtactaaaagttgaacaatgaccaaatgtctgattaactagtagtataaaagtcactacacattatgcgaatacgcaaataacttacagtattatgggtaaatacatcgaaaatatcctcagaatccaccagaaatcgacgttttccaggatttttggactctgcgtgaacaatttctctacccaacttctgtagcaaattgtgcatctctatagtttcatatggtgatgttatacgaatgagggacttatcagccaacactgtaagcctaacgctaagcctatcttcgagcaagtctttgatgtaactgacttgcacaccgttgaataaacatgcaaatgcgatgtaaataaataactcttggcattttttatctaatctatcgtagcttcctcttaatattttctcaatattttcgtccaaaccattttggagctcaggcagcatctccatccactcttttttttcttttcctcgtaaagaggaacccaagacacttagacccaaaggaagattaccggcgagctcggccactttaaccgcgacttccataaaacaacggggtgggtagtcttgctcaaaagcagatcggcataacatcttgagagcaagagccttagatgggaactctacctcatatacaaggtcaatcttatgagccttgagaagtcgcctatcttgagtgatcacaataattctgctcccggatccaaaccattcagtttgccctaccaatgtttttagtaactctagatcatcaacatcatcaagaatgataagaactttcttgtgctttaaccttcgctccaccattcataaatggtatacatgtaagtccttttgacctagaatttttgacagaaattgctcttcccagtacaacttcatgccatagtcatctcggatggttcgcttataagttacgaaagcgcgataatggaatttgcaagagtgttgactgaaaagagctcttgcaatggtagtcttaccagtccctgaagttcctaaaatcccgaccattctaacctcctcagattccaagcacaacattgtatttactgcctttaaatgagctccgattcccacgaagccgccaaaatcatccgttggagtaataagtttattcaagacgtcgacggcgattgtttcaaccatggctgcttcatcaggcctaataacaataatagtaaatttgtcattaaagagcacagccctaaaagcacaacctaagtctatgcaaagaaactccagttcagagataataaataaataaaacacacacacacacacaaatatggaatgcgaaacaagataccagttctgaagatcctctccggccatatttgctacatctgttagaacttgcatccacctctgtttctgatccagtgtttttctcttgcatgtctcttcaaagaccttgccaaattctcctgtctgttttctaacatgagaaggatcaacgtggtagaaaaccggaatcgccatttgatccaatttcttatagcactcgtggatcttcaccaattcatttaagcaccaagttgaagaagcataattcttagagaagatgacgattgcgatccttgattcttttattgctgagaaaagctcaggggcgatttcaaggcttctctcgatcccgtggtctctaaatgtattgactgatttgct

SEQ ID NO: 16870 - DNA, 1113 bp, Arabidopsis thaliana landsberg
tttctcgtgagatgtcaaaaggattctagttacattacaatgacaaagctttttcccttctacatagcaaaaaaaagttatgattctacaaaatacagacacgagaagacagaaaccaaccaaacaatagctcattcaatcaaattccaacactggtccttaccaaggtttcagatcagcgaccggtcctgccgtccagttcaacagcttctcacctggtctcagatacacactcctctcatgaggcagcttacgagccaacccattcaatacttgatgaaacgcatcccctggttgagccggttgcgggaacagcatggcttgtttcatcgacgggtttgccaacaacctctgttttctcagtataacctctggtgggatcgatgtgagtattgtgtccaggtaagggacatctttctcatccacaaacacaccaatatcttcccaagggattgcatctgcaaaaggtaacacgatgtcgtctgctatgatcacagggatgcaaccgaatatcactgcttccaccagtcttggactccatggggcccatccaagtgggcataggcagaagattgctctctgcatgtcctcataatatgttgttgggtgctctgttgagatgtcaaacagcggattgtctttgaagttttcccatacagctgctcttgcacccctgtgccagtttgacaaacaaacatcatcactgattataagaacaatccatggctctaaaaacagtctgataaattttccttttttgagttttatgtccaaaattccaaaccgataaagcaattatgaactgttttaggagatttatgaaatttattatgaacaataggtaagaactttcataagaaaaaaattacctcgcataataaccaccctcagggtcatttcccacatcataaaacaatcctctgaaataaacgaagatggatcgaggagttttttcgggaattaagtgtgactgcatcttctgtggtggagcatatggaggaacagtgattgaaccttctttcaagcaaacatgattcctatgtccccacgtctgcaccagtgtagttcgttatgcatgggtagtattcctcaaccaattgccttctcttcctg

SEQ ID NO: 16871 - DNA, 939 bp, Arabidopsis thaliana landsberg
gcattagggttttcattcatttcaacaacaaaagcagaatctacatttttcggaaggactgtcattacttacattttgaccagtccagccttaacaaaaccctttctcagatacaccccatgtttcttaatcactaccttatcagactcaaagttaacggtaaagccgttgttgcttagcactgttccagagatgagattcttctgcatgccaggtacatgcttcacgttttacagagtaagctcacgtcctgaagtcagcttcagaaccacgttgcccttaccttcaatcttaaacatcgccgtgttacccatgaagagtttacttgttcttcacataggtggagaacatggtcctatcagagtagatgtgtgcggttgcaccggtgtcctagtaccactccacttggttgtcttccactatgttatattttcagtgaccactgcaaccatatcttcttcagttaggtttgtctggctcttgatatccttggctttgctcttgcaaacatcagctttgtgtccaatcttgctacaatgatgacactttcctttgaacttccgctcatgtttgctcttcttgaaatttgttgtcgatgaaaccttcaagttcttctgaggaacagagaactcttacacttagatactttctgatttttcgtgttagatctcttccctttgactaggcttaggagtctctatatatacttcactaatcactggcagctgtacttctgaaactatttcatcatctctccatgaaatgacatacctcgagacgtttgctttatgccgatcatggaggaagaagagtactggtttataaagatattacaataccggattaactctgaaccctcaatctttaaacacaccatggaaatttgagtggtgactaaaattactttgaattgaaacctgataataattacattaaatt

SEQ ID NO: 16872 - DNA, 3202 bp, Arabidopsis thaliana landsberg
attttcttttttaccattttttggtgtataaattcaattggctctatcgactctggaaaaaccatctctggccgggtcatccatttcggcagacatcgattctccggtgatgcgtcttcctccgtcgatattgttggatcaaaatctagatcgatatctcgatatttacttcgtcctctctggaaacgtttcttttttagagataccatctccggtctactcatatatttcaccggtcgacttttcctccgtcgcagcgtcttcttttttttacaagtgccttgtttgttacactctatctttaggtctcgattgaagaaagtaagtgaacgaaacgaaaataattgtttagatatttgcaatggtagtcagtccaatgtagtaattgaatcgtgttgctccccaaatcaatccatagttgcagaataaatggtacaactgaaattggttcaactgatctagttcaaatggttcaactgatctagttcaaatggttcaactgatctagttcaactggttcaactgttattttacatattaaaaatacagtgttatttgtttcttggcccgggttatttattttgttgggcttgggtcggattattttggttggatttgtagtttttattttttttaaaggttatttatacatttccaccatttttgattgaaaaaaaaagataaataaaacaatgaactggtaagagatgtttcagatgaggagattacaacatcagcttttgacatagggtaggataaggcaccaggacctgacgggttcacatgcgctttttatcaacaattttggcaacacatcaaggaagcagtgttcaaagaagttcgttcttttttcagcacaagggaagctagaagcaggaacaaatcatactaacatatgtctcattccaaaaccggcggtcccgcgaactatgagtgattttcgtaccatcgcattatgtaatgtcagttacaaaatcatctccaaaattctggtgggaagactgaagaaccatctctcaggcattgtatcagaaactcaagctgcttttatcccaggaagaaatattatggataatgtgatcatagcacatgaaatgcttcactctctaaagtcaagaaaacgttgggctcggtcctacatggcagtaaaaactgacatctcgaaggcatatgatcgtttggaatggagtgttttggaggatacaatgagacatatgggatttgacgagaaatatatcacatggatcatgaagtgtgtgagctctgttaccttctatgtccttgtgaacggatcaccatacggatacatcagtccaacacggggaatcagacaaggcgatccactctcgccatatctcttcattatgtgctcagaagtcctttcacacctcctcacaaatgcaacagctgtcaacaaactaaaaggaatgaagataagctctactggccctacagttaaccatttactttttgcagatgatgccttatttttctgccatgctcaccctaaatcttgctcaacaattatggagattcttaaattgtatgaacatgtctcgggacaagcggtcaatctccataaatcagctataacctttggctccaaagttaagcaacaagtgaagactcagctgcgaaggatcttatatatccataatgatggtggtggtgggaagtacttaggtctcccggaacagattggtggaaaaaagaaagaaatcttcatctacattatcaaccgtgtgcaacaaaagactaagggatggtcaaatcgattcctttcagaggcggggaaggaaatattaatcaagacagtggctctggctctaccggtctatacatgacgttttcaaactaccaaaaagtatatgtgatgatatcaatgctcttctagcaacgtattggtggagtaagggacataataaaaaatcgatgcattggtttgcttggaaaagattgactctgccaaaaaaagaagcaggcctaggtttcagggatacaagcaaattcaattcagctatgttggcgaagcaagcttggaggattctacagtcaccaacgtcacttctttcacgagttctctagggtcgttgctttgaaacaacaaatattttacatgcaggagtaggaagaaagccttgttttatctggcgatcattactagaaggacgtgatttacttaagaagggtcttcgcactctcataggcaatggcaatgagacaaacattccaacacacccaccaagaccaccgcaacgaaactatcaccactcatgcaatggttcaacatttaatgtacgagaatacaagattatggaacaaagaagtcattgaggaactaatagtagaggaagacgccgcacttatacaaaatatacgtctaagttcgaagtctttcccagatttattaggatggaactacacgaagaatggtgaatactccgtcaaatccggttattggctaagtacgcatctcctagatcagctcccagacatcattgctccccctggatcaatagaattcaaagcagcaatttggaaactttggacaactccaaaaatctgacactttctatggcgcatcgttacacattcactagctacaggcgagaatttaaaatggcgacatatcattttagactctcaatgcaaaagatgttgtagtgcagatgagacattggatcacttgttctttacctgccaccatgcccaagctatctggaaaagctctccactttcatacgcaggtttctttcacaaccatttatcttttgatgacaagtttatgctagttctccaatgttgcaacaatggtagactggatgacatcacgagacaaatacccctatggatcctatggcgaatatggaagagcagaaatttgttagtgtatcaaagaagaggaagctcatggagtgatgatgtacaaaaggcaataacggatgcatatgaatggataccaacacagagtgaatcgacgacaagggctcctagcggacatacacgatgcggatggaagaaaccaaaccatggtttcatgaagtgcaattacgactgcagctaccgtcaaggtggagtagaaactaacgttggatggatcattagaaataaaactggaacttttgttatggctgcacaaagtaaaggtcgacaatgcaactcggccttagaagcggaattccaaggtttattaatggccatg

SEQ ID NO: 16873 - DNA, 1582 bp, Arabidopsis thaliana landsberg
atcgaagattttacgagtcctcctgaaaacaaatcaaaaagaatgcacaagagaaagagaagcatagtcaatgcataaccctaaatgaatgaatctaagcttctgtcaaatctcacaaaacacaatcatgatactaattttctaatcacaacgattcgaaatcatcaaacacaacactagaatcaacataagcttttgttcttgattctaattcctaaaaatcaatcacatcaaaactgctacaatttctaaagatgaatcgatttcaagtctcattgattggtttgagtaaacgattcgaaaacctaaaccgaatcagcaatttcaacaacagagcgacgcaatttcacattctggaaaaaccaaatttctcaaatgcgatttcgtatccaacgacatatttatcagaatcgaaacgatctcgattagaaatctaaccgatgaagaaattgacggattttgggatgtttcggagtaacaagccgacgctggatcttcagagcgagcctataagtccgtctcagtcccaagaagtaagctgttcctagagttatctcccaaaacaccatcttctttcttcttcttcttcttcttcttcggctacacgattatcgcatgatcgccattttcgtcagtcactgaccttttggctggttaacggtgatgcgatcctcaccggctatttccttgttcgaagaagtaattgtgggccgtctgttggcccactttaacggagtagatatatgggccggattaaacagaaccaatcttattgtaaaatgtttttctatttctttcaacaaccaattcctattttacaaattattttgatgactttaataaaatcaaagaaagtaaataaataaaatattttaaactatttctagaaatttttatataaacatattgatttgtttgttcataattttgtaaagtttcccaaacaatatctttgttttgatgatacaactttattttgtgaggaaaaatgtagcacttcttaaactaataacataataattaaatttattaataatcacagattttttctataaattaactcaaatttaaatttacataataaattaacataataattaaatttatttaaatgtttctaatattctaataacaaagcttatgaaagtctcattaaaaagatagtccagagttaaaatttacatggattgttggaactaataaggagataactacggaaactaatgaaacataacctaaataaaagatcaacacttataatctaggagaatagtttttcaaaacataagattaattaactaaatcaaaccgttcgtttgatttttttttcacttgaaaaaagcagaggccaacgagtgttataattttttttataaattactagtgattgttacttcgttttcacaaatcattctcttaacatgacagacaaatctagccttggatactatttatgttggccttgtacttgtctgataaatttctgtgtatcactgttatttctcgtctgctttgcgtcattcattgcttggatcatggttagatccaacgatgtgaaattccaagtctacgacgctgagct

SEQ ID NO: 16874 - DNA, 1497 bp, Arabidopsis thaliana landsberg
gaatgcagcttaaatggtgaacaacgcaaatatatttttgcggtagagacagatgtccaacttgtcaccgatcaaattgatttcagacctaacaagatataaacaaacgtcatcgtctcgttattctaaaaattattttgaaaacgacacaagatgaagacctttgaattgattatttcagaatcaactcaaagctcgggggctacaccaattgggtgcgcttcggtcaccaacagattcacaatgcctgaaagccaaatgctgatttgaaaagcaaaagtatgaagacctttgaatggaatacttctaaaatccactcaaagccccgggactacacaactgattcacaatgcctggaagccaaatgctgatttgacaagcagaaggatgaagacatttgaatggattacttctcaaatccactcaaagctcaggggctacactcattgagtgcaccttcagtgccccaacagattcacgacaccctgaagccaagtgctgatttctaaagcataagattaagacctttgaatggattatttctaaaatccactcaaagcttggggcctacacccattgggtgcaccttcggtgccctaatagatttttagtcccatgaagaaaaaatgctgatttctaaagcataagctgatgacagaatgctgatttctaaggcacaaaatgaagacctttgaggggtttgttttcaaaaacctactcaaagttccaaatgctgacttccaaagcacgatatgatgataagatgctgatctccaaagcatcgaatgagcacctttgagaagactgtttttactgagtcactcaaagtttaggagcaatgctcaatatgtgcacccttcggcgcgcccatcaccagaatggataatcaagccacagattcgcgagctgtacctagaatctttgggctgattatttcaaaatcaactcaaagattgggggcttgtgggggacagatatccccgggtccactagaaggcaagaaggcctcgcaaaaggctttgggcctattatctcgcaaggccatcccttcatgggccaggggagaactactggtggaatgggccgatgcgagaaagaagcagactcaggcccaagcgactcgttggacttaagcgctatctacagcgcccacctgactttcccgcgtgcagcgaccttgaatatcggagcgaattagcgataagtcggtaagattataggaagatcagttcagttgattcactattgtttaggaacatatcatcatcacatacgcttgtagtaccccacggtcgaatatataaggcctagaggtaccccatcatttctaggtcaatcaccaacccatctcgctagtttctctccattccggagattcctcttgtaacccaccacataaagatccacactaggaagtagggtattacgcctctccaagcggccggaacctgtagaaaattgtcggtcgtctctctgcatctcgcacctctagagtcg

SEQ ID NO: 16875 - DNA, 1268 bp, Arabidopsis thaliana landsberg
aaccaatgatcatttgaagattagatttcacctcaattgtatcatccaactttctcttgataaaaccggaatctgtaatcaattctcttttccgggtcggacagacccgagtcgggtttggacttgagactattggactggactgcctattctgaatatgggccgggattcttgtttttgtagaacaagtgcatatcacggatggaaaaagatgtcctaatttattctgaatatgggccggaatgatattggtgcatacttgtctttttctggctggttcacttacattgatgagaaaaatgcgaagaacactttgaaatcggtttgtgatcaagagatgaacaatcgtctactgcttctgccgttgtgtggacaagaaaaactcattcaacaccaaaattatgttgttttatttttccgatattttacattttgtcttataaatctcatgatataacagtagcccctttctgagaagagatttgttttgcatacttgtgtaatttacattaaaaaaaaacacagatcaacagaagaacagaactaaacactaacactctaaacgagaccacctctccaacacgagacatcaaacgccacacatacacaatctctgcaacctaagaacagaactaaacactaacactctacaatctacttgttcattcttgagaaatcaaaagtctctattcaccttcttcttctttcttcttcttcgagagaaacgaaaatcaacaaaaagcaaaatcaacaatctttttcatctatttctctttggagaagagaagcaaagcatagaaatgtccatcactttatattatttgttgtattctccattcataggcaaagagagagagagagagagagagagatgtcttcatcatagctaagcttttggttgccttagagatagtctcgacctttctctcgttccaagacagcaatgacgctctctgctgctctcggcggaagatacagccagtcccaacgtacatggactttgaagtaggtactaacatgaacgtagacagtgttgtggttagtatacttttgaggatcggatcatcaaccttatcagttgattcttcaacttaattaaactcattatataaaaaaacaaaatatttatgtgaccgttaagaacttaattgtgaaagaagaggaactaacagacaaaaaagggaattgtaatgtgaccgttaattatgaatagcaatatccctttttctctcaaataataattggggcatgtgctggtcttcacttac

SEQ ID NO: 16876 - DNA, 1246 bp, Arabidopsis thaliana landsberg
gggaaataccctggtcacatacggacaaactaagtagcaagcacaatctgtgttcttaaaaagaggtgtttggcaagtaaaaaagtgtttacgtcatctgttacgtcttctgttcactttatgttttactctccacgcatcttatcctttataagctcgcacaaatcttaaccaaaaccaaagcaaaacttgagagtttcttactaaggttgaatcatggtttccgaaacaaccaaatcttctccacttcactttgttctcttccctttcatggctcaaggccacatgattcccatggttgatattgcaaggctcttggctcagcgcggtgtgatcataacaattgtcacgacgcctcacaatgcagcgaggttcaagaatgtcctaaaccgtgccattgagtctggcttgcccatcaacttagtgcaagtcaagtttccatatctagaagctggtttgcaagaaggacaagagaatatcgattctcttgacacaatggagcggatgatacctttctttaaagcggttaactttctcgaagaaccagtccagaagctcattgaagagatgaaccctcgaccaagctgtctaatttctgatttttgtttgccttatacaagcaaaatcgccaagaagttcaatatcccaaagatcctcttccatggcatgggttgcttttgtcttctgtgtatgcatgttttacgcaagaaccgtgagatcttggacaatttaaagtcagataaggagcttttcactgttcctgattttcctgatagagttgaattcacaagaacgcaagttccggtagaaacatatgttccagctggagactggaaagatatcttcgatggtatggtagaagcgaatgagacatcttatggtgtgatcgtcaactcatttcaagagctcgagcctgcttatgccaaagactacgaggaggtaaggtccggtaaagcatggaccattggacccgtttccttgtgcaacaaggtaggagccgacaaagcagagaggggaaacaaatcagacattgatcaagatgagtgccttaaatggctcgattctaagaaacatggctcggtgctttacgtttgtcttggaagtatctgtaatcttcctttgtctcaactcaaggagctgggactaggcctagaggaatcccaaagacctttcatttgggtcataagaggttgggagaagtacaaagagttagttgagtggttctcggaaagcggctttgaagata

SEQ ID NO: 16877 - DNA, 1951 bp, Arabidopsis thaliana landsberg
tatgtttatgaaactctttcctcttgagattatttcaatctcacatgttgacctctggtttaaaatattgtagataactttgtttgcactcattaagtattgtagaccaccatgaagtgcattaatcatgcgacttcaagaagaaacttttctttgtgattataaataacattgtttgctaacattcttagtttgtttaagtaaccaatcttgtctccatgattagaattttggctaagaaaaacttcttccaatttaataaacaacgacatcttcaaattcgttgaaggtctactagtgttttcatcaacattcaagaatttcttaatgtttttccccagctaggatatactccagatactcgtggaaaataacataaaaatgttaataaacatctcttatgttttcttggtataatatccaagcgagtgtaaaacatgttagtcatcttgatacaagcaacaatcttaggaaagatcgtcatcttgctccttggactagttcctctgtcaaagataactagtgaaggaacatttaagagaatgtccttacaatcattttatacttctgtaacattggaatcaaataccatgttggggaattgcttgccctcaagaaaaaatccccaccttgtaatccatagctttaaaacctctaattgctgagtataaagtcaagcaacatgatgtcatttttccatttaaagttatgactttcttttcatcaaactatttatccaatagttaaacattcattttggaagcacaaatacatgtttgctattcgattgcttttcaaggtaaccatagatgaagttgatcatcaaatacgtcttttcagatacacgagcttgaggtagaatgcatccattgcggttttcaacaactaagttgttgcatagaaagttgtatacctcgatgtgatgaggctttctataatttttatgcaaatgagaaggaaaaatgctagttacttatttttagagactcaactttataaaattgcgagtttcttaaaaatgagttttcagcaattggcattttatcatcctttgcgtaacagttatacggttatatgaaaatcattacatcgagacttagctctgcagacaaatgagcaagaacaacaagaacagtcttagtactacttgaaagatgaataacaattggaaacatagctacatagagatcatggaagcctgatgcaaacacaaagtagctgagccacaagacaaggaaagcaacatgctcaagctcatcttcagtgttcatgaatgtattcatccatgccacttgtgttacaaaacggactttacctttctatttaatcgtctgccattctatctttagcttctcctgataatctctcatgagctatctaaaatagcaaaacaggtgaacccaaaacagataaatctaaaagcaacataacatcttcaagtgttatggttgtgtcacctcaaggtaaaaggagaggttttggtatctggacaccatttctcagcaatacccagaacatatatgtgttttaatggattttgtatgtggatgtcatgactacttcgaaaatcccagcttttctaaatggattagcgcaaagctgccattttatagtccaaaacttaaatttcgtgtttgcaagtctccacccatcgaaggaaacactagaagagatataatttatttgaggggagaaatatttaaccgggaagcatagctccatatccttcaatggaggtgtggtccttcaacaaaaatacccccctcttgaaactctgtttcaccacacctccattgaaggacctgaagctatgcttccttgtcatattccttaccatcaaataaaagctctgctttcctgtgtttcctttgatgcgcggagacttttaaaaacgacatttaagtttgggctaaaaaacacggccgcttttgcatgaacctacttggagaaa

SEQ ID NO: 16878 - DNA, 2566 bp, Arabidopsis thaliana landsberg
  unsure (1)..(2566): unsure at all n locations
ataaaaatctgaggaaaaattcaagaccaaaacacaaaacacacaaagaaaaataaaaagccaatggtatgtacaatggttgaggtggtgttacctcagtgatcaggtgaagtagatggagacatagtcgtccatactctcttgagtataggcaggggctgaagttgaggcgggagggttttgctcgttttgtccggtcgagcgtgtggaagctcgtctctgcctactccttggctctctcaactcgaagatcacttcacgaggctcgaatgatgaagctcggggttgagcgatcctgtcggccctccttgcagctgaacttgtggaaccgcttcttctttctttgggggtgggagatgggagcctcggcttgctctggaagtctttgatttgagcagccatacccgtcaacgacttcttcatggttttcatattcttcttgaaacctttcatcgttttgctttgaagattcccgagctcctctagcacagcgagcttcttgtgaacttcagctatctcatctcctccttagtcaggaccttcttcataatgagcttgctcttgttcgctggtcccttactccgattgaacaatatgctgctcaaactcgtatttgctcctcatagtcagcttgagtaaactactcctgtcgctcatagtcagcttgactatattctggttcatcttcccgagctcctccaatatcgatgttcaaggcaaaggcagatggcatgaaatttatgttgcgtcttgtcttcaccgaagtccggttctcgcatggtaggggtagaagagaaggtccaagctccgagttgttgaacttgaagagatnnnnnnnnnnnnnnnnnnntttctcaacaaagtccttccccttgagatagtcgaggtcaatgaacttgggcaacacgtcaggggctccaagctccatacccacggctccaagtattggcgttaagagactatcaacacaaagactcccacgaattcccgagcgatggatggttgcagcatactccttgtaactcaataagtgatccaagagaacaacactcaacgaagtgtctactctatcccccgccatcttccttccatctcttgtctctctcaaaatgaagaccaaagattggtctatcatgcatagctcctcttcaccaataaatccggtggtcttctttggaaagaaggtgttggcgatgcattggtgaagatatctaatcacgggatttcggattgaagaactcttgctcttggttggcgagaagggcttcggaccggcgattgttttccaaagagatttcggctcttcttgatcatagtcttagcggattccttctccacttggaaacctgaaaatggtatcaagatggcgaatatgaagtgtatactcgacatccctaaccttgaaagttatgtaaccaagacctcctctctcttctttctctgaatcgtcaacatagaaatcaacattgagggttgcaaggagttggcagctctcctctttatatcccccacattggcagctcatgaatgttgcaagattggcaaattccatcaagtattccacatcaccacaaataccaagctcttgcatcgtttccttatgagggtatctagtttcctcaaacttcaactccttcaagtattgatagtactcgctcggggttggctctctcttcctccttggccggtttcttctcccaacaggggctggtgtatcatccccgatgatctcaacctcttcctcagtaaccactttttcaaaggatggctcgatcatggtgttcttcttcagcctcaacgaccctatttcgccgagctacttcttctttttgcatggctgaacggcttgagcttccaccttgaatcaagcttgatctttgagcacgacgagcttggcgagtttggcgttcagtcatgccactcatgtcaaacccctcaacctcttcattatcaacgaacgatcttctagctcgagatgaactctttcttcttgaatccatggagattggtggtgagcttcaacagggcaaacaagaacaattttataagaggtatcaaaggggaagggaatcggtttctttagtgatgaaattctgagctcgaacccgattgaatgcttgaggatggacttggaagtgatcgagtaactttggtgaagtatggtgaagtgaaaacgaattcgtgaagagtgatagggagagtttggaatgaaacttttgaagctttgtgagagagtttgcgaaaatgagatgatgaaagagatagagtttcaaaagtggtttgtcgatttcaatgggtggaggaggatggtcttgggattctctttggaaggatagtaaaagctagttggaaatggtgaggggcctgggtaagtggtttgtctgttgaataattgaagtgagggggaacatgtgggccactcgacctcactccttggtcgccgaatcattcaagcttgagtaaaggatcgagcatgtgcgcaagacttgatcaaagggtgaagaatgcttctcccttgatcactcaatcaaacggtgaaggtgatttccctacaattagtcgctca

SEQ ID NO: 16879 - DNA, 1018 bp, Arabidopsis thaliana landsberg
  unsure (1)..(1018): unsure at all n locations
tgcagagagcctggaccccaagaatagtgccgacgcatgctcagcccccgaggatgtcgctggggatgacttagctcggatgaagagtataagccactgcccagcccccgagggtactgccggggatgatccggctcaagtgggcagcgcaactataacccagcccccgagggtgcccgagcagggtctccttcctgtacttccatggacgttcacgcaggatctcctccacattctggctgcatggtggtagcccaaactttggatcagggggtcgctttagagggcagcatccccactggtctggcattaggctctgttgaaagtactgagctcgttcctgctggtctgctgcaagctgcttcgggtggtggtccggcacctggttatcagctgatttctcctggattgggaacacttcgctcttttccaacctccaagtgctgtgctgtgctttagtttgatctttatgttgcatgaattgttgtcattatgttcatccgctcttcttatcaggctttagtggatggaatggtcagccagctgaagtcacatgggcttctatcccagaagtggcttcatctcttgagcgttggaatccggtgttgcttcatcgtcgtgtatccaagttggaggcaactaatgctggttagcgccctttcttcttcttcttccttgcctttgttcgtggaatgttttaccttctaacctcatttcgtttgattacctcttgataggaatgactcggcagattgcagctcttgaggaaaaacattcccgagatcaagctgagatggctcgatggtgcgctgacttcgaggagaagtactttctgagccaaactgnnnnnnnnnnnnnnnnnnntgccttggatgacgccaatgctctgagttcttctctccatgctcggctcgactctgaaaaggtgacttacaaaactgtgccttgccttgctgtgctcttatcacttgtttagtttctgaaggggttgatttttgtttgcaggaagaaaaacgta

SEQ ID NO: 16880 - DNA, 2619 bp, Arabidopsis thaliana landsberg
ttattgagatgtgtgaaacatgcggtgaaattcccttatggtttttcgtcagatttggctagttgtggggatatggggaatggaaagttctcaggaatgaacagtcatgactgctatgtttttatggagcgactacttccatttatctttgccaaactcctagatcggaatgttcaccttgcggtatcaggtactttaatttccattactttttatacacgtcttggtgttaataataatttaattatatcttaaattgggattatgctttttgaatgtatatgtaggggttggagcgttttttagggacttatgttcaagaactttgcaggaaagccacattcaaatcctaaaacagaacattgtcttaattatatgcaacttagaaaaaatatttcctccatcattttttgatgttatggagcacctgcctatacatctcccctacgaagcagaattgggcggtcctgtccaatataggtggatgtatccttttgagaggtttttcaaaaagttgaaaggaaaagcaaaaaataaaagatatgcggtcggatcaattgttgagtcatatatcaatgacgagatttcttatttatcagagcactactttgccgataatatacaaacaaaatcaagataactaatagtaattaattaaacatctgcaccaagcaagttttcaatgcgcaaaaataaacatgaattacctcttttggatcaggttaacaagattcactgagggtgaagttcctgtatgtcttgttcctgaagtacctaatatatttagttccgttggtcgtccaagtggagaaatacgtgaagtatggttatcagaggaagactatcaatgcgcacatggatatgttatacgaaattgtgattattttcaagtaattaagaggtatataacaaaagtcatactcccattttaggtttttaattataaatgtttgtttactaacccttatatgttgtttttatctttatagtatgttcgaagattttctttctattaaatatccaggattgaacgaaaaagaactcttcgtgaaaagaggtgaagaatatcatgtgtgggtgaaagattatgtatgtgtaaatagtttatctatatatgatttgcatttatttattgttattcatatctataatgatgtttatttctaaatttgcatacaggttacatattggaactctagtaatcgatttccaacttgggttcaagagatagtcgatggacctttgcacaaagtcaaaacatggccaatgtattttacaagaggctatttgtttcatacgcagagtcatggagctggacgtaagacttgtaactatggtgtatgtgtgaaaggtgaaaattatacggatgcatctgacgctgcagatttttatggaaacttaactgatatcatagaacttgagtatgaggggtggtcagtttgaaaatcagactttttaaatgttcatggtatgaccctaagctcggaagaggtactcggaggagcaatagtggtgttgtcgacgttctttcgtcgaggaaatataacaaatacgaaccctttattttaggtacgtatggtatatatatatggtcatttagtttttctagttcatatacaaatatctaattctccaaatatggtgcatttacaaacagcatctcaagcggaacaagtgagctttattccttatccatacacgaaaaaaccaaagcgggagtggctcaatgttttaaaagtaaatccaaggggaaacatattaggagaatatgaaaataaagacccgactcttttgcaaacagaaaatgatgatggtgtattattgactacagttgaagatatcgtactcgacaatctgacagaagacttgaacccaataattctcgattgcaatgtcggagatgcagatccagaagatgaatttcagtgtaatttatcgtcatctgatgatgaagaagaagaagacggagaaccaaactaattaagtactattatagtgtaatatatataattatgttaagtatttttataaaaaataattttaagtttttgtaatataaaaaataattatgttaagtttaaatcaaattatgatataaaatattatgcaaaaataagctaattatgctaatcaaacatctaattgggccatttccaattcgttttatttaataaaagtgcagtttattgggccaattttaaggcccaaacccaataatgaccaaaaacctaatcaaaaccctatgtctctctcacgacactctcattctcaactctcttgacgctgcctccctcctctctgcgaaccctagatctattactcaaactttcgcccaaaaccctagatctatctctcaatctttcacctttgcctcttctcttcgaaaccttatcttctcttcttcgaaactatcatctctttgtctctctcacgatgaataaggctcaacgaaagagaaaaaacgcaccaaatgtttctcaacgacccaccactctaccaccgcagtataacttcacgccggcagccgacgttcctcctccgctacagacgcctcaagtaaacgaaccgatgttgccgggacagtcaacggctggccatatccgaaactatccaccgccc

SEQ ID NO: 16881 - DNA, 1151 bp, Arabidopsis thaliana landsberg
atgatgcatgaggtggtatatctcaacgagaagaaaattcgcccaacagagtagaatcgtgtattaacaatgcttggtatcttgacaatggtgctagtaaccatatgacgggaaatcgtgcttggttctgtaagcttgatgagatgatcacagggaaagtaaggttcggtgatgattcatgcatcaatataaaaggaaagggttcgattccttttattagtaaaggaggtgaaagaaaaatactatttgatgtttactacataccagacttgaagagtaacatcttaagtttaggacaagcagctgaatcagggtgtgacatcagaatgagagaagactacttaaccttgcatgatcgagaaggaaatctactaataaaggcgcagcgatcaaggaacagattatataaagtgagtctagaagttgaaaactccaagtgcctgcagctcacaacaacaaatgaatcaacaatatggcatgccagactaggacacatcagttttgagaccattaaagctatgataaatccagaacccgtattgggatatctagctcagacccaaaaaaaaggaaacatgcggttcttgtttgctcggaaaacaagctagacattcattcccaaaagcaacttcttatcgtgcagcacaagtacttgaactcatccatggtgatctctatggacctatttcaccatctacagcagctaagaagaggtatgtatttgtattgattgacgatcattcacgatacatgtggtctattctactaaaggagaaaagtgaagcgtttggaaagtttaaagagtttaaggcactagttgagcaagagagtggggctatcatcaagacattcagaactgatagagagggagagttcttatcacacgaatttcaagagttttgtgcaaaagagggaatcaatagacacttaactgcaccatacacgcctcagcagaatggagttgtggagagaaggaacagaacactcctaggaatgacaagaagtattctcaaacacatgaacatgccgaattatctttggggagaagctgtgagacattctaaatatctcataaacagagttggaacaagatcacattcaaatcaaacaccttatgaagtctttaaacataagaagccgaatgttaacat

SEQ ID NO: 16882 - DNA, 1152 bp, Arabidopsis thaliana landsberg
  unsure (1)..(1152): unsure at all n locations
ccaaatttctctagctttgatgaaacctactcgacggccaaaatccaatttcctctgcagcattaccaaattgcaaccaccaatttccatttatttggtcctgttacccgaaaataataggtgaattttgtccttagtttaagaaacacacaaatatgtaagcataaaattttgaatgctttgtcatactcctaattattcaaaccttaattagaccgaagactccataatgagttgtcctagcaccacgaacagacactggcgataatgccataccaagtggaatatcttgacgaacaagtatcattccaacgtcgcagtagctattgtaacatgatttttcacctgactgttccatcaatatatacatttacttactaatatgtatacaaaatataaaaattaaaagaaattttttactaatagcgtgactcacttttgtatagacgaaagtccgaggtttgctgtccttgtacaatgttggatttacctgaattagtacatataatatgtgtttattaaacaatataatacatattttgttagttactaaataaattaagtaactagagcttgttgatcggtgcttttatctagatgacaaacaaattaaatcaaataacttacagtaaagccggtttggaggaaatcatttccaatctgaatgtgaagtcgagaagcactgtattggtttagcctaaccttaggagcggttaaacaaagatccattgttgctccattgaacctcttgtctgagccaaccgtccgagccaccgcaaactaatagcgttcattttcattcagtaaccaattcttattatcagtaatcagtataaatatatcaaaatatttttaattaaaagaagcaacgtacatgtttctggttgttactattagaatcatcagtggtataattccaagagccacgaggtttatgattatcgccaaatgagtctaatctcaatagatcttctttagtgactctttgcatggggacggtaccaatgggacaacccacaccattctcccataggtaaccaaaattggtattggttgtctttctttctctcattcctttccatattggacgcatctaaaacatgtcgaacaccatanatattttttatttttatgtttctaaaagaatataag

SEQ ID NO: 16883 - DNA, 3422 bp, Arabidopsis thaliana landsberg
ttagatcaagtgaaacaagctgatgaagaggtttgatgcaatcaggagtcctttcaagatcggaatatcttaggatgaagttgtgttaaagacatgggaaggtgcgttaatcccatgaaattttcattgtagctcatattgagatagtggagacgacaccacaaagcaattgatgcatgcacagacttcgaactccgtgttgtgtgctatatccagataattgatgtgcgttgaaataactggaatttttctgaatcttgagcatccagtcatagtgacgagttctagggataccaagttcatgtgagctggaatgacttgtaagtttatgcagtaactcatccacaacttctttagtttatgaagatgcgaaaaagaggatggaatctctaccaaactctcgcaactatttagattcaaatcctccagatttgtagcatttgtaagatccgggagttccttcaaatgaactgatcttgacaaatccatcttcttaagatttgtcaacagctgaatgtcaaatcatagaagagagaaggaacatcagaacttcaaatgagaaacttcttatttcatatgttgctatttaactactgctaaaatgaaaacacagaatactatggtaactaacctgagttccttcccagagcttttcgagctggctatctttcatattgagttcgacaagattttccaggcaaaatccaagaggaagactcttgctcggatatgcttcccaatgtagtaaccttaggcgaggtggaaacttcatgtcctcaggtatatgcattatactattcccatcatgtcttgtcttgtaaacacttaggaatcggagattagacattcttctaagagctctattgcttaaaatcacttcgctaattcctgatgtatcaaatgatatgccagacacaactccagtacccaaaatcatgttttgaatataaagaaactgttagtaaaataggtaagattatttttaaaagtgtaaaggtttccttagaaataacttactttatcattttcaaggacataacaaatctcttgagcattagttaagatcaagcgtttccaaggctcttgtctgttaatggcttgtctgcccacttgttgtagcaacttgtgcattcttatttccccagtggtagatatatatatgagagatttgtttaccaagattttcaacccgtgtgcgatatccaagtcattttcagcgagcatggctttcacaagatcaacatcttcatagttgaagaagattgcaatgtggagaaataatgattgttcattctcatgtaaactctcataaccgactcttagtacttgttcgatatctcgatcaatgatagtttctagcctccgtattacatattcccattcttcctcattcttcccatgtaaagatgaacccaccacacgtagacccaacgggagcttaccacaaagctctgttacacttcttgtaagctttttaaaaccatgacgtgaagagctctgtctaaaagcatatctacataagatcttgatagcttcttcatcagaaggaaatcctacatagtaggtattgttgataccatgttgcttcaaaagctctttgttttcggttgtcacaataatcctacttccaggaccaaaccaattactttcattagctaaagcctctaattgcttgacatcattcacatcatcaagaatgataaacactttcatgtcgcatagcctctcttttattgcacctaaatggcatatcctcgaaccatcttggttcaaaatctttgaaagaagttgttcttgtaagcgcaacttcaaaccatactcatcaagaccaatgggatggcttcccctcaggttatccacaaaacaagtatgatgaaacctattagagagtagactatgtaaagctctgccaatggtacttttaccaatgcctgcaggaccagagattgcaaccatcttaacttcatcattatctaaatctagcaaagactgaattttcctcaaatgagcctcaatccccaccatgccatcaaaatccctacatggtgtaacattcagtttttctgaaacatctcttgcaattttctcaatcattttcgcttcattgtccctaataaaagaaagaaaaaaaacatttccattaaattgttgtgaaaaaaaaactaatcatagatataacattcttcttttgccataggctactactctattttcgaaaattcattcaacaaacattcccttcaatcaatgaaaatctattctactcaacgtagttcctattaaccattttttgtgcttgtttcctctattgtggttaccacttggaacataaggaaataattcaatttcatcaaagacataccagtttagcaagtgttcgccagctatgttgcccacatagttcaaagcttggctccatttttgcctctcctcctctgttttacgagcacatgtttcattgaaagcgatcccgaactctccagtttgtttccgcacatcagatggatctactccatagaagacagtcatcactatttgacccatatcatccttgcactttaaaatttcaaccaactcatccaaacaccagcttgaagaagcatagttctttgagaatatcaccacaaagatcttagattgtcttacggcttctttgagctccaatccgattgtctggcttctttcgattagatcatctttgaatgtaacaattcccttgctttcaaattctttcatcaagtggctgagaaagtttccgcgaacatcttcccctcggaagctggggaagacgtcatacttccaacagctactagagccagacgaagaacatggagccatgggaataatataaaacaattatttctatgttccttgtgtaatttctatggaacataatacatggagctaacgaatgacccttcttgtttaatttatacggaattaggtgatctatcgactatgtcagcggtttgaaaagttcaaaagtaaaaataagttaatggaggggaaaaaagttgtatagctaatacatatcaaattttgaatgtgacatataattatttaatgttttttcttagttcaataataattgataagccaaatatgattgattcatattatattttaccattcttaaggacttgacaaaccttgcaatcggttttctaatattatcgtggacttagagaaattattagtctttagttaatcatttatttatgtttttttttgttgagaaatgttaaatctactattcaaaaaaaaagaatatttacaacgaaaagagaagaagaataaagctcaactagattttgaatttgaaaataaaaccacgaccttacaactacatctcttgtaattggtagttaaaatatggagtttttaaaaagaaaatctaagctaacattaacgggatattatat

SEQ ID NO: 16884 - DNA, 1747 bp, Arabidopsis thaliana landsberg
ttcttctgctctgtcgccttgaatgcgaccggttgtgcttcgggtgtggaggaggtgccttgctcgatgatttgctttgagcccttaatcattagctcaaagctcacaaattgtcctataacttcctcgggagacattagcttatatctaggatcagcgcggcgttgattggacgtgtttagggttaagaaatacgagggatctaagaataaccttgaccatctcatggtcatcccatttttcgctcccgaggttgcgcacttggttcaccaaggtcttcaagcggttgtacatagcttgtggatcctccccttggtgaagcatgaagcgaccgagctccccctcgatcgtctcccgcttggtgatctttgtcacctcgtctccctcgtgcgcggttttgagcacgtcccaaatttccttcgcactttttaacccttgcaccttattatactcctctcgacttatagaggcgaggagtatagtggtggcttgggagttaaagtggtgaatttgggccacctcgtccgagtcgtagtcttcatcccctacggatggtacctgtacaccaaactcaacaacattccatatgcttgtttggagtgaggttagatggtgcctcattttgtcactccacatgttataatcttcaccgtcaaaaaccggtggtttgcctaatggaacggagatgtaaaggagtacgctttgaggggtagcgtagggggatcttactatacttcttgcgctcttggcgtttagaagtgacggacggtgcatcggagtcggaggtcgacgttgatgaagaatcggtctcgtagtagaccactttcctcatcctcttgtgcttgtccccactccgatgcggcttgtgagaagaagatttctccttcttctctttgtggtgagaagaagatttccactccttccctttgttggaggagctcttcttcttctccttcctcttggtgcgggactcttccgatgaagtgctcccgtggcttgtagtgggttttcgccggtctccatctccttcttggcgtgatctcccgacatcacttcgagcgattaggctctaatgaagcaccggactctgataccaattgatagtcgcctagaggggggggtgaatagggcgaaactgaaatttacaaatagtgacacaactacaagccgggttagcgttagaaatataaacgagtccgcgagagagggcgcaaaacaaatcgcaagcaaatgaagagtgtgacacgcggatttgttttaccaaggttcggttctcgcgaacctactccccgttgaggaggccacaaaggccgggtctatttcaaccctttccctctctcaaacgatccatcggatcgagtgagcttttctcttctcaaatcaaccgggaacaaaacttccccgcaaggaccaccacacaattggtgtctcttgccttggttacaattgagtattgatcacaagaaagaatgagaaagaagaaagcgatccaagcgcaagagctcaaaagaacacaacaaatcactcttactagtcactaaagcttttgtggaattgggagaggatttgatcacttgggtgagtcttgtattgaatgcctagctcttgtaagtggttggaaggttgaaaacttggatggattgaatgtggggaggttgggggtatttacaaccccaaccaccatactagccgttttgtggaggttgttgtcgcatgcgcaccggacaattcgatacccaccggacac

SEQ ID NO: 16885 - DNA, 506 bp, Arabidopsis thaliana landsberg
attttaaaggtatcagcgggtagcactagacttcgatattatttcactcattataaaacaacaaaataattttacaaaaattcaaaactttaaaactagcttttatgtttgtgccaccataaaagatgacggattactctgaagagaaatatcagaaaatgtgtatacgatattactatcaccggtaaaaatggtaactcaacaatcatctttgaagattagccggtaaataaaatattctctatatcggagaatatttttgggagagatgaagttttcactctcttaaatagataaactgagattaaattaattagaattaaaattaaacaattaaaatttaattattttacattggtaaacgttattttccgccatttttatggctgcacaaacaaaaaagtagttttaatgtttaagtaatagtataataatatcaagtttaaaatgctacccccaattaacctttgaaaggtaaaaaattttgttttttttttaaattttta

SEQ ID NO: 16886 - DNA, 745 bp, Arabidopsis thaliana landsberg
caaagtcgacgcattcaacatgttaattattgcgatgacttctaaaatgaggtgtagtttgtactttgttatttgttttattgttcaaacacattattagaatatagagaactggtattaaaaaccggaaatcgaccgagattgatggttgaaatgacaagatcaagataattattctataagtatctaaaagattattaataaacgttaataattaaagtttagaaagtttaacattatctttaaatatattatttacatttaagtttatcgtagaatatgaaatctcatctttatataacataatgtatctcttataactattttcatgagagtttattacaattcttcctaaacacttttgtattcttactctcttcaagtagatctgcctaacttgagaaaatctgtaatgaattgaggaaaatatatataaataaatactatttttgattatataaaaaagaagaatatgcgaacaaaggtaaataaaacttgaggaataattaaatgttaaaataagaaggaaaaaagttaccgcataaatccagttttcaatgttttattaaaaacggttataattataaagtattatccatgcatatgcaagagatatagaccaagtttctgactgttttaggatattgcataaatggctttcaacttcattgttttcgttggtcgagtcatgccatgcactttttaaatgttccactaatcatcttacaggttaggttagctagta

SEQ ID NO: 16887 - DNA, 3278 bp, Arabidopsis thaliana landsberg
  unsure (1)..(3278): unsure at all n locations
atgtatgggcgctcactctctctcactcactcggtagtgcttaattacttgcatgcaatagaaaactattatgacacaatcgggtttatttttcaagaggcacgagtagctaggtgatgtagataacaagtttcagtaatataaaagttttatatcattcttgtctaagaatgatcgcttacttttggttcttccctctcttactcctctgtgaaatcaatattttaactaggtttgcataggataacgattccaattcgttggatctacataagtagaagggctcgatcgataccaattggttggatcttcatcgttaatggcaaaaatctattttcacgtcaattctggtccaaatatctcagataggataatgagttttatgattatcccaaaggaaaagtatatattgatttgatcttatattctccttccgagcgttaaaattttcatatttcaagattaaatttcgtacgcttggtttaggtaattttgtttggtcgaaagaaaaaaaaaaggtgattttatttggtcatttaatttgtgaaaagatgaataaagcacaagtttttttcaaactttatttcacgaatatacgggatagaggtgcatatcaaccaatcctctgggatggtgaaattacaaaacatataatatttttaaaaggtacaatgggatgattaaaacatactaaaatatggattttgaacaacaaacatcgttaaacaaaagattaacggttgatcttttgcagaacttgaagtctggcctttgcaatcaacttgctatgatcttccacactttcaccaacctccgtgattttctttgttaatttctctactttcttactgatctgagttaggacaattctcgtggccgcctcattatcttcatggtcaatagcattatctacaagtttcaacatatttttgatacggtcttctagcccgtcgactaaaatcgatacggtctccgtcgcttcttcgtttgtttttatacctttctccaccgattcttctatctcttccactttcttcagaccttccaactgtttgttcagagcatccttctttttatccaaggtagtgtagactccagcccatcctgccgcaagcagtggtgcggctagagccccaaagccggcagccgcacccacgcctgttgcaattagagctattgatgcgacggcaacaatagcaaacgcagcgccgaaaaccacgtttgtaattaatgtttttttctctagattagtgatttcatcctgaatcttttttttagtctcactcacttcctccagaagggattcttgctgctttttgatcagctcgaactgagttgtgagaactttgccgtcaaagggatctcccatctctttaaaactcttgaggtcctccaatgttttttcatacttcttctttttcccaccaacatctttttctgccgactctttctcaaactcggccaaggcctctcgaatgagaagttggcccatttctgcgttctcgacgcagttctctatagttttgaaaatctctaaagtctttttagtattttcaaaataggccaggaccaaatactttagagcttggttgtcccacacatcgtcttcgatttcggtaatgaagtctgccacaccttgggtaacttcaactaggtgcttggagagctccatgtgtgcgtcgtgtggggaggacgaaccattcttgtcttcaacggtgagtgagtctatcattttgttggttcgctgctgaagggaagcatcaaaggattttagttttgggtgttcttcacaagcagatttgtaagcactcatcatgtcttccgagcatttcgacatcnnnnnnnnnnnnnnnnnnnnnnnngatattgctgaaaggaaaaataatcaagataagttagagagatttaggacagttttagaggagttaacatccacaaagtagttatataggttttttcttctgtttataaaaagtgatttttttagttgtcttagtgaatttttattacttttttttgtgcaaaatgaatttttattagttaatcttaataaattgttaatttcaatgagcgacaattttgaaagtaattggatctatcgacattatattcctagattttgtagaatggttttaagaaaatatattatccttgataatgaaacatagttttgtacgaatatttctatattaattttaatatacatacatcattctcgataataatatttattttattttcaaaacaataatgtatttgaattttacatagaaaaaatacagttacctgtaaaaatcatgaggaaaaagaaaattatgataataaaaataatatacgtacaacacaaaacataataaattgatcattaaactacgaataaaaagagagttgaagagagaaaaacttaaccagaaattgaatcagaatcttgctcaatactctcaccaatatatataataggtatgaagttttgaatgatttcttgggtttgtgatttacaagtatttataggagaaacctgtgttggcgagctcaagttgagtgatgaggatttaagatagaatgaaagaaatgtcgataacgatttttaaattttatgtgggttattgtgatataaagatatggttttgatttttatttttattttttttatttgagtaacattaaatgggaaaagagagaaatgagccaaggattttgggtctataggaagaaaacagatggcactttctagagaagaaaaagaattttgatatggttgtgtaatcagtgtggctcgtgttttggtttcttgaagcaaaaataatcttgttatttagtcttaaaaaccaaggaaaatactttatagtctcgtttttattttgcccaaagaaatgtcttgtttatatttgatttgtctgagtttgagatgtgcagaatggtattagtttaaaattattattttcgttagatggtaactggaaattaagtttggaagaggagtggagtggcgttgccggtgaagtgataaaattatcaaggcatgggagaaaattattattttcgttagatggtaactggaaattaagtttggaagaggagtggagtggcgttgccggtgaagtgataaaattatcaaggcatgggagaatctaactggagcaatggggattacgtgtttaagggattagatgtttaaggtcctaagttgaaggagtggattattgacacgtagtatatgaataattattgggttcacaatcttattcatccttttaattgactaattaaaatataat

SEQ ID NO: 16888 - DNA, 702 bp, Arabidopsis thaliana landsberg
taggagaaactagtgataacagtacactagaatgtttacaaacgaacaagtgtccaattcaggtctaaaataatgaatattataaagtaaagtaaatatcattgcaagcaaaaacaaaaagaaaaaaagaaaaaaatcttaatgtagtcaagtctctttttagcttttaatatttgatttatacataaaagaaaaaacatacacacaagaataattgcttcgtatttggatgtatatattagaaagaagcaaaccaatctcttctcctcaaaactattcctactctcacactccaaaataccaaaaccagaacatttcttttttaatctttctctcgttacattaaattttagatgcaagactcttcgtctcaacgtaacctccggtcaccggtgccggagaaaaccggaaagacctcgaagactaaaaatgagcagaaaggtgtttctaagcaaccaaactttcgtggggtcagaatgagacaatggggaaaatgggtgtctgaaattagagaaccaagaaagaaatcaagaatctggctcggtactttctctacgccggagatggcggcgcgtgcacacgacgtggcggctttagccatcaagggcggttctgctcaccttaatttccccgagctagcttaccatttgccgagaccggctagcgccgaccctaaagacattcaagaagccgccgcagcag

SEQ ID NO: 16889 - DNA, 2518 bp, Arabidopsis thaliana landsberg
ccaagcagtcaacaaaatttgtcccattaaacggatccccaccaattcctacacaagtagattgccccaaacctactgcagtagtttggaaaacctgcatgaaagattaaccaaaatgcaaccattagaagaagtacttaataagcaggtcttccagtaaggaactgacatcagtgaaagcttaatctaacaatcgacggagtagaggttcttaagtaagacaactaatcatgctaaaggctatggagacaataagttgagaaagacagagacaaacatgaaggcaacacaaagacccttacagcttcatatgtcaatgttccagatcgagaaacaatccctatcttccctggcttgtgtatgtatcccggcatgatcccaatcttgcattcaccaggtttgataataccaggacaattagggccaatcagccttgtttttgattgactgttaagagcagcctttacgcaaacctacattacaaaagccagagaaatcagtagagtcgccttatatttagtgtacaacttatcaaaagtatccgagcagatatggcaagaggaaaggtgcacaatgagattgaaaaccaaaaccgtaaacaagtattaccatgtcatgttgaggaattccttcagtaatgcaaacaataagatctaactcagcagctaaaccttccatgatagcagcagcagcgaaaggcgcaggtacgtaaatcacagaggcattggctttagtctcagccttagcttcagcaacagtattaaaaacaggtagacccaaatgttctgttccacccttctttggtgtcactcctgctacctattaaccaaacaaccacaaacctaaaattagatcatcacaagctttaaagcaaacacaaaacaaacaccatttcatcagcataaacgaaccaattccaagtgaatttggaagatgaaatagtaaataatcgtcttctatgatctcaactaagaatttcgattttgcaaatcaaaattggtagtcataaataagtattgaatccgaattgcacaaaaacgttgaagaagtacatttgcatctatgtgaattctcgaatacaataccattttggtgccgtattcaatggcttgttcagtgtgaagggtcccgttcttacggataataccttgacagatgacacgtgtatttttgtcgacaaagaccgccgcagaaggcggaggagtcgtcccgaaggaacgagactgtagcaatgaagtgagagagcagacctctgagctgccgctgcagccgccgccggaacggcgaagagatccgagaagtctcgtgacctgcctagacatggctgtttcaatgatctaaaattcttaaacctacgattccgaactttgtactgaaccctattcagcgaaatgggaaaggaactttttcagcgatcttcgttgaagaattaacgaaagcttttgggcttaatttaatggatccatattaaggcccattttgatttgagtccattcaaaatttgtgaaattttctgagaattgatattctaatttattttgaagtccaaaccaaaagccaaaaattaggtaacctaaataaatatgtaagactttttttttttgggtttttcttattaaaacaacatttcattatgatattttttacgccatgatcctcagccttaaactttcattcgtatagatggataatatcataatagtacaactctttttattgccaccaagcaacttattgtctgctttcagaaattttatttttataaaatattattcattttagctataactcaatttggaactttctttattcgtcccaaataaaatatctttccaagagagatggaaaaatagcttcatatagagatattttcaacaacttgtccctctctaaactcatccaccttccaaaacagagaaggggaaaatatgacaccggctattttttctccgacgactcttcctccatcaactgctacatggccatgttcaacatctcagaagctcatcaccgttagatcaccactcaagttcaagtgtagagcaacttcatcatcatcgtctatcactgactttgatctttatgacctcttgggtattgatcgaagttctgataagtctcagatcaaatcagcctatcgtgcgttgcagaaacgatgtcatccagatatcgcaggagatcccggtcatgatatggccatcattcttaacgaggcttaccagcttctctctgatccgatctcgcgccaagcctatgacaaggttataattcttatattgcttctttgatcttgtagtctctgtcaaggtcacaccaagtaaatatgaatgaaactttcttgttgtaggagcaagcaaaactggaagaactcagaggctacacagggaaaccgacatactcggtttggtgtggaccagaaacagagcaacgagctgcgtttgtggacgaggttaagtgtgttgggttgtttgaagtgtgctttgtgtgcagagaaaacatttgctattgaaactgctta

SEQ ID NO: 16890 - DNA, 1984 bp, Arabidopsis thaliana landsberg
caatgctgaaggactagtcggtaatacccctgctaatgctcgtgatagcgaagttggagggcaaacaagtacaaatttggaggaggctatatgtcttactctggaaagcgcagaaatacctcatgacgatgtttcaatagttgggttatcatcaacagactcaacatttaagacaccatcgaatagcggaagcttctcaagtgacgaggtgatggacaaagatgaattatcgagcaacaattgtcttgtcaggataggtatgttatcggataataatcggatgtttatagtagttaactttcatcacgataataaagtgcttaccgacatcaacaatattagtatggtggtaacaaaaatgttatcgagttagtgtcaacaaaaaggtacctcgcatttggcatccatatctttagcattgccaagcttgagggcggcttcttcatcagattcagattcagtaccagcaacctcatctactatatttgagggccttcatggatggtggggctgcttctaaaacaacaagttgcaaagcgtatagaagaccttgaaccaccacacacgtagtggcgagcttttcaagttccctctcttgaatggaagtcatcatcatctcgaaagacaaacgcccccaagggtaagacagaaacccctgcagatcctcagccatttcggcgtgatctttttctattttttgatggtgagaggtaggcaacaaaaaaccatccacaagagccaaacaagcatatcttaaccttatttctcgatcagttaccaacctttcttaagcatggtaataactttatcaacaataacattttcttcgagaccaaacaaggaattgtagtaaggaatctgcttcccagtcgtccctttcttcttctttttttggaccgccggatactttccacacggaagcccagttacgagcttgaactctcttaacaaaaatcggacaggagtaccagcgtacacttcccagatttcattaggattggcaacttccaattgccgacttcgtaagaattgaccaaaactcgcaaaaacgccggcttgttcggaaactccaaaagccgtcccagcgaaatatcgccaatgaaggaccgctcttgatcgtcaaaggcgtttatattgccgcatagggttttgattttgtggtacacattaaccctctcgccgagagattcttctccaaaagcaatcaatcgatttggtaaatcaacctcccccatgtgcaaaataagatggggatttgtcataaatcggcacaaaccacagaaattcatcaatcaagaacccaaaaatcaaatccataccatacgatcgagactcagcggtacgagagcttgatccgatatagaggagtataccgggtaaacaataaatatccgattgaacacgaaatttccttctatgaacggcagtttagactttcgctctctctttgggactctaataaatgaatatgtgaacagatgagtgtagaagaaaggaaacaccgcttcggttttctataaaagttcaatttagttcataattatatcacgcttctccaaaaaaatctatcaaaaagattatgttgtcttctgacacaatactagtccaacggtaatgagattttcgaaaatatattataggggtagcatggtatttaccacataaacagtataagacaaacagtggcaaaatcaaagaatgaatttcggattcttctgagtacatatattgacaatacccaatattgtaagacaaacacaaagttaataataatttcaaaacaaaatctcgaataaaatctaaattatttttgtttgtttaaaatgaccattgtagctcatgtttcctcacgtgagatgattcaaattcactaaaaaagagaagaaaggagaaaaaccttcaacaatgttgttgggtcatacgaagctttccgcttttctcattgtgatgataacgttctcacaagcccaatgatgaaccgagt

SEQ ID NO: 16891 - DNA, 1554 bp, Arabidopsis thaliana landsberg
catacatattcctcctttcttttcttcgcccaaagacaaaaaattctcaaacttggtgttacaccattataggctacagcagaaaacaacattcaacccaaaaccaaaaacagaaaaataaatctgaacttttctttcacatcttcgaaaactactttaaaatcttgttctaattatcacgtctcggttgccttttgcgtggtgccgcggtttcttccttcttctccgcctcatccccactctttgaactctccgctacttctggtttcttcttttccacaggtgccgccgcctataataccatatttattagattcttctcactatccacaaatgaccattgtgcataaaactctttatggaattttgtttttacctttttgccaccaaagataagcttgaggaagagcgagaagaatacaaccacaatggcgacgaggacaccaatggttaagtttggttgttgctcggctttctcaatcagttcctacaaaacacacatttcacatcatcactcaaggtcgagtcatcaacaaatcacatggtaaatgagggagaacttaccgtgatcttagacttgtaggcacttaggaaagataaatctgcaaccttgttcaagaggtcgaatacaaccttctgcaatatcatgcacataaatacagcggtaagtatttatacataaagctttataatatatcaatattaagtttaattatggggaaaaatcaatttacctggtagctcttgagaccatctgcagagccagcagcttcctcttctgccttttgtttctctttctcaacatcgaatttgggcttccaagtggtctgtctgtaagtctcagcgaccttctcgtctttcgctatcaagatgttgtcaaacaagataccatcttgcattgtccagatctctataccgatggctgcaatgggttcgtaatcgggtctgtctagctcaaagtagtcagggttagggatatctctgggtttccagattcccttgtaagccgggttatcaataagaggtgagctccatttgcccttgtaagcaggattcctcttcattggtctcttccattcaccacaaccaggtgctgcttcacacttggggttgtcaattttaggagcctcccacataccatcttcctcatcatcccaatcttcaggcttggtcgcttcggggtcgtcgacctcctcaggctcatcatctaaccatccttcgggtttctcagcttcctcatcttcaatctccataggtgcatcctcatcccagtcctcaggcttcacggcatttggatcaggaatcttggctctttcgtcccaatcctctggtttcttgtcttcagggtcagggatggtcttggcagggatcaatgcaggctcaaagtcttcaccagagagtaaattggcctttttcttctcctctccatcaaccaaaattctaacctcgttgtcgggtttcaagatggcggtgtagacatgggaaagcttgtcaaaagggacagagggagggaacttcagatggtgttcaacgtactcgccactcttgggattc

SEQ ID NO: 16892 - DNA, 2993 bp, Arabidopsis thaliana landsberg
  unsure (1)..(2993): unsure at all n locations
atagatcaaggcatatttcgttaccgagtgatgcccttcggactcaagaacgccgaggcaacctttctactcttcgtcaacaaaatcttcgcattagggattgggaagacaatggaagtttacatcgacgagatgttggtgaaatccatgacagagaaagatcacatatcccatttacccgaatgtgtcaagcccaatcctgcaaagtgccgcttcggagtaagatccggcgagttcctcggatacctagtcacgcaccgtggcatcgaggcaaatccgaagcaaatcgaggcattgttgggaatggcgtcacctcagaacatgcgagaagtgcagcgcctaaccggaagagttgcggtccttaaccgtttcatctctcgctcaaccgacaaatgcttagccttttacgatgtgcttcggggaaacaaaaagttcgaatggacgacccgatgcgaataagcttttcagaaattcaagaagtacctggcaagtccacccatcctcgcaaaacccgtaatcggagaaccactatacttgtatgttgccgtatcggatactgcggtcagcggagtgttagtcccaaaagacagaggcgagcagaaaccgattttttacgtctcacagactttcaccagcacggaatctcgctatccgcaaatggaaaaacttggtttagcagtcgtaatgtcagctcggaagctgcgaccctacttccaatcccattccatcatagtaatgggatccatgccactccgcgccatcttacacagtccaagccaatcaggacgtctggctaagtgggcaatcgagctcagcgaatacgacatcgagtatcggaacaaaacatgtgcaaagtcccaggtcctagccgattttattgtcgaactgcccacctaggaggtccgggaaaatccgctcgacacaacttggattctacacgtagatggctcgtcctcgaagcaaggctcggatgtaggcatccgcctcacctcaccaacaggagaggtcctcgagcagtcatttagattaaactttgaggctaccaacaatgtggccaagtacaaatcgctcgttgccggacttaatctagctcggggactaaagataggaaaaatccgagctttttgcgactcccagctcgtcgcgaatcaattcaacggagaatacacagctcgggacgaaaagatggaagcctacctgattcatgttcaaaatctagcgaagaatttcgatgaattcgagttgacaaggattccacgaggagaaaatacatcggctaatgccctggctgctctagcctcgacatctgacctgagcctgaaaagagttatcccggtggaattcattgagaagccaagtattgagctcggcaaagaagaacacgtcctcccaatacaaatcagcgcggatcaaaacaacccagatgatctagataactgcagctcagaatggatataaccaatcaaaagctatatatctgaagggaaatggcctttgacaaatggaaggctcggaaactcaaagctcaggctgcacgttttgctctagtaaatgaaaaactttacaagtggcgattatccggaccattaatgacatgcgttgaaggagaagcggtttgtaagatcatgaaggaaattcacggcggctcgtgcggaaatcattccggggggagagctttagccattaaaataaaacgccacggattcttctggccaacaatgatcaaagactgcgaaaactttttaaaacgatgcgaaaaatgtcaaaggcacgcgccaacaatccatcaaccggccgagctcttgttgtcaatcgcctcgccgtatccattcatgcgatagtgcatggatacaattggacttatgcatccctcaaagcagaaaaaattagttctcgtcttgaccgactatttctctaaatggatagaggccgaatcttacgccaccataaaggacgctcaagtcaaaaactacgtgtggaaaaatatgctatgtcgccacaggataccttatgagatcgttacggataatggctcgcaatttatatcaacccgcttccaaggcttctgtgataaatggggaattcgactaagcaagtcaacaccacgatatcctcaaggaaacggccaagccgaggccgccaacaaatcaatcctcgacggattgaaaaaacggctcgatgctaaaaagggctcgtgctccgacgaactcgaaggtgttctctggtcgcatcggacaactcctcgccgagccacaaaagaaacccctttcgcaatagtctccagaaaagaatgcgtaattccagccgaaatgatagtaccgagcctacgccggagtctatcccccgagaacacccctgataatactcagaggctcctcgacgaactcgatctgatcgatgaacgaagggattcagccttggttcgcatacaaaattatcaaaatgaaacggctcttcattataactcaaacgttcgacagcgtagattccacgaaggagatcgggttctccgaaaagtttttcggaacacccccgaaccgaacgctggaaagctcaggacaaactgcgaaggaccatacttaatttctaaagtcatccgacccggagtatatgagctcgccgatttaagcggcaaagccgttccaagatcctggaacgcgatgcacctaaggaaatactacaactaaatccaaggtgactaaacttnnnnnnnnnnnnnnnnnnnnnnnnnnnnnnnnnnnnnnnnnnnnnnnnnnnnnnnnnnnnnnagctaccccccattaaaaaggggggagtgggtccgtatatccatactcccacttattatatataaattcgattcacaaataataaattcgattcacaagtttaaaacgcttcggctaaatacgatgagcgacggctcggagtatctattacgcctgctcggctacagcgcgctatataaatacaagataaattctctcagaatatttctgagcagaaatttctat

SEQ ID NO: 16893 - DNA, 740 bp, Arabidopsis thaliana landsberg
agctccccatggggagtccccctaggatagttgggtcataggttataaatatcacaggttatcgatgttttattgatggttcatggaaatagagtgataatttctcgggtttaggattggtatgtaccctatctaatgatgaggagccaataatgggcgcatgcaaccttcggcgaagcctaacatgtttatatacagaagtggaagcacttgtgtagggtatgagatatatgattggccaagacaaacgagaagtgagttttctcaaagacggctcagacttggcgaagatggtgtttttccagatagagtggccagctttctcttcttatctataggcgatagagagcgacaacaacgagttcgacttcttttttttatctttgattccaaaatgagcgaatataaaagcggaaaatttgaaacaacccgaccttttttctattttttaaacataattaaatattctcataaatacttaattaaaccaaccaataaagcaacaattaaaccgcaagtcaaagatactattttatgaataaataaatgattcaaccaacaaaccaagaatgattaacaatcctaaaacagccctaaccggttctaataaccaaaacacaaaaataatccaaacgaattcctagatcatactctcttccttgccatgattccacgatcacactttatctttacctgcacccaaaataaagagatgcctaagtattatcacaaaatactta

SEQ ID NO: 16894 - DNA, 3465 bp, Arabidopsis thaliana landsberg
tgatataattcttcgaggaacgccttatcttgttctttacttcaaccaaggagctcaaccgggtttggtaggttatagtgatagcagccataacgtggatgtggatgatggtatgagtataggcggtcatgttttgtttttatcataatgtggtataactattcccgagcaccacccggaactagaaccagcggactagcttgtagtcgaggaactacttgtagccgaggaccagcttgtagccgaggagcagcatgtagtggaggaagctttggccgaaccaagaagacaaatgactcgctcgaaaaccaaacttctcaaccaagctatttcggactacccaaacacttggacaagaaccatgatggttgtgatatctttccaagacgattggtaatgggctaagtgttgctttggatgctctttttccctgctaaggttttgtcccattgggttttccttagtaggtttttaacgaggcctaagtaacacttccaaaaccccctattatcaatcaggcccaagcccaccaagaggaccacgaatttggaaggccatgggtctatttttgttcaaattttcatttatgatttctccttttccgagttgtcttggagcttgttccaagactaacttttcctcttttcttcttctctatttaaactcttgtatttcctcattgtaaactcatctatctttttaatctcaaactcttttaagctagatcaaaggtaaatcaaaggccatccgcatcctttgtgtgaccattcgctccacatcctttggtttgagtgatctcatgatctcttagatgcaaagtctatctcctactcaacctcaagagtgtcgatcttagggaattcatattaagtggtatcagagcacattctgaagttgagtactctatcctttcatcacttcatcatttcggttcattctattcatcatttcatcacctcatttcattttgtccgttcatcttcccatccgtctgttcatcttcgctatcatcttgttttaattttcataaataattggcttgcgataaaattgcaaaatcaattggatctgaatctaacacgagtctagtattttagaaaattgtttatggaatttttgagcatgatttgataattaaatctgtgcgatcttctttatctgttcttagaaaaacgtttagtattctccttgaactagtgactggtttagtgttgtttgttggcagaaaatggtgacaaccgaatcaagctcagagaagagtgttaataaccaagccatcatcgatgctatcacgttacaaatggagaaaataattgatgtcgagcttaagccaatcaacaatcaacttaaagcgaaagggaaagcacccgttgaacaagttgtcatctcggaaggagagcaatctcgaaaggagatgaatagtcgaaaccatgacccaaggaaggacctagtagacccaaacgctcaagaatactacaaccatggtcactcacctcaccggagtaactggagaccaagatgtgtgagagaagaaagagatcttatggttgagaatcttggtggctataagatgaaggtttaccttttcatgggaagaatgatccggatgcctatttggattgggaaaagaaaatggaacttgtgttcaattgtcaaaaaactacgccgacgttaaccgcgtgaaggttgccgcaatcgaattctacgactatgctcttagttggtgggatcaaatcgtcactacaaggcagcataatggagagtatcctattgagacatgggaagggttgaagcttctcattaggcgtaggtttgtgccaagccactataatcgtgaatttcattccaagcttcgaaagctcatccaaggtactcgatcgatgaaagactattaccaagagatggagactttgatgttgcacgccaatataatggaggattgtgaagtgactatgtcaaggttcttgggaggattgaatcgagaaatttagaaccgcgtcgagatgcaacattacgaagagttggaggagatgctacattatatggttcaaattacctagaactactctctcaaataagagatcaattgcagtattttaggatcgaattcacggagttcttttgttcaaacaatgagttaaatgtcgagattaagctagcagggtatgagtgaaataataagtaaacaaagtaaaaagacagcaggttgatttggttgtgaacgattaaatatagagctaggaacaaggtattctaaggaaactattggtttatagatctaatgaaagctaggttgttatcgaaccattcttaaactcaaactctaattatggaataaccggtggtgttccgcgaaactccctatatctatagctaagaataaccggagaagccgagaaattatcaacctaaatatgcattcttaacgagttcgattgttcatcttagtagataggccgattcttataacacacctataaactagactcatcaaataatagatccaactacagatacctacggcgggcatatctattgtctggattcaagatctagttaattactttagatctagcattacgcacaattaaagataaagaattctacagataacctagcaaagggggcaatctactaaaccttatgattactaatgagaaaccctattcctaacaagcagactactcagacatattgattgaagcaaacaacatatttgagtatgaaagcataaacacaacatatatagatgggaaaagaagggatctcttcactgtattaagaactgtatgaatctctaaaaacaatcgatgaatagcttatgtctcttagtaacagggtttgcagaaaacttgatgataaaaactagataatgaaaacttaggtctaaacaatgtatataaaccctaaaatgtctagggactaataatgcaaatagggaagtcttctggggcaaatttcctcttctataaactcgaaagcgtctaggacttttgctgggccgaaactggtgtcgatcaacaccaagagtgtgtcgaatgacactcctcgttgattcttggatccaaaatcgtccttagcttccttttccttagctcttgctccaaaatgtctccttatctccattgttgttccactgcatagagtacctgaaaagacactaaaaggactcgagaaataacataaagattcaaaatccgatacctaaaacatagataaaattagtgaaaatcgggttatatcactacataaagctatcctagtggagcaacaagagaaagggttcttctcaggcgaattatgattcaaactcaccaagctatccaagacaagtcaagccagccttcattcaaaagagcgagtctaaaacaattccaactatccaagagcgagacaagaaaaaacccgaaagcgccaccactactaggacccgtgattttcgatgcttctagtgacatgtactcg

SEQ ID NO: 16895 - DNA, 783 bp, Arabidopsis thaliana landsberg
aaaaaaatggcgttcacgtcacatatcttcttgactaaggacaaacgcttgagcttgtccttttgctcagctgtgactcgggctgactcttcttctcgggcagcaatctcagcatggcgctgggcgttatatgcagcttgctcttcaatttgccgctgagcttcctacagccgttcttctaaggctttaaaggttgagtctccggggagttggcggttggcactgcctagagtttctttaagacatccaagtccataaggattgcctcttgtatccctttctgtggactgcaagaaataaagaggaagataattagtgacagatcctcaaagtctctaagactctgaaaaagacaaagaacatcttacctcgagaaatatggttgtatactcatctagtgtgagatcccgaggaagtgaagagccatcagacacagcagaagcagctgcttctagttcagataacttctctctcacattttgctcatacgccagagcaatcttctctgccttctgatcaacataagtcccatccgactaagtgtgtgtctggatgaacacctcaccaagagggacaggtcttcccattttttcttcttgcaaacacagatcacaatcttcattactatcaacagactaaacatcacacagtaaaacgaacatcactaaaacacatgggaagattgcggaaacacttaccaattcaatttggatttcttggaaagactttggcccagagaagtggacgtgaggaccgaggggatcctctagagtcgacctgcag

SEQ ID NO: 16896 - DNA, 636 bp, Arabidopsis thaliana landsberg
ttctgtattttcttcttcaaaaagtcctgaatcctacaacctaattcaaactcagtacatccattcttgtagaagaggcttttcatgcttcagacatccaccaccagctactataaaacaaacgaatagactcaatcaaatgtctgttttgtctagaactgaaattaaaaacagaggatgttttgaagtagtaccgtaatcgattttgctgcgtcctgtagagagaccagctttcgaatttggtttacagcgaaccggtaacacttcaattttaggtttttgctggttaacaaccttaacacatccatctcctgaaaaatccaaaatttttttccaattaagattctagattagcaaaattgaacgaaagttctcaaatttcagaaactcaaaatgtgaaatcaacggaaaattgagtaaagttacctgattttttcttcggggaatcagaagggtttgagtatctccggggaaggaaaacgccggtaccagtcgacggcgatttaacggcggttggaagggtgtaaaggctctaacgggaaaggaggtatatgccagcatttggaactatcctatctgagattgaggataatgcggctccatacccagtagcagtataatcgccacgttttgagg

SEQ ID NO: 16897 - DNA, 1859 bp, Arabidopsis thaliana landsberg
gtaatgcagtacatgtgagcgtcttctcatcaactctaaccgtacaatggcagggaaagtcgtgttatgttcacagaatcaccttacagtatttctgtaacaagggctgcacattatgtgaagagagcgggtggtctcggtgttatcatcgcaggacaaccaggaaacgttctcagaccatgtctagatgatttcccttgtgttgctgttgactacgagctagggacctatatacttttttacatacgttccaatgggtatgaaaacatagactaacatcttcaccacttagacaagtaagaaaataagaaacatgttgttttatggtagatcacctgttgtgaagatacaaccttctaggacacttattggacaaccagttggtacaaaggtagcaagtttttcatcaagagggcctaatccaatttcagcagcgatcctcaaagttagtcaaaatctttacatgttctgttttgatcagactcaagaaattatcttgccttagaagttatcaatcatatgaatgcagccggatatagcagcaccgggagtgagcatattagcggctacaaccactaatacaactttcaacgaccgagggttcattttcttgtcagggacatcaatggcgactcctactatttcaggaattgttgcacttctcaaagctctgcatcctgattggtctcctgctgccattagatcagctattgtcactacaggtgcttatcttcttcattcaatatagattagacaaatcaagaacatactgatcttgataatcgtttttactctgtgtagcttggagaacagatccatttggagagcagatatttgcagaagggtcacctaggaagccagctgatccattcgactatggtggaggccttgtgaatccagagaaagctacaaaaccaggtcttgtatatgacttgggactcgaagactatgttctctacatgtgttctgttggttacaacgagacttcaatctctcaacttgtcggtaaaggaactgtctgttcgtatcccaaaccatctgttcttgatttcaacttgccttctatcacaatcccaaatctcaaagaagaagtcactctcaccagaactcttactaacgttggacaacttgagtcggtctataaagttgtgatcgagccaccgataggcattcaagtgactgtgacaccagagacgcttgtgtttaactctacaaccaaaagggtctcttttaaagtaaatgtttcgaccacacacaaaatcaacacaggttacttctttggaagcttgacttggagtgactctctacataatgtcaccattcccctctctgtgagaactcaacttttgcagaactactacgatgaaaactgaacctataaaaatgactaaccattcgtggaagtattaaactttatttaacgttgaaagtatttatttttatgtaaccatctatacttatactgtatacttgtatgtatcaaactgtttgactttatgtaacgttgtttaatagttctgaagttaacgttgtttaataatgctgattctacttatgatacttatctccaaatttcctccaagctttacctttcagatttttatgaatataaaattatattcaacaaaaaaactgttatacaagaaatgcaacattatgagcaaacatttttgagagattagagaatttttgagggatagattttagtagagactagtgactatgtgtctgaaaccagaatcgaagaatgccttcgtagtccatagaacccgaagtggccattgtgcttagacgattacggatctactcttatcaatcatagatgtgtgctttgaaacttgcgtgtgagactcaccatg

SEQ ID NO: 16898 - DNA, 382 bp, Arabidopsis thaliana landsberg
tggttaccttgatccagagtatatacttaacacacattgttttattcttaattcaaatgattagaaacaatttcaacatattttacataatgtcttgcagatattacagaacaaattggttgacagagaagagtgatgtgtatagttttggggtcgttttattggagatcataacaaatcagcgcgtgattgagcagactcgagaaaagccacacatagcagaatgggtgaatttaatgattaccaaaggagatattagaaaaattgtagatccaaatctcaagggagattaccattctgattctgttccgaagcctgtggagctagcaatgacttgtgaaaatgaaacttcagcgacaagaccgaccatgactcaagttgt

SEQ ID NO: 16899 - DNA, 1742 bp, Arabidopsis thaliana landsberg
ataacaaatgaatatagaatcttcgctcacatccctcagttttttattttcccctacacagtctcatagcgaatgaatcaacatgccttgctctggaaccgctcctcatatttatagatgcctctgatacttgcttatttcacaagcttccctctgtttcctcacgtgccttgcacacacactcttatcatgcattcgcagtcattaaacagtgtcatagttattctttatggttacaagtgtggggttggtgactgatgaagacaactgatcttattcatctacttcttggagctggagttggagaaattcgagaagaatgaacaaattacgacaaggtacattgagaaaatctccggtgaagcataaaagcacaacttatacgtaatatttctatatttgcttttggagacagaacatgtgtcagtaatcgttggtttagacttctaggtctggtttggggtttggtacagatggttttatggctgcaaatgtcttatgttgttgaacgcccacaagatgctcgatgaaatgccgaagagagtggcttgtttgtaaaattgcagttttttggtggtatatggatgagaagcagatgatagtgagtagagttttgttacttgggggtagaaaattctcttcgccatgagatagactattagagttaagcgggtaaaaacccggactcgttttgtgagacaaaagaacctgaaaaagttctcactttgactattcttgcttctatcaagccattgcaattattcttggaaaagtgaaacacacactctcgttgtctcatcttgctctgaattatcattcttatctgctgagttcaagactggattaagcatgattcttgaagataggagtgtgactgagataatatgcattcactggaaaccatggtctacttttcaaaggtaatgtctctgttctttcaatttgagacagaacaaaaggaaagaagtagatattaagttaagtgtggtagcttgagaaatgggaacaaatggttagatttgtaggactggaaatctttatgctagaaagaaataggggtagtattggacaaaggaaaggagaagggacattgtgtttgattcaaagctaagacaaggctgcatttgtgtcactcaaaggagaataggaattacctctgagagagtttgaaagaaaaactctacaagtatcagaatgtttaagatcgttcctggagtacattcagtcattcagatgaaaagacggagaaacggagctgtggcgggaatgtaactagtaaagtactttcttgaggattcggcagtgctcaagaagtttatgctgcgtttgggttgtgagagaatgaataagagtttatgctctaatcatcagtggaactcttgagattaaggagatgctctgcttattgtgaagtcgttgttgaactttcagagagtgattatgattgatacacatgagtttgtaacacttaaaatgtgcagatccattttggaaagtttagtattgggatttgatgtaagataaggatagtactgtgtaaatagtgacaaaaaatatcacttaattattgagtcttcatgtgtatatgttgatataagcgataataaattcttcaaataaagaatatcatatatatatgcacagccataattgaaccgatggttttggaggaagacagcgagatataagacgcatatggctcaattgctcaagcggcacaatcaaactttacatgtgacaag

SEQ ID NO: 16900 - DNA, 771 bp, Arabidopsis thaliana landsberg
ctgcctttcccgcaccacacgttttctgctccatatcaacaaaatagctaacattattcacatatatatcatgcaagttttctctggccatgtatctctcgcactgtctaagcccagcaatcattttttcaatctcttcatgagctctctttgtgaaccttgtctgcaatttttcagcaattaggaatctctttgcagttctgaccatgcattgcctccggatatcctccagcatatccaatattggctttctccttgcctgcctaatagtcctattaaaagactcactcaaattattgaggttgtcattgcaacatgtacttattctgaaaaatgctcttgaccatgtcattggactagtaagctgcagagattcatgagcttgacgattgtactgctgtagctccatcatatgattattaaactcctcaaccgtgtagcttcgtgctatcttccaaaacagacgctggaactctaaatcatggctctcccttttccaattatccatgatgtgttttgaacattgtcgatgctcagcatgtggaagtattgtatggatagctttgactagcccctgcaatatgacataaaacatgaccaaaaatcagtaaacaaaacaacaaaccaatttaacaaagacacaaagttaaaaaaactaacagattgtttataagagaggatagctatattagccatttgacaaagccccaaacttgcagatagatgtcttaaaaaccatcccagttgtcatcattttctatctcaacgaca

SEQ ID NO: 16901 - DNA, 972 bp, Arabidopsis thaliana landsberg
ctccaattgaaggaaccgaatgggccgagaggtgatgtcgagaaggtctcggagtggactcgatttaaacgtttaaatagttaattcaaacactaaaaacggatacatttaaagtagaatgattgtgagtaaataggtattaaatgtattctttgggtataaattgtgggtcaaagatcatgtaaagggacacgcatttcttggtgcaaattagctatacacattcttttgtaatactcatagttttctctataatcatttatctattttctagtatattggtcctcaagaattatctttcccactaaataaataaacacttgtgtgtgtgaatccgacatccacattttggcgccgtctgtggagactgaggattcttgagtcgtcagattgtctataccacattttcgagataagcaacaatggccggagaagacgccatcagtgcatcattagccaaaactctcaaaaccatgcagtaaaccatgtcagaaatgtcaccgaagttctcggatgtggaaaaggctgttgaaacgctacaaacaacccatgtatctcttagtcaaaatgttagcactatacaatctcctgtttgttctatgaatacaggaaaccttgttggagtccgacggactatgttcaattcgccaagctcccttgcgcgaaatggagccagcagacaaaaaactcctgatgccgctaacactatagttcatccggaggatggggaaacacaactcgggaacgaagatcaattcgctattcgcagatcagcacgaacaagaaagcctcgactagttcgagaccatgaggaaggttagccgggaactgaaagaaatgagatcaaagttccatcagaccactagttcggaacctgatatcaatcgggtcattgaaaaagctaggtgaacaccttttatcccacaaattgcaagtttgagaatcataataacatgccgttttggcctatat

SEQ ID NO: 16902 - DNA, 1214 bp, Arabidopsis thaliana landsberg
agtatctaaaaattcatagtacactaatcaaatgtttcatattctaatatatataaaatacttaaaaatttaaataacataaatgtgcccacaaactcttagtccataataatcaagggattagtgagattgaataaaaatgggaaaattgttataaatgaagtatataccatttccaagatcgttatagtaaactcaccaagataccattactgaaacggaggagaacggtgaaggtgatagagtaagcggccaactcggttgggccaatatggccaacaaagccttgagttaccaatgaaactccgtacgtagagaacttcgtgaagatcgctggcgccgcacaacccacagtttctttgattcaatccaaaccttctccttcatccccaactcatcctcttcttctctgccggtctttttcaccagagcctccgtgagctctcctcctcttccggccatcgtggagtctatgtgtttttatctgataggaggaaataaatagaagaaagagagagcagagagtttgagtttaagaagcaattttttttatatttcagctgggaaacaaaaggtcgtcaacgccttttgtagcagtgagtgactaagtgatgaaaatactctaagaaatagatgcattttaagatcacctaagatcgtgcattcatcgatcatttgtttaaatgcaattatctataattcatatctaaactttatctttatatatgcttaaaaagtgtgtgtttggaaagtatattggaataaaacaaaatatttttatcaaaaatataattattcatatacatatttcttggtcgtgagtctcgtgtctatgtgttgcataataaacccatttaaaaaaaataaaaatataaaaaaaaaaatcaagaaacgagcatatcaaactacaatagtcaaattcttgttctaagcaacgtaagcaattacaatttttagtgaattaagattgtcgtatatatttattatgaggatttccagaatcaaacgtttatttttctttgtcaaaatgaatcaatcaatttaacgttttagccacgaagatctttttaaaaataattaccaatataatttctttaaacatgtttgtacttttcctatgataaacgaagcaatttcactttttttaaatggtaatcagtttataaaacataattattttaatctcttttagtgtcatcatagtagtaagcact

SEQ ID NO: 16903 - DNA, 811 bp, Arabidopsis thaliana landsberg
  unsure (1)..(811): unsure at all n locations
gaaccagtgatcagaaatgattctaagccctattaatattcccaaatgagaggataagttaaataagtcagatgcagtcaatacatcttcaacattgggtttgttatattagatattaaaagttttacaacttaatattagatgaaatgaactacacatcttcattgtcttttggcacttctatgttgctctnnnnnnnnnnnnnnnnnttcgactcaacacaagttnnnnnnnnnnnnnnnnnnnnnnnnccatcggattcaccgtcaagcctgtctgatggattctcggcatctttttcctccgtcttcgggagggatgaatttgaatctgtgtcttcagtaacaacggtttctaagtgaacgtccatacctcccactgcatctggggatggcggaaatttaacttcaggttgtgatgaacatccgggagagacatcaactaactcacattcggcagtttcaatgtgatctttctcctcaatgttagtttgctcaactgtaagagacactgagggctcgacttcagctaattggccatcagcattttcgtcctccgtcattgggagagatgaagggagttctgaaccttcagtaaccaccgtttcagagttcattgctgcctctaagtgaatgtgcataccttcctcgggctctgcggatgacgataattgaatttgaggttctgttgaacatccggaagggacattaattaaatcacattcacctgtttcacttcgatctcgatcctcaatattcggttgcacaactataagagaaaatgagggatctatatcagctaattggatctc

SEQ ID NO: 16904 - DNA, 3078 bp, Arabidopsis thaliana landsberg
  unsure (1)..(3078): unsure at all n locations
tgtcactcggcccaagtaaccgtcactcattccagctgagcttgagcttcagacgagctgacccgcatgatttcccctttgtctaagcttatggccagctccttcccacttgtccgagtctccaccttataaaaacaatatgactttgaaggctaaaaacacttattctttacttttctataacacttgtacgatcaaatcatcgtttcttatcaataatatcaagaacaccatctgtggttactgaacgattctattgttcgttgagattctcgcgaagactattactttgtaagaaccctaagaaacaatttccattgtgtagatttcgattctcacaatttgtcgctagaaggagggtgaatttgagattctcttactccaagaccaaagaaccatcaaaccaagcagcaatgaccaacaatcaggtccccgctaacacagtggacatggagggaaacccgattcctccagtccagacaaacactcctgaggttgcgactcccgcagtcctagcagaaatgaaaagcatgatggcacaacttcagaagaaggtggactatcatgaacaagcgaaccggtctttggcccagcagctcgaggcggctacctcccaagggcagatcatgaccacccgctctaacgcgcgacattttcatgatcggcaagtagcggcagacctcaatccaacgaggctcgtgatcaatacgcctgataacacgacgaggcaattccgatgaactgtgccagcgctcaatggaatccgagcaaaaccaacagctttgggagagccgaacgcgacaaaccaagtgaaggaaaccgatccgcagtttcctattccttgagccgaggctgccaagggctgaggaatatgataggaacaagaaataaacgccatcaaactctccctaaccaaggaaaaaaccgagatgaagcttgttcgatcgcagctgcatagcgcagtctcctctgcaccaaacatcgatcgcattctagaagaatcccacaacacaccgttcacacacaagatctccaacgcgataatctcagatccaggaaaactaagaatcgagtacttcaatcgtcttccgacccgaaaggacatttaaagtcgttcatcatctctgtggcccgagtcaaattcagaccagaagaaagagatgctggtctctgtcacctgttcgtcgagcacttgaaagggccaaccctggattggttctcgagactcgaaggaaattctgtggacagttttcaggagctatcgacgctcttcctgaagcaatattcggtgctaatcgatcccggcacatcagacgccgatctatggtcactatctcggcagcctaatgagccacttcgnnnnnnnnnnnnnnnnnnnngatccaccctagccaaagtagaaggaatcaacgacgtggcgactctctcggctctgaaaaaagcgctgtggtacaagtccgaatttcgaaaggagttaaacttgtccaaaccacaaacaatccagatgccttgcaccgagcctcggattacatttcccatgaggtagaaatggaactactatcaaaaagtcacgagccgcctaagcaaacgcctcgcagcgataaatcccaactcagcgctcgaactacaaaaagggcgctcaaggcatgacattcgttcaccatgaaggacgaaatttctccggagcccacaattgccaagccgatacaccccgaggtcaaggacgaggccgcggtcgatggtgcggacgagaatcctacaccagaacgaaggatcaaaccgcaggaaacgagcagaaatattgtgagttgcataagagttacggccatcatacttccagatgtggtagcctcggagcaaagttggctgcaaaattcctagcaggagagatcggtggagctttaaccatcgaagacttggaagcggaaaagggtaaaaccgagcaggtcaatgctgtggccaatcccgagcaggcggcccccgcagcaaacttcgaaggacccaaaagaggtcgaggtaatcgcgaagcagacgacgatgagccagaagctgctcgggggaggatcttcacaattttaggagattcggctttctgtcaagacacggcggcatcaatcaaagcttatcaaaggaaagccgacgcgaatcataactggacgcggccatttaacagaccaaatgacgaagtaacttttcacgaaagcgataccaacggtttagaccgtccgcacagcgatcctttagtcattacgctgaccatcagtgatttccatgtcgaaggagtcctagtcgacacgggaagcatactggacatcatttttcttacgactctacaagaaatgaagatcggcatgatgcaaattgtaccaactccgcgccctaagctcggattctctggggaaaccactatgactctcgggaccatcaagttaccagtccgagccaaaggggtaacaaaaattgtcgatttctctgttaccgaccagccgaccgtttacaactcaattatcggcacaccatggttaaatcaattctgagctgtcgcttcaacatatcatctctgcctgaaatttcccacgagcaacggcgtgaaaaccatctgggaaattagaaaaatgctcgaatctgcttcatggcagcacacaagctaaggaacccgtcactgaatcaactgccgacgcgaatcataagaaagctaagcttggcggagctgaagagaaagtaatttccgagcagttatagcagctaaagatcgaggaggctcgggaatccacaagaccaatccccaattcagtaatctctatctgccttgatgacgaaaaactcgagcggtgcgtggaaatcggtggagacctacgagaagaattaccaactgaactcaccgctttcctcagagaaaacgtcaatacattcgcatgaccccataagatctgcccggagtaagtgtagatatcgtatcacacgagctctacatcgacccgacgttcaaacctattaagcagaagaggagaaaattggtcggaagagagcaaaccgtggcattgttggcaaagcgtcacctaagacaagcgaaagtca

SEQ ID NO: 16905 - DNA, 1102 bp, Arabidopsis thaliana landsberg
accgaccgagaacttccatccgagaaaattttaagaataagaaacttaatctctatttcttaacttccgatacaccgggaactcgagattgagccaccaacacatcaccgattcataactctctctcacaagtgacacatatgtcactgtacattcatcaaacaatgcatgatcctctctcgtaaactagtaaagattatatataaaaggtataaaccaacttaaccgggtcttcttctaaccaaaccaaactgagtctttgctcccacgtgcttataagaaaaccaatatgtcatccgcaaaagacaagtgtgtgagtctcaatgtttttacatctaagatgaattcgtatttgtttatcagcatctgtcttgtcaagcattaatgacaaaacattcatgcaaatgaaaaaatagatatggtgataaggaacagccttgcctcagtctcctcacactccaaataaaggaaacaagctaactcccgtttaacctgaacagaaaaatagtcggtaccaaccaatacacaagttacacaactcgatcaagtgaataaagctttcaagtagattcatggccttaagaatattaagctaaaaaggccattgaacctaataaaaagctttagagatatcgatcttaagagcgcaacaactagagatggactttgtgacaatccttcactaggaacaatttttttttatattatcaacaattgacatatatttgtttttattaaagtttaatttacttattttggaagtctcaaaatatttattaaacaatggcaaatatttgttagattaatttatctacctagcacataccatgcacgaatccatatataatattaaaaagaactatacattgattcattttcttctaaaggaaactttgattaactgtaagatcccctatattaacaagcaattatcaacaaacttaatttgttttaatcccaaaagaacaaatattctcctagttaaagcatgatatcttttgaagtgaatgtaaattaagaattattttcgtaacaaatttcatatttatgcaaaataaattaaaatcagtttctttctctcttctctttctcggtttccaca

SEQ ID NO: 16906 - DNA, 799 bp, Arabidopsis thaliana landsberg
agtgaaacagttacaacataactcaaactcataaactgaaacagaaagtgccaaagtcatacacttaaacataaaacatagactaaaacagacataaacataaaaacacacttaaaacagacactaacataaaaacagagttaaaacagacacttagacaaccataatctagaaacagacactaaacctacaactgaaactcaagccaacaactcattgattaacttgttcttaagttcaatctctatgtcagatagaggttctgttttccctaacagacgctcaagcaacttagtcctatttttcttgtctttaataatgattagcttctctttggcagcgtgatctttctcttttatctcccatatactttgtatctccttcaaagcattggtttcttcaccttctaccggacttagcttggctttgcctttggctttggctgcggcttttgccgccttaacaccaatgggacgagcttccttgtcttcaacgctaacaggttcagagtcagcttcacattttcttctctttgctttcccatgagtagactgagcaatccacttttgatcatatctaagctccctccaagcatgctcacaagtaaacttgcagccataatcttttgaaaagatctgatgtgccaaagacaccacatcatcatcattttgaccacttgtttgttgtttgctagcagccaagtagctgcctacaaacttgttcacagcgtcattcacttttgaccaccttcgtttacagaatatgcggcctctctttgccacacctttgagcttgggac

SEQ ID NO: 16907 - DNA, 423 bp, Arabidopsis thaliana landsberg
tttatgtgatgactgttttgtaagctttttgagtgatgattgtttgatgggcttattaggcgactgttttatgggcttttagttaattgcaccctttgggcttatgtactctgatttttttgtttggttttttagttgtatttgtaatttctgttcgagcactaaaaaaggggaacattgtcccaattgttctttcgccattagtaccaaactaaactggagatcaatatatagtattagtatgattgattgtctattggggtttcgtaatcatcgcgaaactgcagtataaaattcgaaagtttggtttaggcgtatgaaactttattgcaactctaatgaagtccgctcacgaactcttgccactttacggcagctccgacaaccgtcaccggcgacatttctcgacacacgacgtgttga

SEQ ID NO: 16908 - DNA, 1517 bp, Arabidopsis thaliana landsberg
attggtatttagagagaaagagaagaagaagaaatgtagaaaaagaaacatgaaaatatatgaaaaaatgagtaagtgttaaatattacgtattaaaaacttaaaacaataaacaattactcaaaacaaagttgaagaactaaacatgggggtcctattagatatttcaagcaaactaattcaattactactaacataagcttgtaaacaaaaaattattaaatttatggggtcagttgaccccttcctatccatgtacctccaccactgtccaccgccatatacacggccactagcccaaccaccgtacaagtttcagcagaaggagtcagtggcgaagatttttccacctacgccaactcctcctaagaactttacgatgggagatttgcaactaggatgcatgagcatgataatgtaaactaacttgtgttgcacggattttttttttttttttttttcattctttaatgtcatatagtacttatagatttggattgacaagcacatctatctatttaggaggcactcttccaactccatttagctaaacccgaataatggccaaaccggaacaatcttaatctaaaagatcttttgaagttgagatatctcggattctgaatcgaactaaaatttagatttgtactttgatcctaattgtctaattgacattcctagaaaaacacaatttattttttattctttattattccatctctttactaataagtgtagttcaatcaaaaatatgttgttttattttatttgttgtttacaatttttaatgtaaaatttattattatttttaactcttgaaattctattgtttgattttcattgctgaattatttttaaagaaataactatatatattttcaaataaaatgtcctttcacttttccttgtctttcccgttgtctcttttcaagcagctctcaagtctatgtagttttttggtcggggattaacattaagtggctcctataacaccaacgttgatcttctttcagttttatgtttatttctttgattgatccgcgcagttgcagtttgttttttggacggttccgacagtttgatagcgaacacaaccattgaatctcttcggatctttgatgatgatgcaaagaaagctctctcctccgtttctctcgcatgcgattctgattttggttgtcttgtttcttagctttttgaagatggcttggattcggtttcacagagatttttggtgctaggttttaagaataaaaatattgttcatgttcatcttctcgtttattgtcggagttccaatggcccttaattggatcgatccgccattcacaaggtaagtgttttggtgtctccgatgggcggctcgtttgaagtctcctccaccaaatttctcgacatgatctgttcgagatctatgtttgttttattttcttccttacggattcaagtagaattagttttgacgcactagcacatggtatagtaagttcgtttctacaccacatcaacaatttttg

SEQ ID NO: 16909 - DNA, 2281 bp, Arabidopsis thaliana landsberg
tctcttgcggatgttacataaacaaagacatcctcatcatcacaaacattcatttcttcttctactccgaacaaccgtggattgtacctcatatgcaattttaccttatttgcatctaatccaagcttcgtcataatcctatcttctaacaatgagagagtaatcttctcccctaatgtcttcatcatcacattatacatgcgaccttgaaatttaaaatatatgatcacgttctctttcattgtaacctgccaaaacaatacacatactcagtcaatattactagtattaccgattctaatacattttcagtaatactagtactaattctgaaatattacatgtgtgagtaatactattacatatatgaaatactacgtgtctaagtaatattggtgctattaaaacatactatctatataaattgcggtactattatagctagttcgaccaatattattttcgcgacaagaacaaatattcgatttgagttcaatttagtatgaatcagcatgtgaaatcaattgcttacccattaacagaccaaatgaagcctaaatctatacttaaacttctaatgtaggtgctaaaacacaataacccaaatctaattggattgaatctcaaaatcctcaaaatatgtaattcaaagcttttgaagctctctccatacctggacttagtagattgatgcagcttgcaggaggaaaaaacgacaatgcggctcgccggagctcgccggaggaagaagcccgaagaagaaaacgagctcgtgctcgaggttcgtttttttttttgttttcagtttttgttttttttttcaaaatgttttcagaatattaattattcattcaaaataaaatataggggtaaattcgtcttaacacaattcattaactcaaaggggatatgaagactttaaagtggttttgcagattatttgttccacaaaagggacacaagagatgatcactctccaaaatcgctaatcttcaaaaataaaaaataattagtttccttctgaaataacttcggttatactttggttaaccgaaccgaatcgaaaattgtgaagaaccgaaattactcatgagagatgagttaggttttgtgaaatggtctggaaccaaaccaagtcacactctctcagtctcacctagtctagaaagaaaccgaagtagcaacactcacgtgggcgaagtttttgtgtggacaaacaacaatattggatatgcagacgtttgcttcggaagtgtttgtttcatgcttgcccatttttgccttcaaaagatgacaattaacacaaccaaaaataaacaatatgacaatggaagtagttgaacaaagatgccgatacatacgcccccattttattttgtcatttttagataaccatcttctttttgttatctataacacaattatcaattagttaggacttatgagtcataattagtactttttcatcaaaatttagtcttatctttcccaaaaaaatctaaatttagtcttaattattaagggcatcttcaaccctactatattttagagtaaaaattctaaattattctccaaccctactctatattaaactctaaaatagagatttatctataattgctctctatatatagagtaactctattctttattttattttagagttgaatttttttatttatactctgatccacaaatttaaactttttatttaatacttattatcatttcacgaacaacaattacaacatatagttttataaaaattaacaagcaaagaaatactaaaattaaaataaacaacataagaaaactaaaacataaaactagtaatttaatattctggtaaattggttgtagatccgccaagataattaaaatattgtccaaatgaagtagatggaggaagagtttcttgatcttgatattgttgttggacacatcatttttgtaaaatctgtgcttgttcagtctcaaaatatgttcgaacatttgggttttgaaagaaatttaaatcacaaaataattttttttttcttcttttatttgatcatatgtggggaaaatactctaatggtgttgtttaaaataaaatttgtaatgtttattattgttatatgatgtaatgtttttttatatataattagtgtttaatttaaataatatcatattgtatgagaattttgcacaactataatatatatgatcaaattgtaaattatataattaaaaagtactagtgtataaaatttcaatataatattggttagaatattttttt

SEQ ID NO: 16910 - DNA, 1237 bp, Arabidopsis thaliana landsberg
tagattcatgagatgatgaatgaaaatgttctaggttcatgagatgatgaatgaaaatgtcttagattcaagatgggtatcctatgttcatgaaataatagtactactaaatgtttagtgcgttcaaaatatcaggtaggcttgtatcatcaagaaggccacatatgccacaagttttggctcagaagttatacatttatagtgacatactgtgagctaagcagctaaaggacaaaatggctaaagagaagtcactaaagacaaaaagagaagaggggaagagacatgtaccaatactcaagactaggctcagatgacttatcctcctcagcgagaataaagtatgcaaaatcttcataactcatcttcccctcaactttgcttgtaaatttcctaggaacctgagtgagccacagccgtaatttcaattaagaaagaaggaaacacactccataagataacaattaagtttcgagaaaagtgttcattaacattttgacaactggagccaacctgtgaaaatattctgtcgacaatcctgtaggtaagggcatgattaccatatttgatgagattttccttatcaataaggaaatcatggtcgccatcgagttcccaaaatctgcagtatatcacgtagaaatgctcataggagaagtacctgaaaagtaaagaaaaggtcatattgaatggtcaaatcatgcatgatgtcttgccacagtatcacaatatgaactaccaatacacttcttcctctttatgagttttatgggtagtgcttatgtctaagaaacaattcgaagacctatgcactacccatattactcacaatgctacacaccttactaatgctgagcttgaattcttaaacaacttaaagtggtctttattatacaaataaaactaaaatcttaatctttttaacgtattgtttaagaaataatgaaaaagaaaacaaagtcacctaataactttattgatgtcgtcttcttcatcaacttgttgcatggcagtaataagattcccacgcttcagctctctaagagtaatgcaaccagtacctgatctgtttatgtagtaaaatattctgtagatgacggtctcagctgggttgacggaatagaacacagagatgaatgaaacaagcacgggaaaaaattatgaattagtcaatagatgtataaaacagtaagcacctgaaaatatactattatttaagaagcatctcataattttc

SEQ ID NO: 16911 - DNA, 924 bp, Arabidopsis thaliana landsberg
tcttgctcgcgaatagaatttacgaatggcttgctaagttcaatagagtcacaaattcaggctaagtttacagtagttgtatttgaaaaatcttacctttttcacagcctcatggtctattggcggtaaagaagactttgtgatgggcaagtccttaacagaagatagaaagtactcttcccacggagccaacaatagtacaccttctccttccttacctttccgcccagttctgccaagtctatgtatatattgttccctgtctgatggcaatcccatctgcaaaagcaacatacacacaacaacaacttcggtaaaaaaaaacaatcaactttgtagatactgttcaattccatgattgaaaactactacatgatttacctgtacgactaaggacacatcagggtaatcaacaccacgagcagatacatcagatgtcacaaggataatactcttggacttgcggaactcatcagaaactctggttctgtaactctgcggttttctagaatggatctctctgacgttaaggcttagctgactaagcagatcagccaccaatcttgtaaccatagcagttgtacagaaaataataacctacatcagcaacgaaatagggatagttcagaaatacagacattggttattcataatggcactagagagataatgttaccttatagtccacattatctgcgatgtgttctttaagaagcacatgtagaagcgaaaaatgtctatccagtgatgcaatcatgtacatttgtgtgacctggagataaaacaaacataagaaactgataacatccaatcatatggcaggccattcactcaaattaagcgtaagagaaatcttttaccttttgatgtgtcttcccagagccctctttggcacaagtgatgaactcatgatcctcgtttcag

SEQ ID NO: 16912 - DNA, 354 bp, Arabidopsis thaliana landsberg
gtgtgtgataccaatgtctgactctgacctttgtggaaccggtcaaggaagaaaggaatgtctttgcctagataaaggctctattagatgtgtgcggcgacatatcattgaagccagagagagtttggttgaaactattggatatgaaaggtttatggagctagggttatgtgagaatgggggaggaagttgcgagtttatggacagaggaagaaaagatctctttcacaaggttgtatactccaatcctttctcagcaggatcgttgaacttctagggaaacaggccaatttaaaagcggcaaacgttcttaagaccatgaagagttgtagctatacttaatgtcttatcttt

SEQ ID NO: 16913 - DNA, 1654 bp, Arabidopsis thaliana landsberg
  unsure (1)..(1654): unsure at all n locations
aacaacggttgtatcatcaccagaagcaccaagatcaccaatttaacgatgcaaaagaaaatctgggaaaattggcctcttgggccacaacctcaacacctagcaggaacagttgattcactgactctgaacaacaaaaacatgagactgtcctcgaaacgaacaaaaggtaaaagnnnnnnnnnnnnnnnnnnnnnnattttcacgagcaccagtccctggaggagcagcagcacctagaaggcgtggaagggctgcctgaacagtaggaatatacaaagagcgcgctctacctaaagaagattcgaaagcaccatgaactatcactttagtcttactagttacccaaaagacaaacaaagatattctctttgactccagacataaatacaacaataagagaaatatatcgtgaacacctcaggaccaagatttacctttttggctatgtgaactctggataatcgaatcaaggagaaagaacaagtccactttacggggaaaatgaggctcaatttccaactttcgaattagaagttccacaacctacaaaacacgataaaaatttccccatcaaacgctgtagatagttttgtcaaaacatttaaccaagttatacaaaggagaatttttagccggtaaaggtacattattttattgattctttatatgcagcctattcctaagtttatcatagaaaattctgcctggctagccttgaaagaaaccacagaaagaagaaaagtgttgagctgaggaaacacaatttaactcacctcattggcaatcccatacttggcacaatcaattgcaacgcgtgttgcacgtctaatactttccttagttctggataaagtctctatcattccctcaaaagtatctcgagaaatcgcagcctcagtggcaccactcagtgaacccccaactgacctatgccctgaactaaaccttctctcttcgttctcttcagtcccagcttggttacttgatgaggactggcggccatgatttgacggagtcaaaacttcttgatgttcctgagcaacaatcagcgtggcatcggcagcaggagatgaaacattctgaaccatgaaagggcttttactcgtctgcatcgaatcgatgttaagggaattatggtctagattcacaaacggtgaaaactgtgaatgtgcttgttttctttttgcctgggcagctgcaattagatccttcatacatgaagaagaagaatctgacatcccaaaactgaacaatggggcatttccattttcttgattgacatcaatcctatgataacaaaaaaagcacaaagactataacctccaagcaaaatacgaacatatcaatgacataggaaaagacaaaaaaagcatacacgtcagcagacaagttcacaaaagtgtcccttgacacttcaacatccagacgagttgcaactttcggagtgctagttggcttttctccaaaagctggtttgcttctctggtttgctgtctgagaatgagaagagcttactctatcagaaccagccactacgtccttggaagaatcaccatgatatttttttggtatgacagcaccagagacttttgcaattttattctgtactgccaccagctccttggttgaaaacatctgaggggacttctta

SEQ ID NO: 16914 - DNA, 2620 bp, Arabidopsis thaliana landsberg
  unsure (1)..(2620): unsure at all n locations
tattttcgttttttcgctctggcgtttatatattggggattggggattaaaagctgagataagctggaaaatagacactttttctataaataatttgtaaaatatatacctcttctagatatatgcgaaatagacatttctctctttcctttctaataatactttttgattaataaagattttactaaatgacttatataaccttttgttatttgttaggtagtaaaatagagacaaaactcaaatcaaattctactttttcttatttttctttttatttaaatatatttactttgtttgataataattcttcataaaaaattaccacataatcatattaacttttaaaatttttatgtgaatctaaaaagtctaattttactatattttaaaaatatgtagcactttttttatttaatcccagccgacggtgtatgtgatattgttaaaactggtgtacaaatgttagtgtacgacaataatgtaaaaattaatatataatactgatgtaagaagtgatagactgaatataacaatgtacaaaatagtgtaaagagatgatggaaaatatggtgtacatgatcgtacagctttaaagatctatgagactgtactaaaattggtgtacgagatgacgtacaccactaactgaaataatgatttatacattccatgtaagtgtacaccaagttttgtacactttgtttaccaatcttgtatgatatcatttaaaagttgtatacaccattctatccaatcgtcataatagtttcaatcattttgtacaccatcaagattaacttaattatgtacaccatcatgtaaaccattatattaagtaataatatttggtttatacaatcattatatttgtaaaatattaaaaataatattacttctatttatgaatatcggtatatacatacaccaatgaataatggttagtgtacaaaacgatctttgaaatgtttgtgtattaaattaatgacatataaatactctaaaagtcaacgtaattttttaagaaaattttttaagaaaactaaaataaaaattaaaaaaataaagacagataaaataaagtataaatggtctctcatattattgttattctctctcaagataaagggtattatagtatttgatatatattttgttttttagtctattagacatattctctatctcacanaaagtaagaaaagtgttatatctctaatttctaataaaactatctactntacacattatttttgaaaaagtgttactttgccaataaaccctatattttttcatgtggatagagtatttgataccacaatatcatgagacgctaattttctttgtctcaagaaaacttgaccattccaaaatatcataacattatacaatgatcatccttgcaacacttgatcaacttcactcaattaaccgaccattggatcaagactcaaagttaacgattagtaacaagatattccaagaatgaatccacataacgatcttgtctatccatatctccaaacactcctttcatctccttcacattctctctataaacctttccttcttcttccaccattaccaatcttagcgaattcgcaacactttctttagtaaagaaaccttctgtctcgtctcgagggatcatatacccaattttcttctcttcaatgactctcgcattcaatccttggtcatacacaaaaaccagcattgccatcggtttagcaaaccggttggtttcaattatcgttcccacccgggatgagtcagaaccaaaccgatcgagtcatggctcaatgtacgcaattgctcaacccaacctctccacaccatccctctatcctctgtacgctcttcgaatccttccggaagctcgaccggttcggtatcccacggaccacgacgagtctttaacacccaaaagaaaggtaaaccagaaagctctaaaccgagagcgatctcatttagctccgtttgactcggtttagcttctgaaccaaaagctacgtagacaatggacttacttttccgtgagtccaaccattttttaacagacagccacgtgtcggatcttcaaacttttcgtccggttttggagcaaaactccgaccgtataaccggtttccggtgaagttcttgtgtaagtcctaaccactccgcttcatactcgtaacagctccgtacgaagatgacgtcacagccgtcaattacgccgccgacacggtggatgtcgggaacatgtccttcggtggtttccgccataaatcctttgaaaatgaacctgcattcaaataacttgaaagctaccgaagtttcaaacggaacccacttaggcggcttcataaaatccgccggcgaagtacggtactcttcgaaccccggcggtttaagaataccgagcgtcgcgccgttgaaagcgctaaagaatccggttttgattccgagacgacgagagattggaggaagccaaaaccccgcgaaatcttgaagaacccaatcgggtttcgaagattcaagaaactccgtcaccggaacttttaacccgtcgtaagcgatttttaagtaaggtatgagttcgaaagggacgtctgtggtagcttcaccgtcttccggg

SEQ ID NO: 16915 - DNA, 363 bp, Arabidopsis thaliana landsberg
caggtgggaggatcgcttgagcccagggttcaagaccagcctgggcaacgtagtgagaacttgtctctagaaataatacaaacattagtcaggtgtggcatcacacctgtggtcccagttactcaggaagctgagatgggaggatcacttgaatctgggagttcaaagctgcagtgagccttgattgcaccactgcactccttcctgagcaacaaagtgagacctcatctcaaaaaaaaaaaatgagaaaacttttttatgtacttatatgcaaaattctctacaatacagtatgtggatgtaagagctatgcacccctttcctcaatctttgtggcccggtggataccctcaatatatttta

SEQ ID NO: 16916 - DNA, 605 bp, Arabidopsis thaliana landsberg
caacttttattatccaatgggagtttttcagtcataagctaagcacaactatttattttttaggggtcgatttgtgtactgaccatattgataaaagaagtcttgccagcaccattgggacctaacatgccaaagcattctcctgaaggcacagcgagggataacactcgaactgcctttttaggcgggttcccatccctaccaggataaaccttccttagcttatcacatacaatcgcatggcttgtgcttgactctagcatcagttgtgcaactttttcactctgattagaacaaaatatgtataaatataattcaaaacagctgaagaaaaaaagaaaaaaaaaagaacatggaataggatgtgataattcttttgcaatacctcgtgaatgacatctagtttctccatttctacagaaattgcagagacctgtttttgcaagctatgagatatcttgaaagggttttggtttttcaagaaaaacaaaaggtcttttcctgatgaagacatcttatcgatatagtatgttgcaatgagtgcaacaaaccactcaacaataatgatgtagaaaacttcatcaatggctttatcactaaaatat

SEQ ID NO: 16917 - DNA, 1808 bp, Arabidopsis thaliana landsberg
  unsure (1)..(1808): unsure at all n locations
agttaatcaatgatagtaaagatcaatccttttcattgctaacacaaaagagcgacatttacgagacattcaaagaaaagcatgtcaatttccagagatcatcaaaaacccatgtcagagaaaccacattgagaaccctaatttggccaattacgaaccttctcaacagggagaaaataacaagctaagacaattgcagctacaaggataaggagaacagaaatccggagagcagatccccacgtgaacgccataaaaggcgaactctacgatgctaaatggtctccggtgactattnnnnnnnnnnnnnnnnnnnnnnnnnnnnnnnnnnnngcttattgagaaacacaacaaatcgaaacaattccgacaaaaaccgtaacgagatctttaaggatgcagaaaatctgatgctggtgcttgtcttggagatgatgtaatccgaaaccgaaaaagacaaaaactttgtttttttggatttggggggtttcgtgaaggtgtggattcaattgtcgttgatttggtttggagactccatgtttagcgtaagcattagaactgtgactggtttcattaaaccgcgtggcgcgtaccgacttccttgccgtccttcatcgatttcaatattatctaattccttttgttttaaattaaattggtgatgagattttattatttagaaccatacataatttttttattcgatttacgaaaaataagaagaaaacgaacaattaataatcacatttgtatcagccttgtatttattaactatgttttttatacgtatgtggatatgtataaaataatgacattataaaaagaacaaaataagtttgaccaaaaaaataataataaaaaacaatgacataagtatatgacatgaatatttcatgatccaaatatttaattagtcaaagtactgattcttcattatataatcttttttatttgaatgaccaagttttgaaaagagaaaacaatgcgtaatcggatgattagtcattgagaatgaaagaaagatgacgatttatttgtcttcagcttgtgactaaataccgaattttaaggctaacataatcaagaaaagtctacacgagacaaataaaagaatcttcctaaagtcctaaccaaacttaaatttaaaacagctctctcttgcctctactctaacgtagacaaactgcatttaacaagacatgaacaagcatgagatcaacaaagtactgatgcccaatctcgccgtctatccaccgcatcttcgccggaggtcttccatagtgaaccccatcgttacaccggttatcaaaatgccacgggtacgtcatgtcaaagttatcaatcacacttgagaccaatcctaaccccttcattttctctaaaaacaccccattgtacacttccatcttgctcgggttaaacgcaagcttcctcgcgtaaccgcccgtcgcgatcgtgttcctgaaaatcacttccggaggtcgaaatccgcgggctttcaccgagtcgaaaacgttcctccagaacgcagccgcagtttctgctcctttcgtaaatgctctaaggttagaccagtgaataccgtcgtgtagacccgnnnnnnnnnnnnnnnnnnnnnnnncaccggtctcttcgacgaaatagcttttaagcaattctctaaagctatcatcttcaagtgaatcaagacctagatagttttgagtctcgttccaatgtccaattgagatactcgtgatcctaactgtttccgatgagttcttcggattcgagaacttcaaatcaaaccttctaggaacagcaccaat

SEQ ID NO: 16918 - DNA, 1557 bp, Arabidopsis thaliana landsberg
  unsure (1)..(1557): unsure at all n locations
tgcttctcatggaggagactctcgacgcgtaaaagaatgaaacagtgaaatttggtttgttaagggaaacaaaaaaaaagtcgaatttgggcgttgacaagagannnnnnnnnnnnnnnnnnnnnnnnntttaatggcatagattggatcatatgatctttatggctaattattttccagttcatatatattaattacaaaaataaagtactctttaattaaagtttaacaaaataaagtactctttaatgaacgaactataagaaaataattagccatgtgaaataaataaagaactactaaagtaacactaattttgttgggttagaccatctccaatttgtagctctatatcttactataaaatagggtaattctaatgtatttttctattttctactataaaaaaaaatattcttaacaatattatatttatattttatatactagtactttttaattatataatttacaatttgatcatatatattatagttttgcaaaattctcatacaatatgatattatttaaattaaacactaattatatataaaaaaacattacatcatataacaataataaacattacaaattttattttaaacaacaccattagagtattttccccacatatgatcaaataaaagaagaaaaaaaaaattattttgtgatttaaatttctttcaaaacccaaatgttcgaacatattttgagactgaacaagcattgattttacaaaaatgatgtgttcaacaacaagatcatatcaagaaactcctcctccatctacttcatttaaacaatattttaactatcttggcggatctacaagctgtttaccaaaatattaaattactaatttattttatagttttcttatccctttcaaatttaatactttgtttgcttgttaattttataaaactacttttccattttcgtaataataatatatgttttcggttaatccgatgaacgttacattacatacttctagttttctatatatcatacacattcatcgtagtacccatactattagatcaatagaataaatacgtcgattcttattcgccatacgttacataccatgcaaaataatctcatttaatattgagaaagtgtcttttgtggaaaacaaaaaaccaactttcaaacaattgtattttgtgttgcagttgttgttcctaaaataataatatgtattaaattaaaaattaaatttaagggactaaagtagaaataaaaaagtgaaattctaaagtgtaaaaaagttagatttactcctctatattttaaagtccagtatagagtagagttaaaaatgtttttagagtttttacaaatagagtaaggttagagatgtcctcactaaagtcactaggtgtggcttttgactatgcaacaatatggcgattggccatagtggttccccttgataagttcaatattaaagatttgaatcatangaaaaagagaattggatatagctcattcatattctaaatgctattatctgagtacactaatcgtcgagcaacgtattaagaactagaa

SEQ ID NO: 16919 - DNA, 709 bp, Arabidopsis thaliana landsberg
  unsure (1)..(709): unsure at all n locations
ccataatcctataatgctcaaaatcaatacacatgcacaacacagtaaccgtaagcaaagcacaagatcatcgataaagcaacagaggtacatcttagcgtgcacacaacaaaacaaactattaaacaaagtgagacgattaagaaaggcgttagacgtagaccttacgctctatgacaaggagctacagatgatgactcggatctcgttgatcttgatcagacgcaagatgaagttcaagatgatgatgacgaagatgacctggatcgaattctgggactagctggagacaatagcgatagtggggatgatgaccttagcagcgacggccatgaaagtattgctctgaagctgtcccaattaataaaaaaattagggttaaaatgtgtattgctcggaatggtagagcgcgtgtgagacactttctatcggagagagtattgctcggaagctgtcccaattaataaaaaaacgaatttgccagcaaaggacggaccaaaattaaataaaaatcccaaaaaaaacaaattaataataaataaataaaaaaaagagaaaatcggagtctggaaaaaaagagtaaatgggaagcgacgactgactcttcttcctcctcctcctccacctcttggttaggttcttagcactgaaatttgatcagaagtaagcttgtgggttatgatcttattactttgngggtattgatttt

SEQ ID NO: 16920 - DNA, 1350 bp, Arabidopsis thaliana landsberg
gcagtttcatcaagggttcatgctgtctgattataggcttcgttcaatgaggttcaatatctctggaaccttcaaggaaaatggtgaagaattcgttaacctatcaataaaggagattggtaattttcttaataaagttgagatatctcatatgtattactgcgacggtatattgttatgtgtcaccacggatactaggctcgtgatttggaacctgtatttggggcaaatcaggtggatccaactcaaaacagaaactatgtattccacgttttgtctcagatatgacaacaacaaaaaccacaagatattgaggtttctcgataataaacagggctcctacaaaatttacgatttgaagtcttattcatggagggcttttgatgtcattcccaagtgggatatagatgatgatgggcagagtgcatcggtaaagggaaatacttactttaggacaatagatgaaaccccaaatttactaatatgttttgattttacggcagagagatttggaaagcttcttgatccaccttttcagcatggttggatgagtctatcttgggttagagaagagaaactagtagaattatatcaacacttggatacatctatgatagagatttggattactgctaagatagagcctaatgcactatcgtggacctccttcttaaaatgttatattgagcaatgttagagtaaaattcttttagaggtaacggagaaagtgtttaagtgttttgagagagttttttaggaaatagaacttttattactttgctttaaacttgaagacaacttcacaacattgcaacatttgagagggggaggaggtatttatagcctccaaactacaaaatatctaaaatattttaatcctaagtctagagagttcttacataagatctagattacattattcaaattatctagattattctattagagtatctagatttttatgtttaaggaggtggaagatgattctagaaaatttctagaatcttttaaggaggtggaaatgatgatatttctagaaaaaactctagaacttggatttggccataattaattattagataattgatccaataattaaacttgattcaaaatcaagtttaactttcaacaagcaactcattgctcttgatttttggtttgatatagattacaacaatttcttcattgacgaagagaagaaactcgccgtggtttttgatttagccgaatctaaacgctgcaaaacagctaatgcttacatcattggaggtgatggatacttaataaacactgaatcttggaaataataaagcagatagttataccgaacttatggtatttagctgttat

SEQ ID NO: 16921 - DNA, 686 bp, Arabidopsis thaliana landsberg
agatgaacatgggaattctctcaattcagattttcgcgctagaaaatatcgaagagggcaccaaaggtaaccagaataaatcctctgtatcatttagtttcagttcattgctgaacacttttttgcttctttctttttcttaggcactaatgatgcggcgaaatcaccagaggcggcacaattgaagttggagaagaagtttgggcagtctcctgtatttgttgcatctgcgcgtatggagaatggtgggatggctagaaacgcaagcccggcttgtctgcttaaagaagccatccaagtcattagttgcggatatgaagataaaactgaatggggaaaagaggtaagcagccggttttaaacactttgttgtgtttatctttcattttgcgatatggtttttgattttgatgatgaccttgtgaaaaaaaatctcagattgggtggatctatggttctgttaccgaagatattcttacgggttttaagatgcattctcatggttggagatctgtttattgtacaccaaagttagcggctttcaaaggatcagctccaatcaatctttcggatcgtctccatcaagttcctccatgggcgcttgggtcggttgagattttcttgagtaggcattgtcctatttggtatggttatggaggtggtttgaaatggcttgagcgggtgtc

SEQ ID NO: 16922 - DNA, 1119 bp, Arabidopsis thaliana landsberg
  unsure (1)..(1119): unsure at all n locations
tggtctagttatgtaaataatttgtaactttttaatgtattgatatatatatatatatatatatatatatggatgtatacaatatctttatataaataacagcctgtttttatataataaactccaacaataccccacattttcttattcaaactcaataataccctacatttgaatagaaaataagctccacaatatctgagaaaatagaatcaatatgcatcggtaaaagtgttttttagacttgaatctttcctagtaaacatttatcggacttactttgtgggtagtgaattcttgtcttgaactaaccacgtttgatagtaaaccgagacaataagtgaaacacataaactattagctcatttcatgtttatacggttgtgttcattttggtcctgaacatatcccgacttcgtgagagctctagagaatttagccatttcaattctcataggtgcgaccgcgacaccactcnnatataggtaccattaattaagaatagtccattctattccacttttttttaaagaaaaatattcatacctttaaacatcaatgaaaatacatttaacttcataggaataagtaatatgtatctctttcttgagtcttcctcagccagttggaaatgtatctttgacttgagtcgtgtaatatatatctatttcaattcttgagtctcggtgggttctaccgaggcaaagcctttgaggatgtatcttccacttgagtcgtgtaaagtccatccaattgccactttgcttttagggctagtccacgaggcatctgtataacagcagtgagagggggtttgacgaagcacttcctgaaaagaggtagggttattcattttggttaggtccttcgggttagcctgcgagggacaagaaggatttgcctccttccacattcgtaaatcaataagagcaatctattgttattgaaaaataaatcattcttggctttccatatgcgccatccaataaaaggaaagacttggctcttgtcttttagggcaaataatgcctgaatatacaagagttgacacgagcttgggtctcatcctccaaatgtaaaagatatcttctggatggatcatcggctgcaacttctact

SEQ ID NO: 16923 - DNA, 1354 bp, Arabidopsis thaliana landsberg
gtcacactatccttaccttattttttctctgaacagttttagtttttttagagatagtccgtttatctgagataaacattcatttgtatagagtatctgtgactgtacttaacccataattatgtgtttaggtatccgttgttgctccaaacacaccggccatgtatgagatgcactttgccgttcccatggctggagctgtacttaaccctatcaacactcgtctagacgcaacatccattgccgcaatcctccgccacgccaagcccaagattttattcatagaccgcagttttgagccattggctcgacgaaatcctccagttattatcatctgaagactcaaacctaaacttgccggtcatatttatccacgagattgatttccctaaaagggtttcgtccgaggagtcagactacgagtgtctcatccagaggggagagcctacgccctcgttgttggcacgcatgttctgtattcaagacgagcatgatccaatctctttaaactacacatcgggtaccacagccgacccaaaaggtgttgtgattagccaccgaggagcatatttaagcacattaagcgcgattattggttgggaaatggggacatgccctgtctacctttggactctgcctatgtttcattgcaatggatggacgtttacatggggaactgcggcccgtgggggtactagtgtgtgtatgaggcatgtgactgccccggagatctataaaaacatagaaatgcataacgtgacgcatatgtgttgtgttcctacggtttttaacattcttctgaaaggaaattcacttgacctgtcacataggtctgggccggtccatgttcttaccggaggttcaccgcctcccgctgctcttgtcaagaaagttcagcggttggggtttcaagtgatgcatgcctatggtttgaccgaggccactggtccggttctgttttgtgagtggcaagatgagtggaacaggtaatcatcatttgtactatttattcttatgtatacagtattaggtttcacttatcattatcatttaccaaaatttaaaagttctttaatttattgatattattaagattaatatgtcactcttattactcaattgaaacagattacctgagaatcaacagatggagttaaaagcaaggcaagggctaagcatcttaggcctaactgaagttgacgtgagaaacaaggaaactcaagagagtgttccgcgagatgggaagacgatgggagaaatcgttatgaaaggaagcagcataatgaaaggctatctgaagaatcccaaagctacatatgaagcatttagacacgcgatggctcagcgcgggaga

SEQ ID NO: 16924 - DNA, 4550 bp, Arabidopsis thaliana landsberg
agattcagtctcacctattctttactaaatctccattttattagaacacatttcacatttcctaaactgtcttatcactttcaaatactggaatacacaacttcttttatgacccataattgtctccaccaacatgactgataccccctatataaatctctaacatgacaagatatttacaaaaagaaaaacatggaaaaccttgacctcaacattgctctcgacatcgcagcacgtggtggtcgtgattcagttgctgatcttgctagcatgctatcatcctctacgtattatcgcttcctctctgcccactctgatgtgctgaaaactgtttctctgcaaccttttatcgaaaatgctgcccgttggaatcttctctccaccgctcggcctatctttgcccgatgcctcgaagattcttatccttcaggtgtgtaccttgagagcctccgtctggctgcaagcaagggtcgagcagaggaaggatttcacatgttacgctttttgcaagcagcacagccaaccagcttcccacatgcagccatgttcacgttgtctctatttgagaatgttttaggtatttatgatgatggcatatcatcttcccacggttttgttgacttcgttggatctgatgctgcagctgatactgtagcaacctctgtttattgccatttactctaaattagccctcttaagaggcgcgggagtagtgacacctggaggtttggtgatatccctccatgtattgctgacgcatgcgctatcgacaatcgttgtaagacttgttttctttactagtatcagtcatgtaccttatcctttgctagaatcgtaatgtatctattgttctcttttttcattttaatgtatttgtaaagccttaatctttatttccctgtctcactagttgcttatgacttttatctttcaatgtttaatatctgtacttgtttcattttgtcttccacgcggctgcaacttctgtcagtccatgtcccacaatttaagtcaagctcctgacagatgggctgctgtctttccctagcttccccctactacacgcctttaccgcaccctcacttacccatttactatgccacctacaccattcaatttgtgactaatctcgaagctattctaaaactgtgccatctacatcatttattgccccacgcttttgttcctcacgctaccttcctatttattcctctagctccctttaaactctatatactatgcttgtaaaccactattaattcctctagctccctttaaacaactatgacttacattccacaacccatcctcgccaatatcgtccgccgtgttggtagatttggttttcgttatctcggacctttcattgctgcaggtccattttggcaagccacagctctctcacccgaagtcttgtctgatgttgatattgatgagtatgttttcaacagtcgcctggctaatgaaggttcaccatttcgtcccttcctgcttcgatgtttgcaagaaggtcaccacactgctcagtatgttgaaggtctccgacgtttggttcaagagccccctacgcaacgtcgctagacatgcttagcactgcaggcccacattccatgtatgctcgatttctttcgcaatcttcctcctctgttgcgggtcttcggatcaaggtttcttggttcttgagacttttctcaataaggtttcaagttttgaggaagcacttgagattgcaaacctcgttgaagctcagattcgtgcgatgggtagccgtggcactcgacagtactagggactaatgcacttctgtcaagtcccttactgctgccttgaccactttgacgaaattgacgtctgtagccactgcttaggctttacctatgcatgcaactttgaaatgctctgttgagttcttgttattactctttccatgtacttttgtcttcgtatttgtggttttagtttcggatcatcagtgtaacatcgtttgatttcatccgtgtcaaatggtttcatttcatcgtgtaaaacggtttcatttcttcaatgtaacttccttttatcgcctcgctatgttaaatggtttcaactatgtcactctgattggtccacaatagttacacgcaagcttttccattcaaagacatacacatatgtaaggtacattacaactgacatatagatactgcacgcagcattgtttttgttggtatcagtttaccaacaaagtgttttagttaggaacataaaagaagaggttaagattacccaatcttcacatgaatcccacaaaaaaacagctcttacacattcacaaacgtgtcgtcattacttcgctaaagagctgttgccgaaagagaaaaatcaacttcataatgggttgatcagaagtaccaaaaaatgccttatgccaagggtcagacgctgcagcgtcgagagcccaacatcaactatgttgactctcgtagtccctatgcttcacttatgcggccattcttatgaaaaaaggatcggctgctatattcaactggtgcatcataccacaaaaaacttatgcacccaatacccgagcttgctttccatcccaaaaaaccttcaccctctcacgacgcctatatacagagacagtgtaaataaaaaagaatgattgtcccttatgtatttgcattcagaacatactccattaatcaggtccaaccaatgcttaccttatcctgtgacagaatcacaagtggctctgttatgcccaacttgcttacaagaattgagcacaatcttgcggcctgttttctgtcgcttcgcaccctgcatcacaaattttagttacacatgggcgctaccattaccaaacaagctcaaaggtccaaccaatgcttaccacaacgttttctccagcagacggatttcttcttgtccggcggcgtcctggtgcacgtttcacatccggcggtactaactgagtctcttctacagcggcaggaacttcttcatcagcatgatttgggaccgggtagatcgatgcttcataatgtttcgcaaagggttctgaactatactcattaccaacaagagttgggatatgaacattattgattcttgcagcaacaagtgcatggcagcaagaaattagtagcttctgaaactgcaaacatgtgcaagtttttttctctagatcaacatagtaggacaactcatccgacacaacaacttggtaggaccactgtgagacttgaatcacaaccaagccaactgagtcaacattgtgctccaatatcatcttgttggcatttggagttattggatctgtcatctttgctgctttgacacgacgtaaacaaaaccacctcatcaccttgcctcttattccgtcaaccattgtcacaagtggaagttcaaaaattttagcaagcgcatcattcaaagtctcagcaaatactgcagctcatcaagttattccttttggccagacagtatgcttgcgtccaatgttcttttggaatggcttccaattactgaaagcacttctcgctgcgagccctaatatcattataatgttctttaaactgaccaacattgaaagcctgtgccgctttgcgaactaggcagggataccatgtctagcccaccttacctttacatttctttccagatgaacagcacaagcaccatggaacgctttcggataaaactgaccaacaactgcgtaaatagacctatgtctgttagtaacaagaaccaaatcctctgcaactggcacaatttgactaagttgttggaagaaccaagtccaagccagctcgttctcagcatatacaattccaaatgcaataggatagacctggaaatttgcatcttgcatacttgcagccaaatggacacctttaaatcttgccttgatagcagttccatcaacaagaattactttccgcatgtgctttataacaacaatggaagcaccaagtgcaaagaataggtacttgaactgttgcacaccagatgacttctgagtatggtgaagcttatacacagttccacgattgccttgctcaagcaaatgcatgtagacagccaacatgtttgtacttgttctcttcactgcctctgctctttatcatagcagcctctcgcgcataccacgccttcatgtacgtcacagaccctttcagctaacacagtacaatgtctgggacgtccatggcatgtgggcctgccgctccattagagtatttgccccttaagacttgaacaatcaccttagctgtagcttgcttcccatattgtgcccttgatgtcacagagcatttatgagttaaagttgtagtttgaacttcaaaattctttgatccgttggcaacaatatggccatacacacgccttgtcaacacacacacatattttagtgctacttgtcagaccttgtttttgtaaaatggaacagcctacgaattgcataaatggcaagcgttgtttgcatatgctatttatcctttgtagataacatctttagaagtatgacacaacctccaccctacttcctgttgtggtttagttca

SEQ ID NO: 16925 - DNA, 1070 bp, Arabidopsis thaliana landsberg
atttcatctaagaagggaagggactaataagtaaccaattttaacactacttctttcttagtttttccttcattttcagatttacttatcaactaaaaggaacaacttcttgcgacttgcgagaaaaccattcaaaaagactgtcattgcgtcatcaatctcgaacttgtctattcctcacaacacacaatgagtcatctttttgtcaccttcgactatttaattatcagtttgatcaccagtgtcaaacttattgatctgagcgtatattattgagatctctatattattattaataaacaaagttctagttgtccactatctcaaattcttcaaaagagaagcattttataaagcaataaaacaaagcatggtgatggtagttatactttctattaatggactgttgattatgtttcatctgcctcttcacttaaagaaacaatggtagtcatacttcacatacgttatacagtatactctgagatgtgttaatactctgttttatcttaccttttacactttgagcaacaattgcagcaatgttgaccgttgactctcaacactgtttcagtttcatactcctctgcttcttctcactcctctgttactctctcttgttcaagaaactaaaggactcacatgttggccgtgatttgcttcagagccctccatctcttccgatcataggccatcttcatcatctcctctcttctctagcacacaaatctttgcagcaactctcatccaagtatggacctctcctacatctcagcatcttcaacttccctgtagtcctcgtctcctcggcctctgtggcttacgagatcttcaaggctcatgacttgaacatctcgtctcgcgacaatcctccaatcaatgagtccctcttggtcggttcttctgtgttcgtcggcgccccctatggagattattggaagttcatgaagaagctcttggttacaaagctgctgggaccacaggcactcgagcggtcaagaagcataagtgcagatgagctagagcggttttgcagaagcttgctcgatagggcgttgaagaaaaagagt

SEQ ID NO: 16926 - DNA, 1492 bp, Arabidopsis thaliana landsberg
aaatctctgatgcacgtaataaactacttctgcagggttgtgagagcggtcaaatgtcatttatggcctcaactgatcttctcactgctgtatgtgtgtaatatcacttcaatttatatagccgttatccggtttaggacaagcgggtttaatgtcgccacatgtacagggcttcacggcgatcacagacattgctggaggatacgtcgcttggacagagaatgagctgccggtagaagagtgaaaacaatcatagccatatcacctcctgtaattatcaataaattctgtagatgttctcaacgcaagtgattctgtatcaatcatcattattattctctaaaaaatagtttaactgtcaaatctatattgggtgaaaagctttaccgaacttcgaacaccacaaagtttacggaccaattaaggacggggatgcctacacacgtttagttttcgccgttttaaaattttaatacttaaactaatttttaaatgataatagtgaaattaacattattttagttaaaaattattaattactttcttaaaatttaagttttaaattggttttaaattattattctttaagtttaagtgttaaatttataaaatgatagaaaaacatatttatacatggacaagatcaaaccgaaaggaaccgaaactaatattatgaaaactaatatcaatctcaacacaagtgtttctgtatctgaatcgtttacgatcagttaatatgattacttgctttgattaacaaagaaatccgtagccgctcttaagaatggcttcaaaagaatggctttcactttattgagttgcaatccaaatcaatctctgcagtgataattgtatccaaaggagattgttttttaagaaaattatacatggacaaagagagtgaggctctagaaactgtacaacgaaaaaacgagaagtgagtagagctctatcaaaccgatcaaaccaaatttttcagcgcacccgagagagtcaacgatggcctttttttaggcctgaaaagtaaccaccatgtttatccttgtggcgctcatcatctccaacctggtggtttcaaaacatattaatgctaagaatcgtgttggttagagagagagatgcaatgataaatcaattacctcgcggattagttggttaagcatttctatgatttctgcaaaattgggtcttagagctgggtcttgccgccagcatttctcaagaagttcagtcagttttgggtgtgtttcctttggaatttttggtctaagtccctgtaaattaattacaagtcattgtgttgaaggccgttaatcaaagcacgagaaaaataactataaagtcctatagacatgataccttttggacaacgccaacagcagcttgcagtggagtcaagtaagaatatgggagctgttttcattcattatacagcagtaagaaaaaaagtgtgtaaacacatgagattactgagttagcactttcgactaaa

SEQ ID NO: 16927 - DNA, 598 bp, Arabidopsis thaliana landsberg
cggtgtgtctttgaagggaaatacttattattatgctccacaaatagttgtcagatagccatgcagtttcaaatcgtattgtttttttactctgttttgattttacatcagaaaggtttggaccgcgtcttcctcttccgtttcactctagtgatgaagagactgtgactctatatatcttgtatcagagaagagcagctcgctatgttatatcaaccctacgacttatgtttggacttggtcatggagataacgactaaaattgagtccaatgcagtatcatgcatggaccaagttcttcacaatggaaaggacatcgctctctgatttttcgagtaaatttcgtgttgagagcttctatatcgacgaggagaagaaagttgttgtggtttccaaatctcgtaagtatagaccgaacgaaaactgtggatacgaaacagtgaacatcattggacaaatctgctgtgaaaatcggaacagatcacatctcgaaacctaaaatgtttagatattatttcgatccacttgtgttctcttcttacgttccaagtttagtgcatatacgaagaatctatcaaccgggcaaagtaacgagaga

SEQ ID NO: 16928 - DNA, 563 bp, Arabidopsis thaliana landsberg
aagtcactgcatcaaattagttcattgatcttcacatggcaacttgaaacgacacagcggacagtcattattagtctcaaaccacgttaggacacactgatcgtcggattcatgtccgcaaggtaaagtcacaacttttgttccatcgttaaactcttccaaacaaattgtgcacctttcagtagaactagtggtcttcttgtatattttcctggctaaagaattgaccacgagcttgtttgcgggtctcaaattgatattagtggtctcctccaacgaggctcgaaccgcttcttcaatttgatcctcttcttcactcaaatcctcttcttcaatctcatactttttttcgatcggatcatcattaggaaaaataagcaaggacacaagcaaatcatcccccggagaatagtcaccctcttgcgggattagttactgcaacaacatagaaaattagctcaaatatcgcagtaccccattccatatcgtaatcgttaattagctctgaatcctccaagaaataatgtaatttttgtttggtgggaaacttgatgttttcttcg

SEQ ID NO: 16929 - DNA, 1478 bp, Arabidopsis thaliana landsberg
gattaattgaacatctttgcaggggtttcttttgctacattgaaatttcacagccactttattctttgacgttccccaaatgttctttagtgtcacgtttcggatctgaatgtgagaatctccctgcaaaaaaacatgatccaacatattaattttaaagtcgattaagattctaagaagatcgaaatttgtttcttgcatagtaagttaccatattactgcatggcgggtaaggacaatatttttgatcaatgctgataggattttcaacatctatcatctgtagattctcatacactaaattggtaattcggattgttgaagctgaagattcccatgtcttaattcgtataccgttggtcgtacaggtaaagaccgaatttctaaccattaaaccattaacattcttctcgtctttgttttttcctaagcttccaatactaatcccatgtcccggtccgcacttgacattatagatatcaaaatttgtgtttccagagagcattgcgatacaatcgtctccggtgctgatgtgagtgtttgagatttgcatgttacttgataaagctattttgatcccgtcagtgttgggactattgccgggagctattatgttgactctagtgatgctgaagtggtcaacggataagaaattgaagtgtccagctttactgttgagtgatgttatcccattcatgcttgagttttttacgaaatcgaaccccatattctgcaaatgtatcaaaacaccatgaaaatatgattaaatcaagtttatgtttcaagattctctttttaaaacttatatatatatatatatatatatatatatatatataaaggcataaaaattcagtttgatcccaaaaaaaaatagctataaaaagaaagttcaagaaagcgtacgtactatagcgagtttgggacaattattgtccttctggcaatcatttagtgaccatgacttttttccttggccgtcgagggtgccatccccgaagaccgtgagatagttgatgtagcggaagtttatccatatttcctttttaatgtcgtcgttgttcggaggagccaacaaagttccatcgatgacaaacgagatcttaccattgcatggtcctacaaacgttacaccaccaagatagaatgttcctagtggtatgtacattttgcttggtccattccatgtgcatgcatctttccatgcatttgtgaacgcctttatgacacgttaccatttgtaagacaaaaactcttagtaacttataagattcaaaacaaattgtcccacacacacaaataaataaatatgacttcgaataactaaatacataatatgtagttaaattgaactatttaattaatccaatattcttgtaagccatgataacgattatgcaagttaataaagctttagaagaaagaaaaaataaaaaattaatccaatatatttaggggatcctctagagtcgacctgc

SEQ ID NO: 16930 - DNA, 1936 bp, Arabidopsis thaliana landsberg
  unsure (1)..(1936): unsure at all n locations
tcgcgttgacatccttcgggagctagctgtggtcccagtccctacggggggtcaggacacacagctcgagcaaatccgcgagatgcaggccaagctnnnnnnnnnnnnnnnnnnnnnnnnnnngctccggcagaacatcagacaggagtgggcaggccgagcactagccggagaagcgcgtcatctggcccaggacgtccagcaccgcatcgccaacgatgccagggcaaggctgcccccggcttccagtggggttgtcacacccggttttgaaggtaaaccgaatgcaaaccatgtacgtgccaggatcagtaattcacgtacacagcgattacataaatgactcatcatagcacaatgcttcgaattacaataaagagtaagtaataatattacagactagagccatttacataatataaatcaaagtacacagaatcgaaacgtagccaacgtaaacaacccaccacaggcagctgactgggggaggtcgctagcctaatcctcgaactcatcgaagtcctggaactcctggagatccgcctcgacgccttcttctctttatttacctgagcatagattgcatcaaaggcaacctggtgttttgtggtaaagcaaggatgagtacacatcaacgtactcaacaaatgtcccgtttggctgaagtggactagctttatgtggggttaggctcaagcagttgcttttagttggtcaggtatttatcattagtagaagccagattttagcattaaccaacccgtaaaccatttcctcatcgaggaacaacatcatcatagtcgaaccaaaaccataacataatccttgtatctcgaaccatctgtatctctaatcaaagaggatcccaaggctgctcttaaccgtgagcacggctgatatatcagtttcactaccctctgcagaggttgcacactttacccatgagtcatgattccctttctacccggggagagctaatccccattgaccactacctaggtggtccagcagggcatcactacgtagcttttacaaagattccctagagatcatagctgcccgttaggtttctccagtttgataaacacagtacccctccccgcaggagagtgactaacaaagagcaaaacgaaagaacctcggcactcagcctcggcagagcaagcactgtgcctggaccccattgacggcacgacggcgaagcaactacacctctagttcctctaattaattagctaagggccccccatttcaccctcatggttgcactgttagcccgggtggtccctcaacgaacaggtccttacggagaggcactcaggaaaaaggcctgagcccctagagtatcacaatatcatcattgggataacatcatcgtatcataaataatcacattatgttcattgattaagttaaggcaattgcaaaatgctaaccatgataacccaaaaggtacacacaggataagggtgtaatacccaatttgtaatagataataaaagaggagaaaagttatttttcctatattttatgtgtgtgttgaatctacttatcatcacatgtgaacaccatattcaaaaacaaataattaataaaaggatataccattaaattgtgcatcatgctgaggttttatttggtgtgcattttgtgacaacataaaatgacaagaaatatattaaagctcaaagtggaatttaaattctaaaaggaattctagaatttagaaaagagaagaaaacaagtatgaagtggatataaaaataagtaaataaaaatatattgttccaaaactagagtttgaaattgtgtaattaactcaaggcaggacctcataatcaaatccaaattcaatcttgaattcaaaaagggaaaaggaaatttaaggaataataaaaagaaaaggaaaaaacggaatttgggctggaatacctga

SEQ ID NO: 16931 - DNA, 862 bp, Arabidopsis thaliana landsberg
agcattctccacaggtgcaactggctcaggctgttctgctctctcttctacaggcgtagatgaagcgggtcttgcagcatcaggggtttctccaagtgctgcaagaagtttgtccaaatcttcctcttcctgtactgtccttccactcttgttattcttcttctttttcttactctttccagtttccacaacctccacattcttagtatcagaagttttagtttcgtctgcaactgagtcatcacctactgaggcaaaaacactgccgcccttctttttagaagatttcttcttacctgaaaacgttacttcagggctctcttcatcttcaattgtattttcgtagtctctagagtttgaagcatcagtcccttcttcttcatcgagcaaatcagcggtaaacgagttagtgttcttcttcgaagacttagatgacttctttttcttaccagagaaggtgataggagactcttcttcctcatcttcgtgcacttcctctgtatcatcatcatcactaccaagtgcatcaaaagctgaagcggcaaatgaattaccgccttttttacccttcttagacgcatgcttcttacccgtaaaacttataactggctcatcatctttgtcaccatcagattcattatcctccttctcatcttcatcatcaagcaaggcaaagctaacagaacccccgcccttcttacctttcgacttcttcttcccaacaaaagctatctcaggaacatcgtctttcacccccgcagccgaaaccttatcacaaaaatcatcatcatcatcctactgcgtaccattcttattacctttcttacccttcttcttcccagggatatcaacggccttctct

SEQ ID NO: 16932 - DNA, 1773 bp, Arabidopsis thaliana landsberg
tgtatatgtataacttatgtgttggtataaacaaccatatggatttcacatcttggatacacatcaattttgcctttgtttaccgttaatgtgttatcgatggatatggatccattttataattatgatagtgtccatactccatacataagtgaatattggtcaaaataaattggacggtgtatttttgttgagattgagttcttgattaaatatgcaagagagaatgcttcaatgagaacatagtaaaaagaagaagctcaagcaaaagaagaatacgcatgggagaagacaaagttgtcgtgaaaagaagccatcgacaaagaggaaagtcaacacaagaagaaacaagttgggcttgtgttgtattgtaataataggtgattgggctagttgttttgttaggcctaaatgagtaagtgtgttatatagttaaagtctagcttagtgaagagttgttagagttgttgttgtgtaagagttgttggtaaaccttgcttgtaagcttggttataccttagatactagagtaatgatgtctaaaagtaaggtctaggtctaagtagaagcatggtgcaagtgtgtactaagtagaagtaaactagtataagtatgtgcatgtatgtcttgtaataataatctatctttggatccaatacaaaaatgttgacaactaatgttttctcttttctctgtcaaaacaagaaactaaccaaagactagagagaatgagagtgaaagttctttttgtgcttgtgttaaaatgagtgagtgaagcaaaacattaaagagaactaagagatgtaagagaagtgaccctctcaaagttaaatagaggaagaaccccaaaagctcaacaattttttatcgacgattattgttcatgtctaaatttgtgcattggtatcaaacgacatgtgaattactaggtgaccatttggacttgattgtttggacactcggcaatgaacaattgtgtctttaaaaagaatatctaaatgatttataatgactaaatgttctttaataatcggatggatggaactttgtggacaataatcataccaaaagcaccacatatagcttttccaattcttaacatgtaagaccaaaagattcacaactctcatcataacaatccataatgcacaatccatgatgcgtcatccacaatgtgccatccatatatatcgtcatccacatttttagaactaagatacaaacatttcataaacaagcaaaatctgaaatctaaatagccaataatcatataatcagtttaacatcatcaacttcaccatatgataaaaatgggatgcttgtccatctcatttgcttcccaaaactaatgtttaaaatagcctaaaattcattatgtaactacttctcttattagaggaacatcaaagcaaaatcagatttcaattgattctcaaaatcttatcgaaggaaattatttcaccacaaaacgtaaagcaatttcagatttgataaagaaatctctctcttgcactctttctagttccaaaccacaacaaggtcctttgttttcaccattttcgtagttatcactttcgttctgatttttcgcaacgtaattatatctacgtgaagaatttctggtggattatttccctcttttagctacagattgagcattagattcctttttggatgtgtcggtgattgattctctgtgtcagttatgatagctaacggattcgagaatatggataaagaacgagtcaaaacgtcctcgtatgacttgggacg

SEQ ID NO: 16933 - DNA, 1847 bp, Arabidopsis thaliana landsberg
ttaaagctcagaattaatctgtggatgctgaacatccacgactatacaagcctataagcgacagatgattaagaaagattaaactgagcatgaatctgcatgccggcaaatctctcaagtttatataaacatcaaagacttaaacgacccaaaaatagatttaggctccgataatatatacgaaccaataatattccctagcttatcagccttctcagaaaaagaaaaaaaatgtcatcacttgtgctgtaatatttgtttggattttgtaccaaatcttattttattatttcaggttaattagataagtaattaaacttcagaatgtaacatattaacccatcactttacttaacccatcgagaatcaggttcaattttaaattaacatacttttgtagaaattataaaagataattaatagttcaggggcttatttgctaatcacgtgctcatgtttttagttgacgacgacaaaccctagcgagtttatcctaactcgactcgcgatctgactcaccgattttggaatcaaaagacggtgggtgttgtaagcagcgacgatagatagtattcaccgagatcagatagatttctaaaggtaataaacaatttgatgatcagttccagttcttgattaggaatttgtagggctaggaacaatgatgaacatagaagaaggtttttatttattcattcaaaaacataaaagaagatgaattcttacaacaatcaaagttcatctgaaacatcaactagcttcagccctgttttccaatcttcacaaatcctaacaaaaggagggattttgattgtcttagcttgacaaccatggagcggagctctaagaaaacaaggctccatcgacatggccctaacacatggtgggtttggagttttcttgtcccttggctcgtagagtatccatggctttaaccctccaagaccttgagctacatatccaaatgtagaccttgtgcttgtcacaagttcatcggttaggctaaggaggtacatctctgccagggccttttggtcgtgaagctttttgtctgtttgctgaaacctttctctacttggctgataaacttctactatgtctcctgttgtagttgggtgttcccaatacatcttctttaggttatttgagtattctggattcagagatgtaaccagaacagctttaagtttggagggatttgatgtattagttacttgtgcttcttcttgtgcagcaaattcaggtaacagtttctctctttgtgtacatgctacgatttggtccatcacgtgctggaaatatttagtttgtctgctgaaaacccgtacttgaatccctagtatctcgtctgctcttgataagtaagcattgtaggatcttgtgaccataccccagacttggtttgtcgggtgaaaaagataccgagccaggtggtagaagacggtgtctttctgcgggaatagcttgattagttcggtttggaaactaggattcagccatagagatggaataaagtaaaggttggatttgacaaccagccaagggactttgtcgactaaagactgatccttttggcaaaagaacatcttgtcttgatccctgtaatcatggagaagatgaagatagagatgtgatgggattgttgtcgagttaatggtatgattcttcaacattgttccgtaacaatgcgagtattcccggttgaaactatctatctgacccatcaatggaaaatcaagaggaagtaaccatgaagtaccaggataaggctcacagaagagatcactaatatccttgcgttggtccacaagaatgattctctctgtcaagagagcgtagaggaacac

SEQ ID NO: 16934 - DNA, 704 bp, Arabidopsis thaliana landsberg
aggcgaaacccatcgcaatctttcccccaaatactctccatcctccccatcgcattcgcgttatagcttatcccccaatctttccctataaatgtcccatcaggcaacacattgtcctcagcacaactcattgtatccactggcactggcggatacaatcgtagagattcagttatcgctgcgtgaagataattcatcagtttaagatcttcaaacccgtaaacttccccgattcgcttccctgttcgttctcgaatcgagtttagctcttgtagaatcttatctttcacttctggatgcatagagagcaaccaaaagaaccagctcaaagcagaggaagtagtgtctcgtcctgcaagtatgaaacttatgacaatatcacgaagtatctccggagaattcatctcctccttgctgataaaccgagaaagcaaatcttccttgtgatcacttacctttccttgttcaatcctgttacgcacgatctcgtctgcgaatttatggacgatcatgattgattctctcagaactctcgctgatccaatgttgagtttctttttaatcttccatgaatacgaaatcacagactgaaaccgttgcgagatgatcgtcgccgccgtttcaaaggcctgcatgaagtttcaccggctgctccgtcgtcagcgagacaagctgaatcaacgttgaaagctaatttacagatg

SEQ ID NO: 16935 - DNA, 777 bp, Arabidopsis thaliana landsberg
  unsure (1)..(777): unsure at all n locations
agcattaataagtaaaactctgacattcttactaacttgagagaaaacgaaaagaaagacgttattaccactcgactctttccaccgtcaacatctgtcttgttccccaagacaacgaaggggaagttttcaggatctgaaggactagcctaaacaaatcaataaagatattaatcaatcactgatatgatatgacagaaaataatcgagaaaaatcagtgatatgtgttcgaacctggatcaggaactcttccctccagttgttaagattttcaaaggatttcataacattgacatcattcacaagaacacaacagtccgctcctcggtagaaagcaacacccaaactttggaacctctcttgccctgcagtatcccaaatctacaatgggaaaacaaattactttatttctatctgtatttggagatcaaagaaccaaagagttatataacctaacacacttaaaagacaatccataaaaactagagtatgtatgtaaactaaagtgtgtgtttctaaaactcatcagtcacattatatatataattagataacacacacggtgattacctgcaaagtgaagattctgtcatcaatttggacctctttggtcaagaaatcagctccaatggtagctntatactgattactgaattttcgattcacaaacctaacaaaggagataaattaaaaaacaaaaaacgaatcataacaaggaaaattttcagatcctgaggactatagtatagagaatacatactgattcatcaaggacg

SEQ ID NO: 16936 - DNA, 999 bp, Arabidopsis thaliana landsberg
tacgtccgagtgttaggccatactctagtcctgtcctattagtgaagaagaaagacggagggtggcgtttttgcgttgactaccgggcacttaatgaggcaacaatacctgataggtatcctattcccgtgattgaggagctgcttgatgaactgaagggggcaacagttttttctaaattggatcttaaatccggctatcaccaaatcagaatgaaggctgatgacgtggagaagacggcttttaaaacacatcaagggcattacgagttcttggtcatgccttttagattgacaaacgctccatctactttccaatgtgtgatgaacgatttattcaggccatatttgcgaaaatttgttttggttttctttgatgatatactcatctatagcaaggatatggagacacacttgaagcacttggagatagtgttgcagttgctgagccttcatcagttctatgttaacttaaaaaaatgtacttttgccagctcacgcatatcatacttgggacacataatctcagcacatggagtagcagctgaccccgagaaagtggatgcgatgctgaagtgacctctccccaaatctgttacggaactacgtggttttctgggtcttacagggtactatcgccgctttgtgaagaactatggatagatagcaagacctctaactgatcagctccgaaagaatggttttgcttggaatgaggctacgattgaggcatttgaagcgttaaaagcggcagtatcggagcttcctgtgctggttctaccagattttcaacaagaattcaccgttgaaacagacgcttcaggtgtggggataggtgcggttctgtcacagaacaagagacccattgctttcctcagtcaagccttctctagtcaaggtcgaatcaggtctgtctatgaacgggaactcctagctattgtcaaagcagtaaccaaatggaagcattatctgtcaagtaaggagtttgtgatctgaactg

SEQ ID NO: 16937 - DNA, 778 bp, Arabidopsis thaliana landsberg
tccatggggtcagcggagtgggcaaagacagggggatggcccctcatgaattctgcccgcttgtctctgggcacttgtggcatctaggacttgcactggaggctgaggtggtggtggctgcagctgaacctgctacatcgctgctaatgtctgaccaattggctggactgcctggggtctgcatcaagaacatatgctcaatggtcattgggggtggtagtggcagatgctgctacagagctgcctcctcttgggtgcctgttgttccggctgagcacgccttgcacctctgcgcctgttctcagacatctgtagaaaccacacacatatcagatctgactctgcagtctttcagcataagaaaagatacacggaattcttcataccactgaacaaatgatcatcttcactgacaacttctcagataaagaggaaagtggaaataaatggattacccaactaaataactgactttattaataactacaccaagttgcaggggatacccacaccttgatgacaatcattataaagatccaacttcattgcatgttcaccatgacaagtattccaacgtatgataagcaaactaactctaactaagactgactaaactaagacactgaattaagcattattacatactccgactctatcgatctatggatcaaatctatccgggtcctgcagtctggggtacatagtcaaagcgacacggggtggtgagcgatatgggtgttgaacgtgacaggggcgggagaccacgatccagatagtg

SEQ ID NO: 16938 - DNA, 578 bp, Arabidopsis thaliana landsberg
  unsure (1)..(578): unsure at all n locations
tacctttttattaacgcgtcgtgctgcttgtgcttctgcttttgtttttgccaaaaacgttcatgaaccactctggtttgtaccaaaccaatatgtatcccatcatcaatccaaaggcaataccaggtatgaatccaattgcagctgctatccaacttatcacctcttcttcatcttcttctgatcctggcatttcggactcttgcattgttttcccatggatatcacaaactttctcaagtgaagggccaaaatgtcctgcattctcctcgaaagaagagcaattctgtgttagaaactgagtgccccctggtactagacctacaagctggttatgggagaagttcatgtacgcaaggtacgagaggtcccctagctcttgtggaatgtctcctgaaagttgctttgagaaacatctagtgattcgagctctcttacgtttcccattgaagttgggatgtggccagcgaaagtattgcttgacatgttgagcacatgaagctctntcaatagaccaatggancttggaatctctccttcaaaaattgttctcgaaaagtctatngatgtaaagattt

SEQ ID NO: 16939 - DNA, 1727 bp, Arabidopsis thaliana landsberg
  unsure (1)..(1727): unsure at all n locations
aatgacactgtcgacaaagaaagcaagtgaaacgtaacgtgcatggcctccaaatcatgaacttattcgtaaaatatcatttctatagggtataggttagctatatatcgcaataataaatagaaaaaccataaaattccaaagaatatattaccaatcgacaccaaaaagtaaagataagggtcataatgggctctcccttggatggtttagaatcttcgtaaccaattgtctccctagtccctattatagctttgagagatgaacgagtaatactgtatcaatcatacaatatatatatatatatatatattaatttgacatatatattagagctaaccaaaaacaaatatcgcaatagcttagattagtgaatgatagttaattgttacattttgataactcattattagaccgccaagagtcccatcaaactagcaggttcatgcggccacgccgggaccaagatctggttcttttatttcccataacaagaatctttttcattttatttatattatagagaacttttaaagcagtctggttatgttggatctggaggaaaatcaggaaagtacatttgattttttaaatgtactcatatgaaaatgtaaacaaaacatgaataatcctttatatatgggagtgggacctagattttttttgttgctatttaacaaaacaacatttctccaacattctgaaaaacaggatcacttgttttgtttcactgtacagtagaagagttttcactaactagtaaactaattaattagtgatttttatttttttttaatcaactcaggcctaattgagataacttgttcgtgggtatcaggcccaatataaagtattctaaggcctactcaataatatctccaatatttttattttcggacagatcatttatttatttttgtaatattttgttttttcttctcgtaaaaccctaaaatatacaaaaccctcaaattcagtctaccagcgaggatcgatgtcggagctcacagtatctcctttcacgcattaactcaatttatctgctaaaccctgaatagcttcacgccgtttttctaattctcaatcaaagcttcaccgccgccgtgtgttgttctttctccgagtcgtgttctctaatctcaggtgaagcttctttcttcaatttgcctttggtttcgtttcgaaaaatcatgtcttttctaagatttatctccggtgctaatcagaattagtcggtatctaatgggtttctgaattatctgtctggtttggtatcagtgtttaattgtaattgagttgtttggttcgtttaggtgataaggatcaagatggagattagttcagaggataacaatcttatggagaaggttttgcctcctgttgagcaggtactaacttggttggttttgaattcttaacagtttattatttgtgggttttggcaaagttgaggactttgattcaaatttgtatgcaggagagtgatgttgagctggagactaaagttaagaaatatcttagaggagaaggtgctaatcttgaggtatatatatgtttatatagcttttgatgattgtgtcttttggttgtgaaatgcagtggttgagtgttttctttgtgttccacagacattgaaagataagaagcgtaaggactcaacttgcttaaaaacaacagtcgcatgggaagtctgccgctngattattatcagaaactaatgctgttgc

SEQ ID NO: 16940 - DNA, 839 bp, Arabidopsis thaliana landsberg
cacatcttttcatattcgcagcagttatcatcatcaccaagttttagattatgttcttcatgactaaaatgaatgatttctttctcatttattaccttgtatggatcctcttctccctcatcttcaggcttatcttcgagttcttttccatcccacacatcttcccttgtcgcacactttgaatgaacagcataattaggacaacgcgagcaaaagaaagctccaagggtccaatccatcttttggcgacaaactccacattcccaatcaccgtgaccgagatgataagtgcgagaaatcttgtggtcatgacgatttatgtttatgactcgaggcaaattgatacaacctttgtgcagcatgaaatcacattcaagacaaacgtaaggattccggtcaccaaccaacccacatgcgttacaagtgaaggcgtcctttctcgccatgagggttaatgtatggctgtggctctttggttgataaatagtaagcggtgggggatatatccaacagcttaaatctatgctgatattacatatggaacaatgatacatcacctcatcaagtgggcttcgacaaaaatgacagttaccatctgtatagtcaattgtctcggccaagactttcttgagaggatgtttggagtgacacggatggttgatgatgtctggctggatgatgcattcgatatgtgcgcggaatttgcagattttacagtaaatggcgttgccttccgtgttaccacatacatcgcatggaagatactcatgggggtctccacgtccagtatgcatcagtcacccagaaaactaacggttgactgcagggaatcttcactc

SEQ ID NO: 16941 - DNA, 781 bp, Arabidopsis thaliana landsberg
atcagaatctttttttctttttatcctttacatgattttgcggttgatccaggcctccatactcatcttcaagagactgaggaagatcatagtggtaaagtgtaacatgtggttcgattcctgttaatagttttgccaaaattttaattagaagctataaactggctttagtagcgatgtaaaccaaaaaacctcaccatggcttattagttctttgatgagattcttgtaaaacagtagaccttttgggttaatgagtcctcttccatctggaaagtcacacagacaaaaagggtttaagaggtcagaaacaacaatatcgttacttgcaaataaagaaacaaggaagagggtgttactaggtataagtcttgaccaggagatagagaatctgaatgattctaagcccatttctgccatcagcttaacatcttcctgccaaagtatcaacaacatcgaaattggaaaacagagacttaacggtaacttcttccaaaatttaacggcaaagaagagagagaggaaccttgtatttgtgatacccatcggatgttatatctccattacctaaattacctctattgtctgcaagtttcgaacaagaatctatcagaaattttctcatataaatcccctaataatgaacacaaaatttcgaaataggcaattatattgaaccacagagtaacctatgaaatgaactacatgaatttttaagcatccctagccagaacttatgttcaattggtaaatttgttcgcaaaaacaaaaactcacacat

SEQ ID NO: 16942 - DNA, 770 bp, Arabidopsis thaliana landsberg
tccttcaaggggttaatgagcgttcggacgaaggttaaaacgatacaattacgaaggttgaatctttgtaattgaactctcagagattatatgaaataatgcgagatataaaacattaaagatgagtaaattataagtaaacaacatcatttacatattatataaactggatgtattcaaatataatatcagatacatttatacctctgccttggcaaagaataatttccgagtgatgtgattgcaattacagggatgcgtgaacagtaaaggaatattgttcatctatttataggcacaggacacagcctgtgaggaattacaatcatgccccttacaaaagattacaattatgactcagacccttatggactaaaaagtcattccatctttaagtcagttcgatccttcgtcttcggatacgttatagtatcgaagcttcatgagcggtagcttcggtatcacgtataaacagatttgccgaaggtgtttcttcctgcaggaccttcggcgatgaagcatgttcccaacaggtcctcttctggattttcttcttgggagcgagcttcctcagcttcttgtcatagtccatctttaaggttcgataggcctcacgggtgttggcctcctcgccttctgctatgtcgagacactcctggaaagattccttctcttgcttaagctccttgacttgctgctctaggctttccacccgggattttaggtgggtgcagtgggaggagagatcatcgtagtggttgttgagggtg

SEQ ID NO: 16943 - DNA, 368 bp, Arabidopsis thaliana landsberg
tttgaattcgtcctaggtaatttgatgaccagcaggctggatagccacataatttccccaccaggtgctggcagggcctcgcaactgctgcgccgcaaacaagggcctttgagtctccgtgcatcagagaagcccaaacttttgttcgataacccgaatccactcatccgcttcaagaggatcttctgccttaaatagcgagggacgtgtctctaagaagtccaaatatgaagtttcgcgaattccttgcggatacgctcgcccgccttgctgctaatattgttgtcccgccatttcctgcagaaagcgggtgttatcggctgttgcattgactaaggcagtgataggctcagccaaagtgggggtac

SEQ ID NO: 16944 - DNA, 633 bp, Arabidopsis thaliana landsberg
ggactcgaaaatggtgacagacaagagcaagaaggcgaaaaccgaagaagaaaacgtcgagcaaatcgatgcagagcttgtcctctcaatcgaaaagcttcaagagatccaagacgacctcgagaaggtaaattccaaatttttttaacaatccccatgtttaaattttctcgtgaattttcctttagtcgatgttcatttattgctttgatcaatgagaattgttctgtgttggactctctctcgattcagatttctagtggacaaattataaagaaaagtcagtatctttattagtaattatgttgttgttgtgtctttcgagtgaaatgtggtcgctttcaaattgactttgtgtgaggattgaattgttttgttgagtccaatctctcagtgacctctctggttttggttttgatagataaatgaaaaggctagtgatgaagtgttggaagtggagcataaatataatgtgataaggaaacctgtttatgacaagcgtaacgagatcatcaaaaccatccctgatttctggttaactgctgtaagccagactctctgttctgttttttttttttcaatgtagagttttttagcgattgttttctctatatctgatattttgggaacttg

SEQ ID NO: 16945 - DNA, 710 bp, Arabidopsis thaliana landsberg
caactacttatagggaactcattggtcgactgctttatctcactattacaagaccagatataacatttgcggttcatcaactgagtcagttcatttcagctcctactgatattcatcttcaagcagctcataaggttctccgatatatcaagacgaatccaggtcaaggattgatgttctctgcaaatgttgaattgtgtttgaatgcattctctgatgcagattgggaagcttgcaaagatactagacgttcagtatcaggcttctgtgtttatttaggtacttcactcatctcttggaagtctaagaaacaggcagttgctagtcgaagtagtgctgagtctgagtacatggctatggcacaagctacttgtgaagtgatttggctacagtagttgctcaaggatctgtatattcaagttacttgtcctgcaaaattattttgtgacaataagtctgctctacacatctcgatgaatccggtcttccacgagagtactaagcacattgagatcgattgtcacacgggaagggatcaaattaaagctggaaatctcaaagccttacatgttcccgactgagaatcagcatgctgacattcttacaaagtctttacatccaggtcctttccaccatcttcttgagcaaatgtcgttgtcatatctttacctttctaacgaggcatttaaaagatagagattttggggggt

SEQ ID NO: 16946 - DNA, 548 bp, Arabidopsis thaliana landsberg
aactaatgactatttaaaaagtgtagctaatagttagctggttcattagttggtagttctaaactctctaactacttttagccgcaaactattagttttagaggttttgaatatgtaccttttttcaccatgtgctaattaaggattgtgaaccatcttatcgacgtggctcacactcacatatttagtgaaaaatgcatgatgttggaaaaaggtcaattcactattattacctcatcgctgaagtaatgttggaaaaagtatgttggcaccctttttaaaaaagtatgttgcacccttttggtgcgtcaatcactcaacaagaaccagcggcggtgctctctggtcaagcgcagacggtccgcggcacaaggccagacggttcgcgacctggcgcgaggctaggattcccatgtgacggccggacggtccacgacctggcgacagggtcgtcttcctcctccttgctggaatctagatctcgtcccctggggaaaagatcttaaggtgctctgggtcgacaggtcacccggggcgtccccagacga

SEQ ID NO: 16947 - DNA, 715 bp, Arabidopsis thaliana landsberg
ttgatggggtaagtacatacagattgcttatggatttgatgtagcaaatcatcaagtgtgaaatttcatctggtttgctcttgatgcagtcatataacgcaaagatatcagattttggattggcgaaattaggaccttccgctagtcaatctcacatcacaacacgggttatgggtacacacggttacgcagctccagagtatgttgctacaggtactacaatgttttgtattcttagttcttttggtttccaacaacaaactgtgaacatgtttgttggttccaacaggtcacttgtatgtaaagagcgatgtttacgggtttggcgttgttttggctgagatcttaactggtttacatgcgcttgatcctactcgtcctaccgggcaacacaatctaaccgaatggatcaaacctcatctatccgaaagaagaaagctaagaagcataatggaccctcgtctagaaggaaaataccctttcaaatctgctttccgagtagctcaactggctctgaaatgccttggacccgaacccaaaaacccgccatcgatgaaagaagtggtggaatcgctcgaactcatcgaagctgccaatgagaaaccgttagaacgaaggaccactagagcttccccatccatccgtcaacaacaaggccattatcggccgcaacaactctcttcgtttcgtcctagacatacccggtttcgagctc

SEQ ID NO: 16948 - DNA, 1009 bp, Arabidopsis thaliana landsberg
  unsure (1)..(1009): unsure at all n locations
tgatctactccataaggtatcgaagagtacccaagaaaagtatgacatttttatcaaagaagatattggttctcttgattctgaaatctgcatctacaggaaatctcgatgttctttatggacattgttaatgcttctcacagctatgcaacaggaggaacatcagtcagtgagttctggtactaccattacctgactttagtctttggttcattgtaacatgactttttgttttaagttctaaccatgatttgggaatggtaatattaggcaagatcccaagagaatggcgactgcactgcaaactgaaaacgaggaatcatgtactacttataacatgctcaaggtaggattttaaacttttccccctctttctatttgctcaaggtaacatactaacatatcaacacttgtacaatttcaggtctctaggaatctgttcagatggacaaaagaggttagctatgcagactattacgagcgcgccttgaccaacggcgtgttgggaannnnnnnnnnnnnnnnnnctggactgatgatctacatgctcccattaggtaaaggtgtttctaaggctgtgacttatcacggttggggaacaccttatgattccttctggtgttgctatggcactggtaaactcttaaccacaattcatctggttttctacatttttgtaagatacaaaagtaagataaattttgagggtctttttttgtttctgtccacaggaattgaatccttctcaaaactgggagattccatatattttcaagaagatggtgcaactccagctctttatgtcacccaatatatatcaagctcacttgattggaaatctgctggtctttcaatatctcagaaagttaatcctgttgtgtcgtgggatccgtacatgcgtgtgacattcactctttcttttccaaagtggtaaaacttttgcacaacttgatgcaacatgttacattgaagaaagagtctgatggatccaattttgttgcagggagtg

SEQ ID NO: 16949 - DNA, 1418 bp, Arabidopsis thaliana landsberg
  unsure (1)..(1418): unsure at all n locations
tgccgttagattctgcacatcaaaactagcatcaaaattgtatctgttatacggtattggtggtgttgtccgggaatgctccggtgtggcgttcgatcggttcagtgctcgtcgtggaccttgaatttgtgtagcattaagccaatccttnnnnnnnnnnnnnnnnnnnnnnnncgttattgaaggactctctcggaagttattgaataccacgttatttcttgctttccatattcgccacatcaagcagaatggactaagtttctgagaatcgtgtatcgtggcggtctggaggaataggaaaatattggagatgttatcttcaatgttgttggatatcggaaagttcctatagagcgttggatccaatagtcgcctagccatatctgcaaatggacatgtgaatagagcatgattgatggattcgttttcctttcggcaacgtggacagccaggatctatccgcattccccttgtagttaatcgttctgtagttggtaatgcccgagaaagaattcgccacagaaaatgttttaatttcggcataataggcaagtgccatatcttattttttaattcgatcgaaccatgtggctgaatgattgctcgagaggtgtcaaacgggtcatgagtgagaaaccaatagccagagcggacagtataatctccggtgaagttgtaattctaaataagtttgtccggaatagggtttttggatagatagtttcgtttaaggtatgcatgatccctttgatccacatattttgtaattttggagtcatcccaagaacggcttaaacctctatgcgagaacaagttatccattgatagctccttatatttttcttctgtgatcaaaggacggggtggatgagaatcaacgacattatcaaaccctattcgagcctgttttccatcaccaatcacatatcttgtacccttttttaataatgttataccggatagtaaggaagcccaaccataggactgttgatttctttttttggcatcaagtattgagtcatctttaaaatatcgagctttcatgactcgtgcaaatagagaactcggatgtttgattatccgccaagcttgttttgcaagaagagcatcattaaattttgcaaggtctcggaaaccaaggccgccttctttcttagacaattgaagtctcttccaagcaacccatggtattcctcttttatttgaagctttttcccaccagaaattcatcagaagagactctatctcagagacaatactttgaggaagtttgaaacaggacatcgcgtagacgggcattgccaaggcaactgattttaacaatatctcctttccggctggcgagaggaattttgcactccatgaggcagttctttttttaacacgatctatgatataattgaacatttcttttt

SEQ ID NO: 16950 - DNA, 904 bp, Arabidopsis thaliana landsberg
tttttcttttcgctatctctatcgcgttgagtctttttgtttttcattgtgtttttggtgcagccaagggaagggtgcggagtgtctacagtgatagaatctgggcattcagattacaaaaaaggagacctactctggggtatagttgcatgggaggagtacagtgttatcacttgactcacgagcatttcaagatccaacatactgatgttccattgtcttactacactggacttctcggtatgttaatctcagcctttttcatagttttgtaaggtggaatcactctgtaaaattttggaaatctgcttcttgatgatacaatgttttgatgtctaacaaatcttataaacatatcaatggaattggttataactttagtctagaagactagagtttcaactgtttggtttgttgatctgtttcatatattcactctttgatgggtgttctctgttactgaaaggtatgcctggtatgaccgcatatgttgggttttatgagatctgttctccaaagaaaggagagacagtttatgtgtcagctgcatctggtgctgttggtcagcttgtgggacaatttgctaagatgatgggctgttatgttgttggaagtgctggtagcaaagaaaaggtgagaatttgatcattattttctatattttgattccttatatttcttggttctccttcaagagtatgattaaccatttttggggtatctgttaggttgatctcctgaagaccaagtttgggtttgattatgcatttaactacaaggaagaacctgaccttagtgctgcgctcaaaaggttcagtaaactacttatttctaagtgttttatgcctataaatgttagaatccgtttgcataataaagcggcaatactttttgattgatcttc

SEQ ID NO: 16951 - DNA, 2453 bp, Arabidopsis thaliana landsberg
acaaaatttaatttgggatccaaacccccaggaacgtggttgaaaattttaatagtcaaactctgtactagtaagatgatgggatattaagagagaaatggcacattggatcatggagatcattagtaattcagcggggtgtgaaacaaaaatcactctcgaatctctcaacaccaaatattatgcgaatgtggaaggtagatggttccttttggggtatgaatgtcaaattccataatgcacgcaaatatgacccaaattgagacaatttctatccagttggaccattttaatgcagttgcagatcagaagggtgacctttgtatcctggcgatgctggaaaatcttcattttggatgctgaactcttggttttgctgaactatagggctgattccaaggccttgtttcaatcgagaccctaagaagtttcagaaaacagcggagtatagttttgcttcaaaccaataaaagaaagaagatagaattaaagggtttttcttacttacccaattgtccttgaccgcccgcagagctggggcggcttgtgagctgaggaaaatcattattaatatcaaacggagaagtgtcgttggagttcatatcattcagcaaacccatagagcttagactgttcattgcttgaacatgattttgggaaagtcctccagctgaagggtaagaatttcccagcatcgaaagaacctgcggagatcctgaagagaaaggaaagaatataagagtgtaaagatatcataaacgatgtgacgaaacgaaatttggggaaaacatgaggccatttggttactggagttcgactgattaggaaattcaaacaaaatcatgagttattcgattaatgatttctaaatactagtagaaatccggtgttattcatttaatgataaaggatttaacatcaatactaacggaattgtaaatcaactaaaaccatacaaatgcataacctatttcaacaaagagcagaaaaggatataaatcatgaagtaccttgtggcaagaccccacccatcatgcgattttgtccaatatttccggatccgctatttactgccaaatttagccgcgaaccaagactcggaatcgacaatcctccaccagagctcaaagtcctacccattgtgcctccaccaaccatattccccatagaactcgtcattcgagaacctacatttcccaatattggagaaactcccaatcctggaacagtaaaccaattaccaatggtggtagaggtaggaagagttcaggaatggaaccaccctattagtgtaactactgaattaaggttttccaacagtatttatacctcccctattagtgagtcctgagtgtccatgggagctaccatgagacatctgcaaataagaatccaaaagcaaacttttaagcagagccaaagcaagggttcatatttgcattatttttaggataccaacacataagcataactgcacctgagagagtgcaaccggaatattgctggatgcaaatcttccattcgaaatacttccattttgttgttggacaccagcagaaggaacaccatttagacttgaatttctcgatccaagacttcccgccaagttgggaacattaaagtttccatgaatattatgaaggccctgaatagatcctataaaaagaaaaaaaccaatataagttcagaagaattacgaaagaaatagcgccggagacgtctacccaccagcatgatgaaaaactggagacgctgccccagactgaccggagaaagaagaagtaaacgtcctccctgaaccgtctgacaaattcgaggtagacccgtttattgaggactgaggatatcattgaaataaccacaagtcagaacgactgataaacattatttatcctagaagctacattgacaatactgcaacacactgatataaagatatgtggaagaagtacattaagtaaacttgacatttgcagagattaatcaactccagaagcaaaagttcataagcaaaccaagcaggaacccttcagtgagctcaggaatgtgagattgcagtcgtgacctgaaaagaaggattagatggtgagacagtaaatacatggaaaggaacaaactttggattcatcacagaactataaacagtaaaacttcaacgtatctgaatcatacattacaaacaatcaaaaccctttcaacaaccgatcaagggttcaagagaaagtttaaccattgcgaaatcggaaaataaacaaaaaccctaaagcactcagatttataatcagcagtcaaacgaaattagaacctgataagaatatggacccaaaggatgaacaaagaaactcaatctcgaagctccaaggaacgaaattctcgaagatggagaagaaatcggaataaaaaaatctgatctttttgtactactgaccgtttttagtcttatgtgtttagga

SEQ ID NO: 16952 - DNA, 772 bp, Arabidopsis thaliana landsberg
gtgcaacctcgaggaaagttaatttaatttttttcaacacatctttgtgttcatttcgaaggtctttaaccgggagaaggggcctgaaggagtttaccataaaaaacttgaaaaagctatgattattttaagttggaattgtcttaggaaataaggcaaccattggttatttgagggatcattggaaaaaacatcgacaggacattttatttttatcggaaacaaaacaatccacgttatatatggaaaaatttgttggtcactttggctataaaaatttaacaacggttgaccctattggttttagtggtggattagcttttttttataacaatgattttaatgtttcaatcattttttaaagtctcggttaattgatattgaaccagtttataaaggaaaaactatttgtcttatctttgtatatggagacccgataccaaaaaatagagatcaagtttgggaacgattaacacgaattggtacgactcgggatacaccttggtttttaattggcgattttaatgcattaacatgtaaccatgaaaaatgagggggcagtttaagacatgcttcttcgtttatacctataaatttaataattcaagattgcgggcttttggaatttccttatcatggagattggttatcttggcggaattggcgggataaaaaaccaatacggtgtcggttgcataaagctttagctaatgaagattggcatgatttatttagtaattcttttattgaatatctaaaaatggtagcttcc

SEQ ID NO: 16953 - DNA, 694 bp, Arabidopsis thaliana landsberg
gtagaaacggtgacgtttaactcaaacccaattccgaacaagaagtcaagctcaagcatgttcatttcttctctgcttattcctccaacttttgcataatattcattgttgtaactcctaaaattgttacacaaagatattaacaattaaacaaaatgttaactcattagtaaatttcaaaaagttaattagcctcagaattatttacttacaagtcatccatgaatttagcagagaccaagacacttgtgattataagcctatggacattaaaagaattgataggcaaaaatggctgcttcttcacgaaccgatccaaatatatatatgcgacgatgtaacacgagtagctacaattcgcgtattcaaagatccgttcgagatagcttctgatggaaatggaaggtttggttactccagtgaagcttgagggcctctgtttctggctcaggttgtcgttggtctccgatactctttgcaagagatacgacattgccgttaaaacacttggcatgatctcagccaatggttcttgaagatcttggttcattctctggatctcaatctgatcagccattcgaatgacggaagaaaagataaacagagctctgtttttgatgagtttattacattacatgttttggtttgctttttgtacctgtcttttgcctgtcattttggtgttatataaaaa

SEQ ID NO: 16954 - DNA, 1027 bp, Arabidopsis thaliana landsberg
  unsure (1)..(1027): unsure at all n locations
gcttaaaatgatattcagaaactttgggtgaagtttggcttgctttggacattgtttggtccctaaacctaaaaccctagtcttctaggtaatggctgccctctgaaataaagaactgactccaaaaaccctagtttcctggagtaccgtgaaggaaaattgtattcaagacctaatatgatgtacctttattattattgcatttttataagcattacatgagcattcatgattatatatggttatatatagaaaacgaggaagaagtagcagttgaagaggagactgcaccaccgactgaagacccacctacaaggaactgcttatattttgatatttgtggagcagagcccgactctcctataacacaagccaagccgccggtgcatttgccacctccttgctattttaaaatctttctcacttgcttgatgcattaggtaataggagttgtgtgctaaacaattgatgcatttccttccttggaaaattgattactcttccttgatcacctattttatgaaaaggttttctgatgcttagtcctgatttagaaaaacaaatgttttgttttaaaacaaaaaggtgatgcttcatagtggaagggttgtttttaaaataaaacttgatggggatccgtcatggccannnnnnnnnnnnnnnnnnnnnngatgtacctctgccaggtaccggactttgtgtttttaaatgataaagctgagaccgggcgggtgacttgcacgagaagagagtctcggtgtagtgtctccatctgagtcgactaaggaccgtctcgatgtgggcctgatgatcgaggaccttttaactggtcacatgcctcatcatgggtaagctttgcctcgggcagactaataccataaaggccaacacgcaataggagtggagagatggcaagagtagtgtgtaccctccgtggcaagaggctggacggtggtgtatctgtgctctcggttggcgtgaacccggtctagtcttaagaaccccggtggcgagttgacatatgaaa

SEQ ID NO: 16955 - DNA, 928 bp, Arabidopsis thaliana landsberg
atatcaacatgggttgtacagtggttagctaggtaagtaaaaatgtagacattttttttaagatgatcatacggttatatatatttatctcttttcctcaattctaaactttttttttttatctctttaactctttgatattttaactctttattggataaagagataactctttatcaaacgcgaatattgcataatttattaaatgtataaacatctacgcataaaagcaacgtaccatccgtaaacgcatatactaacttctaattacagaattcttccatacaaatattcttttaattatttaggccaaaatcataaagcaaaaaaaaaacctcaaaattctcagaatcaaaataatggattcagattctcttcttcgtcgttctatatcttttcagctcccggacccggttatcgatttctctaaccaaaccctaaaaccaggaagctcaaagtgggatgaagtgaaaactgatgtccgtaaagctctagaggactacggttgtttcgaagcttcttttgacatatattgtctgtaaagcttaagaactctgttgttgaagccatggaagagcttttcgagttgccgattcagaccaaacagagaaacgtgtattcgcgatgctttcaagcggtaggtccccggccccgaggtcagccggtccacgtcgtcgatcgaggtgttccagccgcgcagcgacccgttcagcctcagcttgccgccggcgaaggggcgctcgtgcgccgcgctgccgatcacatagggcccgcccgccttgatgtaggtgtcggaggcgaacagcaccgcgccgctggcgtcccggcgcacccaaggcccgtccccaaagcccgcatagatggcgaggttctctcacacctccaacgccccctccagggtcttctcgccgtccttcttcgacgccga

SEQ ID NO: 16956 - DNA, 951 bp, Arabidopsis thaliana landsberg
tgcaaaatgtccattgtctagggatagttacaggggcgacgacaaaaagggaaataggagagaaaagaagaagtattacaagaagaagggcggcgatgcccatgtttgtcgggagtgggactccgacgagagctccaccgactcctccgacgagggcgccgcaaacatcaccatcaacaagggtcttctcttccccaacgtcggccacaagtgcctcatggcaaaggatggcaagaagaaggtaaaatctagagcctccactaaatatgcaatatctagtgatgaggataactctagtgatgatgaggataacttgctagctctttttgccaacttaaacatgcaacaaaaggaaaaattaaatgaattgataggagctattcatgagaaggatgaactcttggatagccaagaggacttccttattaaagaaaataagaagcatgttaaggttaaaaatgcttatgctctagaaattgagaaatgtcaaaaattatctagtgagctaagcacttgccatgaaacaatagacaaccttagaaatgaaaatgctaatttgttagctaaggttgattctcatgtttgcaatgtttcaatttccaaccctagagataataatgatgatttgcttgctaggattgaagaattgaacatttctcttgctagccttaggattgagaatgaaaaattgcttgctaaggctaaagattttgatgtttgcaatgctaccatttccgaccttagaactaagaatgatatcttgcatgctaaggttgtagaactaaaatcttgcaaaccctctacatctaccattgagcatgtttccatttgtactagatgtagagatgttaacattgatgctattcatgatcatatggctttaattaaacaacaaaataatcatatagcaaaattagatgccaaaattgccgagcataacttagaagtgat

SEQ ID NO: 16957 - DNA, 745 bp, Arabidopsis thaliana landsberg
tcctataatggtttaaggattacgtaggattgaacaaatatgcaaaattgtttctaaaatatagctattctattgaaaatttgatgaccaaatcaaatatatcactatgtcatctccactatcttgcagtcgtggatgcattcgtcattctgttctatacattatttcatttgacacgattttgtgactctgcatgttaccaattagtgatttgagccttggtacacttcaagaaatgttaggctttaatagcccaccttgatgatgggcctaaagggcccttaatatccatttggtgcaaaactaaactaaaagtgaaagacatttttagagaagattttttaaaataagacccaaaggtttattgttcttccattcggagaaaatgtgaattgttaatggagataagtttgttgttgtttttttaataataactcaggtgatcctatgaggtttccacggcccaaaaactattcttcgggttcggggaaaccatattaaattactcgaatcccagtagccaatattactcgaacacaagtggcggaaattactttcctttaccactggaccaaagcgacaaggagataagcttaccaaatagttacaatctatttgttgcggtgttgtttgatgagaattacgtaggatatcgtaattctttgtaacaaattaagtatatcattgtttagctttttcattagaaactgaaacattattcttgacacataaaaaaatgatttag

SEQ ID NO: 16958 - DNA, 1966 bp, Arabidopsis thaliana landsberg
ttgaaccttgcttgacttaaatgaagttaaaaatttgtagttaaaaaatagaaaaatttactaatttgaattcgattaatcacagtctagataatttgaaaaaatttaaaataaattttgaaaatactatatgtttattttttttaaaataatttacttaattgataagtgatattagattagttttttttatcttttttaaattttgaaaacctcacaattattaaattgaaagattcaaaatgcaatgttagtttttaaaagtttaatcacccaaacggataattgaatttttttctttgatatcagcaaacggataattgacccgaacgactaattcaggtcgtatacgggtacagtcaaataacccgacccgaaatgctcaacggatctgcacggacgttcgcatcgacgattcacggctttcgcgaatcgcatcacgagccttccttctctcctacgcctctttcatcaacccttctctgcgaatccaattctggtatttcacgattctctttcgactacgcccaatcgcaattccagccgtacgaattttatatattgattatgatcttgatccttaccttttcgtcgtttccttgatcgaatttatgttgatttatgctgcgaaatcaaaattatggatacagagtaattttgtatatatggatgtgtaggagctaaaattagcaaacaatacgtaaagtaattgaaatcgaaatcataaacgtttaaggaaagaggtttttactaagtctctgaataatctgattgatagcttgtggtcaatggatcagataaaagtttgtaaagaatgacaaagaaaatgagaagagtgggcaagtacgaggttggtcgcacaataggtgaaggaacctttgctaaggttaagtttgcgaggaacacagacactggtgataatgtagccatcaaaattatggctaagagtacaatacttaagaacagaatggttgatcaggtatgttctggattgttttttacatggaaactaaggttgttgcgtcaatggtatgatctttgatttcgtttaaagctcttttacagataaaaagagagatatctataatgaagattgttcgtcacccgaacatagtgaggttgtatgaggtatgtttgtttgtttccatgcatctgcgaaattttatctctgaagtgtttttgcatcattgttcttctgtcgttttttggtgattttcccgatgtaggtgttggcgagtccttcgaaaatatatatagttttggagtttgtgacaggaggagagctctttgatagaattgtaaggaatttccatacttgtagcgtccattagttaaaacctctctacttaattttttaatatatgaaatctttcatgcaggttcataaagggaggcttgaagaaagtgagtctcggaaatactttcaacagcttgtagatgccgttgctcattgtcactgcaagggtgtttaccaccgtgacctaaaggtaaagacgtgtttttgtttaccaatattcctcagaatatctcactgcgttgcaatccagacttgatatttttgtgtcgctatgttatgttatctagccagaaaatcttttactcgatacaaatggaaatctgaaggtttcggatttcggactcagtgcattgcctcaggaagtaagtgctcttatctctgcttcagcagtctgcttacgtggtcattaacttgttatatactcaaatcagggagtgatacttctgcgtaccacatgtggaactccgagctatgtagctccataggtacttagtggacagggttacgatggttcagcagctaatatttggtcttgcggggttattcttttcgttatataggctgcatacttacccttttctgagacggatcttccagggaaaaacaggaaagtaagtaacatatcgtccggggacaaatcataaattccacgtcatggcttttgtcaaa

SEQ ID NO: 16959 - DNA, 726 bp, Arabidopsis thaliana landsberg
acccatctagtttcctagaggcttcacgtcctaggtctatccttatcgtccttacatctatccaacttgatttctaagaaagttttaatttagaaaaggatggaattcatgacttattgacttctctgtaatggtattcgctccgataccagctgtggcggaaccacccgaattattctagcttaagtgcccaagtcgcacccttaaaggcagcaacacacttaaatcagaataacccgtcagtccctcagatctagtccgataaagccacttcccgggatcagtaactcactcgatggtgagtcatagagaaaatacaataaagcaggaaacctcaaatgaaagtactggagttattacatgaatcgaagcttttcatgtagactgaaacaaattcataatttaaattgcagcagatagtcgatcacgtcgaatgatgaggaatggggcaaggcctagcccactactcctcctgcttctcttctgctggagcaacatcccactcaaccgtccaacccggtggcatggtggaaggccaagtcacaccatcaaccatgtcctgtagcgtacctgcaaaaattgtgccacaagcaaggctgagtatactaatactcagctagacttacccggtgtgaggaatctctcctctacctctagaccatgcaactgtttagctgagggtttggtttccaaaagcactagctgaatctagaaatcaattttagc

SEQ ID NO: 16960 - DNA, 674 bp, Arabidopsis thaliana landsberg
cacattgcacacagtttcatcgacagaattgctcctcttacgagggaaaccctggaatatacttttcttcttctaaggatgcttgtggagatatccacgcgcctagaccaccacaagccgtactgcctcattcatcatcatcatcatcagaagaagatgaattgataagttggatagcagcatgtttaggttttgcacctggaatggtatttggtcttacgatgggatacataatgacttcacacaagcatgagtggttcatggatacttttggccgaagaaaaggccggagcacgagaactcgttagctctcaatcatcgatcacactctgttaagtaattattgttctgctaaatgaagttgttgtatacttttatttatcatcaagagagaaaacccatgacggatctaagttttatgtataacattttcattatggtcattaatcaattataacattcgcctatgtaaattcatatatttcgtttctagactaaatcagcattaaatgtaaataaaattaaacaaacattagaaaacgagaggcgtggccttcaccccctaagtgtaaactccggtattcctttttctaattttcaaatcttttgtctgatgaaaattttcgaaaactttcttctcattggtcatctccattttaagacaacgtacgttg

SEQ ID NO: 16961 - DNA, 1225 bp, Arabidopsis thaliana landsberg
tcttccaaatccttgctcaaaaaatgtctgtcgctgtaagttccatataaaccttatgcacccgtgacctgattaggctctctttatgagttttacttccacatttcaggctctgagacatgtgcgccaaattgctcaagagactagtggagaagtccagtatagtggtggacgccagcctgcagttttaaggactttcagccagagactctgccggtaatacatttccttgataagcttagttttattttctaaagcattgttctaattgcttttcttgaaattcaggggtttcaatgatgctgtaaatggttttgtcgatgatggatggtctccaatgagtagtgatggaggagaggatattacgatcatgattaactcttcctctgctaaatttgctggctcccaatacggtagctcatttcttccaagttttggaagtggtgtcctctgtgccaaagcttctatgctgttgcaggtgcctatatcatgttttgacacttgtgaatagacaaaagaaccgggttcttcaatttctgacatcattctcttttttatctgctcttgaagaatgttccaccccttgtattgattcggttcctgagagaacaccgagctgaatgggcagactatggtgtcgatgcctattctgctgcatctctcagagcaactccatatgctgttccatgcgtcagaaccggtgggttcccgagtaaccaagtcattcttcctctcgcacagacactcgaacatgaagaggtacaaagaatctcaagaacattttccttgttgtctgttcttttgccatgcctataatcctattttgtttacttgtttctcagtttctcgaagtggttagacttggaggtcatgcttactcacctgaagacatgggcttatcccgggatatgtatttactgcaggtttgctttatactaaagacactcagggattcttaaagatgagttattgaaattgaattcttggtttcttttttgcttttgtccagctttgtagcggcgttgatgaaaatgtggttggaggttgtgctcagcttgtctttgccccaatcgatgaatcatttgctgatgatgcacctttgcttccttctggtttccgtgtcataccactcgaccaaaaaacaaatccggtaaaaagaaaactgtttatgataagaaatttgatatcttgaaattgacacagtcctttttcttttattcctgta

SEQ ID NO: 16962 - DNA, 678 bp, Arabidopsis thaliana landsberg
ggtcttgagtcttcacagatgaaatgaattgaggctaaaaaaacaaagacttattttcttccatttttcttttttgtccatcgaaaattgaggctaaaaaaaaacaaagacttctttgtgatctgaaaagtaaacattcttggtaacacgtttccttcttaataattagtagttgtttttttcttttttatcacctcaaattaagtcccttaatgaactcatattttcaatactcgattgtataagtatctccagataggaaacgtagcaaactgtttttttggtgtgttaacaatactcgattacataagtatctccagattacaaactgtttttggttttgttaaataaaacgggttacccatttgtttttgttaaaccaattttgttataaaacataaatgggttcatattttaaaggcccgtgtaaaagcaaatcaaaaagaaaacgggtttgggctccaaaatattacacagtacccgtttaggcccgtaggattcaggcccgttttaacttccctggttaaattttaatgctcatgaaagtcttgacaaaattcccatgaccttagcaaaagcaatattatacgttaataccatttttcccttacaaattttcccttgcatttaatttggcaatttggtggtttttccgtctttgggtttaaaccaaaaaaa

SEQ ID NO: 16963 - DNA, 637 bp, Arabidopsis thaliana landsberg
aggacaaacttggagcggaacgatttattatgagttgaaaaacctaattttttttttctctcatttgctaaatctttcattccaaagaaacccatatggaaccaccacctcctcatttttctagagctaaacctccatgtcgtctgtccgatccggctcagccccacaagctttgccgacgggacgaccatcttatcctccactttccatctgctttacgtgcaaaggcaagcaattgaggtccagtgcatactattactattgtgctacttgcaatttggaattccacagaggttgtcacatctttctgccggtgataagaagctcttttcacccctctcaccctctcaccttcttctcctcagatcctaaatttgatgcatctataatacctaaatattggagagacagctccgctacagaagaatcttcagatgaatcgataaaccaactaactattgagtatcttggagacgttagtgatgatgacggcgaggacagccattctgatcacgatcttggtgctagtgaagatgacggcgaggacagccattctgatcacgatcttggtgctagtgacgatgacggcgaggacagccattctgatcacgatcttggtgctagagacgatgatggg

SEQ ID NO: 16964 - DNA, 588 bp, Arabidopsis thaliana landsberg
agatgggggattggtcttgtggattcccgagcctcctcgatctttagctgctataactgctcggaaattactttctcttcagctaagccaagcttagctttcttatgatttgcgtcggccgttgactcagtgacgggttcctgagcttgtgtgctgccatgaagcagattcgagcatttttctaatttccccagatggttttcacgccgttactcgtgggaaatttcaggcagagatgatatgtcgaagcgacggctcggaaatgatttaaccatgatgtgccgataattacgttgtaaacggtcggctggtcggtaaaagagaaatcgacgatttttgttacccctttagctcagactggtaacttgatggtcccgagagtcataatggtttccccagagaatccgagcacatgtcgcggagttggtacaatttgcgtcatgtcgaccttcatttctcgcagacttgtaagaaaaattatgtccagtgtgcttcccgtgtcgactaggactcgttcgacgttaaaatcaccgatggtcagtgtaatgactaaaggatcgttgtgtggacgatctaaaccgttggtat

SEQ ID NO: 16965 - DNA, 1317 bp, Arabidopsis thaliana landsberg
gacctcaaaaaaggttcttgttctccaaatgttgcatttggtaagtctttgtatcttaatggatgcatagtttccacgaccttgttttgcacgtcatgctctgcaaagtcaaaacaaaattatgttgaacataaggagtgtaagcataatgggtaataagctagtttttgtataccttccatgtcgatcaagtacttcttggcattaagtttgcttaaaacattgcagcaagctttatgtgtagcagtttgagtactgaagatgaaattgggaagcttcaactcctcagctacggctccacaaaaatacatgaactcgtcgtagatgatacatgcaatatcattgccttgttgtttcaacaactgccttatacagtccttgaagcttgcctccataattttgttgaactatgttagagacccgactggtccatttgcctcgagttcagaatctggtatggtgataaattgaaaaccagggaacttctgcgaagagtttactcgattgaattctccctgaggaactataattgagaatcccttcaagataagggcttggccgagttgcatcatcggagtgaaatgtcctagtaatggaagtggaaccaacactatccttctcttctctactcttttctccatttcttaacccctctctctactacactctctccctatctcatgttttatctcaatgcatagcatatctatatatatataggtgaatgtgatccatatatagaattattaaaatcccatttcgtgtagattcgaagatcttccaaagggtataaatataattcttaaatgccaactagtcacggctatgattaatacgttgtgttgcgtgagaaatcacatgaatatcagcaggaaatatgaggttgacacatcattttcgtgggaaagaagtttttaacacatgaatcacccaataactctcaaatcatggcgttgttctttttcatatgctgtcattttcaaggaattggccttgttatggtcaatatgaccttataattcttttgaaattgtacttaagtggttcagaaggtttcttaagagtttgtcaaaaatgatttcaagaactgggaagcttgtgttgtgcctctctacacaaggaaatccaaagataatcgggcatgtcaagagatttggatctttcttctgattccaatgaaaaagtcactgtgtttctaactttttcctcccataacagtattatgaacgtatgtaatcttaatataattaagtaaaatttcttcataacgacctctcctgatatttggcattctatttttgtgacatgtgttgtctc

SEQ ID NO: 16966 - DNA, 773 bp, Arabidopsis thaliana landsberg
  unsure (1)..(773): unsure at all n locations
tctttcactttatcaggttcagatggtctttcaaaatggaattagaagacccattagagcgagttttgtattcttccatagaagacagtgcagatttggacagtgaaacttctacatatactaagctgctagatgagaccgaacatgtgatgcaacttacggttgaagaatctcttccacttgtgactccaacaccgactactaattcagattgggatccagcaaaggctcctaaaatcaatttaaaaccacttccagcagggctaaggtacgcttttcttggtgaaaattttacttatcctgttattgtgaatgcttcttttaatcccgcagagctcacnnnnnnnnnnnnnnnnnnnnnnnnnnnnnnnnnagctcttggctattctcttaatgatattgcaggtatatctccggatgtatgcattcataggatccaccttgaggatgagtctaagtcttccgttgaacatcagagaagactgaatccgaatctgaaagaagtggttaagaaagagattatgaagctgttggaagcagggatcatctatccaatttcagatagcagttgggttagtcaagttcatgtagttcctaagaaaagaggagttacagtagtcaagaacgagaaagatgagttgattcctactcggacaatcacaggccatcggttgtgcatcgattacagaaagctgaatgttgctaccaggaaagaccatttccccttaccatttatcgatcagatttggaaaagttgcaaatcataagtacta

SEQ ID NO: 16967 - DNA, 1236 bp, Arabidopsis thaliana landsberg
  unsure (1)..(1236): unsure at all n locations
aaagtactaaacatgacgtgtgaaagacgtagatttcgcctcatttattcatctgatcttcttccactgtcttcttcaacgtgcacacgtgtctgtgtatatatatcttgaatgtctgaatctggaagaacaattcaagaccgcgtacaaaactaaatccaatccagacaagaaaccctcgttgttttgtctgatcacataacacatttcagtttatagatctgcagaatttgttttttgtatttttgttctgttttcttttgattttcttcttcatcctgtaaaacctagaattttgtttcttcaaccaaaaatgaacagagaagtctctgagagaattcatattttgttcttccccttcatggctcaaggccacatgattccaattttggacatggccaagcttttctcgaggagaggagccaagtcaacccttctcacaaccccaatcaacgctaagatcttcgagaaacctattgaagcattcaaaaatcaaaaccctgatctcgaaatcggaatcaagatcttcaatttcccttgtgtagagcttggattgcctgaaggatgcgagaacgctgactttatcaactcataccaaaaatctgactcatttgacttgttcttgaagtttcttttctctaccaagtatatgaaacagcagttggagagtttcattgaaacaaccaaaccgagtgctcttgtagccgatatgttcttcccttgggcaacagaatccgcggagaagatcggtgttccaagacttgtgttccacggcacatcatcctttgccttgtgttgttcgtataacatgaggattcataagccacacaagaaagtcgcttcgagttctactccatttgtaatccctggtctccctggagacatagttattacagaagaccaagccaatgtcaccaacgaagaaactccattcggaaagttttggaaagaagtcagggaatcagagaccagtagctttggtgttttggtgaatagcttctacgagctggaatcatcttatgctgatttttaccgtagttttgtggcgaaaaaagcgtggcatataggtccactttcactatccaacagagggattgcagagaaagccggaagagggaaaaaggcaaacattgatgagcaagaatgcctcaaatggcttgactctaagacacctggctcagtagtttacttgtcctttggtagcggaccggcttaccnaacgacagctgttagaga

SEQ ID NO: 16968 - DNA, 3600 bp, Arabidopsis thaliana landsberg
attatcttatagctcaaattactttcagtttttacatatagaataactctcacactcgtataattttattaaatttaaattcaaactaggacacttatctaatctagtgttatctgaattcatagagtgttagaagaattacaaaacgttttttaatcaataacatcatttttgggaataatatctttatcaaatataaacctacccaaagaaaagaaaaaatcaccaacaaatatagtacgaattaagattcataaacgtgttccggaatccaaaagatcgaaagttttggataagtaagatattcacaaatattcatttttaaaattcaaaatattcgataaatacaagcgatcttccggaacagatctttaatacgataaacaattaatatattttagaaataagatcggtggcaattaataattatgcgcaagcgaagacgtttcgtgataactgtgaacattagaggttaagtgacgacaagtgatcgagagaaagagagagccaaaaggggaaactacaaaaatggcgaaaccggaagaagtatcagtcccgatcttcacatctcttgagcctgtctacggcgaaggatctctgctccaagaagctacacaacgattcgatgttttgaaggccaatttcaacgatgtcttcggtgcttctccccaactcttcgctcgctctcctggtaaataatctcgggtttttgaatttttgcaaaaattggaatttcgttgactttgagatgaattggtttctaattattgtatcgatgtctgcaattttggtatttggatgatgacatcagatgatcttctgtttggaattgttggatatgattgtgaaaataaatggtgaaggtgtttgttatattttgtgtgtaggaagagtgaatctgataggagagcacattgactatgaaggatactcagtgttgccgatggctattcgtcaggatacaattatagcgattcggaaatgtgaggatcaaaagcagcttcggattgcaaatgttaatgataagtacactatgtgtacatatcctgctgatcctgaccaggtaatgtatctgtgttgcattctcctgtttgtcacagacaatatagttgagatcctggagtcctagaatactactggcttactttacttatcgtacgtgttaattttgcaggaaattgacttgaagaatcacaaatgggggcattacttcatatgcgcgtaaggggtttcgtttggagctttggtgtctatcaggaactgagagatctcaatattttttgtccctgagttgcctttgattcattacaggtacaaaggatttcatgagtatgcaaagtcaaaaggtgtgaatcttggttcaccagttggacttgatgtgcttgttgatggaattgttcctacaggtatatgcatcatgatacttacggaacagaaaaacttatcatttcaaataaagtttatcagtttactttcaagctgtaactggagtgtctcgatttttaggttctgggttgtcaagttctgctgcatttgtttgctcagcaacaattgctattatggctgtctttggtcataactttgagaaggtattattaagcaatcgtgctctgtgaaaggattttcataaatctcttgttgattattgaaatttccaagttctctctgcctttcagaaagaacttgcacagcttacatgtgaatgtgaaagacacattggaacacaatctggtgggatggaccaggtcataattttttctcaaataatccatgatttatcaccttcacacataattatctcttatttggattgatcaatttttaatcatttcaataggcaatctctataatggctaaaactggatttgctgagcttattgacttcaacccagtccgcgcaactgatgtgaaactccctgatggagggagttttgtaattgcacattctcttgcagagtcgcagaaggcggtcacggctgctaagaattacaataacagggtcgttgaatgtcgacttgcttcggttagtcattgcataactttcctgctgcaatatcttaactctgtttggtagttgcgtatgattctctctttaccatgtggctttgtagatcatacttggtgttaagctcggaatggaaccaaaagaagcaatatcaaaagttaagactctttctgatgtggagggattatgtgtgtcattcgctggtgatcgggggtcatctgatcctcttcttgctgttaaggtacgcatcaattattcattgccaaaactggcggtttgatgttaaattatctctctgtgtatcagttgatctctaatgttttggaagatatttagggttatatgcgttcttgtctatgcttcaggaatatctgaaagaagaaccatacacggctgaggagattgagaaaatcctagaggagaaattaccatcaatcgtgaacaatgatccaacatctttggctgtactcaatgctgccacgcatttcaaattgcatcaggtaaagtgtacaactctgtggaatattgtgttttttcttaccctgactcttaataataatggtctgctgcttacggtcatcaacagagagctgcacacgtttattccgaagcccggagggttcatggtttcaaggacacagttaattcaaacttaaggtgagaccgattttcgacatggaacttctgattaaatctttacaggaaccttgatacttttgaaatataagctgtgtgcagtgacgaagagaagttaaagaaacttggtgatctcatgaatgaaagccattacagctgcagtgtcctatacgagtgcaggtgcataaatttaagatccaatgttaagagtgaaactgtttaatgtgaaaaggattgattttgaatttggtgaaatcgtgcagttgccccgagctagaagaacttgttcaagtttgcaaggagaatggagcacttggagcaagactgaccggagctggatggggcggttgcgctgtggccttggtcaaggaatttgacgttactcaattcattccagcagtcaaggtaatagatagcttccttatggttggttgtataggacaaaaacgttattgctacatattttttttgagtaaaagaaatggattggtggtatttactcaggagaaatattacaaaaagagaatagagaaaggagtggtaaaggaagaagatatggagttttacctctttgcctccaagccttcaagtggtgctgccatcttcaacctctaaacacatctctctccctctttattaattttatttcaaatctgaattgtttgcagcaattgtgcccattgaattcccaacttgctttcgtattaatatttctgaataatatgtaggagttgacgacgataataaaatgaagtttcattcacaactctttttcagagttttatactataactagcaaagtacacatttccaattttaatataattctctaaattttctgattttccctgttaaatccacctgatacacattaatttagtaatttacctaatcccattatttctctaagttgtaaactaatagagagaatataacgggatcaatgtagatacgccgcc

SEQ ID NO: 16969 - DNA, 1524 bp, Arabidopsis thaliana landsberg
cggattggtcttccattggagcaacgttgtcacgctaagaaaaaacgaaaaaaattctcagaattataactcaaaacaatcattgccttgataacaatttgtaaaaaaagttaggtgaagtcatcaacgcaatcatggcacaaaaagacaacagataagacagtttaaaaagactacaatcaaaaaaaaagaaaaaagaaaaactcacgccagggttatcttcggattccattatatcaaaagtagcaggcccctctctaacattgttagcagcctgcacaacaatagaagataataattttcaactatttaaaataacaactaaaagatgagttaactgctacaaaaaaactaactgatgggtttggactcccactggctcaacattgtcgcgctaataaccacaaataacacccgcttgatattatacatatattgtgccagttatgaactatttagaataacacctaagtagtaatttatcgggaaaaaaaacccacctgcacgttcgggctcaagccgccagcagatcgaacatcatcttccactagctctacaatatcgcgcttaaaacccaagaacaaaaataaactgaggacatatccagcaaaaaaatttcatatgctgtaagtgacttcccaaaattacctccgacacgttgagccaaacaccacttggaaccttgtctgtgtagtaagacaaaatctcatccacactagactgaacattagaatttctttgacggccattagaaccaacattagaagatggccggcggagagcatcaaacccaaaatcatcattgggctcattccgacccacctcttcaggattagaaacacccccactagccggatctttggaaagtccaccttcaataactgtttttaatgaaccaatctgtaagcgcaacaatgattaatttcccctgcgctttaagctttttgtccaacatacgggaaatagaatccatagaaacggtccctgaactactatcttcctctgggacgggtctttgatgtttggtcctgaccctaccagtgttctttgatggtttgcctttcctgttcgaccaccatttgacttaacacaccttttttgttttttggaagccaattgcatctgtgatgggaaacatccaccaccaaacatatcattcttgaaaataagaccctgctcagccaacattaaaatattatcgactctctcatcttcatcgtcttcagaccacgacaaatcttgctcagggtccagatcaaggtcagggcaaataatagtagcaacacgaacctgcaatagtgaatcccgataacaaaatcagtcagataacttgattaatggtgagcacgcttagtggttaactatgaagatgtcaccagaataattgctaacagataacaaaataaccgacaatactattatcaagttttactaataaaccattgtatggtctcgcgtgttgaaaccaactactgtgttaaacaataacaagtttaatgaataatagtattccgagcatttagc

SEQ ID NO: 16970 - DNA, 994 bp, Arabidopsis thaliana landsberg
  unsure (1)..(994): unsure at all n locations
ttccttcattatagattatatctttctagaaccagttacaagtaaaatataataataatgtttagttaataataccaatagttttgatacagtaaaatatgaaaactatagtcaaacaaaaaacaaatatgaatttaagcaaaaaatattataaatatattataaagaatttttttacatataatatatatatatatagttgatatatttatataattattaatttatgatattgatgagatttacataggactttcaaaaaaattattatcttattaatttatcgattaatgtcattatttacactgatcccaactcgggaccggaataatttattaatttatagagtattaatttatagaggttatactgtatttcattttttctaataagatttttattttatttttaacaattaacaattaacaatttcatgagttagaagtactttttttttattatatgtgtgaagttagaaaacaaaacaaattcattacttatattattgcatttaaattaatttccataatttttataaattatattttaacatttatatttttttataattattttggtacatatgttttgtttattttactactcaaaccgcttttaaatgttattccgttcacaaacatatttaaaccgcatgatacatttaattcgcattttcagcttaatccgcacaatacgcttgatatcactgaaccccttgatctgttgaccgttctctattcaaactatatgtattgttactgtgcatgttgtctcaaatttttttgtatgacattgatggataacttatttttatgttgggatgcaaacccccattatttgacaaaccaagttttgataatcaacaacttggtattaaattttttgaaaataaataaataggagnaaatttttttgggggntntttcggaaccccctaaaaccaaaaaggtgttggaaaaaaaaaatattttattaaaaattttttctttttttt

SEQ ID NO: 16971 - DNA, 946 bp, Arabidopsis thaliana landsberg
aagcatgtttttgctgtggtatagggatgggatctcgcaggagcctctaggggaggacattcatatacgcagcaatatgttgtacaaaaataaaaccaagacaaaacagaacattaactcagccgtaaccaagtaaaactcagccttaacacctaaatacatcagcctttatctactttaactcaggcagaatgacacgataactcagccataacgttagacaaactcagacagaatataacaataacttacatcgtaaatcaaccattatctactttaactcagacaaaacgacacgataactcaaccataacattagacaaactcagatagaatataacaataacttacatcatcacctagccattcatatttggggtctggccagttctttcttttggccatgataacagagtagaaatccacctcgtctatcccactttccaacgattttttgctaacatatagtaaagaaagttaatatgcacaaatactgtaagcatgtcgtatttaacaacttattaaggtataaagggtcataccattcgggacttgtcaaataagccttaagcttctgcagtttggctggatcaaccggtgccagaggatcatagattgctcgtgaaggcagacaaccctttctcatgcagctcagcccgttgtctccaataactggaaaaatgtgagtgggcatagcttcggggttaatcaatgagctcccatccggggccagcttaacagtttgagccgaatttcttttacactctttagcctctcgtttcctcctcatcttcatcagactcaggaagcatttcattatactcggatataaccttatccgtgacatcaactacatccgaatcttcctcagctttttccttagcttcctcagctttttacttagcttcctcagatggttttgggttctttattgaaatctttggca

SEQ ID NO: 16972 - DNA, 3724 bp, Arabidopsis thaliana landsberg
gatgtgacaagaatcagtctatttgattccttaaactcgtctgatacacgtgttctatggtgctgaggttttctagcatgaatctccctaacgttcaatttcatttcccggagtagagtatacatcagtgatgttaccataccggttgagcaaaagactattatctgcgagaatgaaattggatagttatgagaattaccaaggtaagaaagaaaaaaacaattgtttaagaggatttgttttaccttataatcaggcgtgttgttgatgtgctcttttagaagatgaggtactaagtggaaatgagattcgtgtggagcaacaatacaagattgcctcacctgaaaccaaagcaaaaaaaaatcaataaccagattcaagtaacaagcttttgagacaaaaagaagagcttcagattttaccttatcatgagtctctacacaaccgagcccgattgtgtcgatataagagtgatccctttttaaaacaagctgtgagactcgacggacctgaatttaatctacattttagacgtttgtgtccgcattggattttgtgataaaggtaagaatatatgaagttagctatatagcaattgtacctcttttggaatggttgcggaaaagagaagagattgtctctgacgaggcaaacaatctatgatcttttcaacatctctcctgaatcctaagtctagcaatatatcagcctcgtcaactataaacaatttaagggccatcaaacgcgatgttaagccagacttattctctatatgatccaagagtcttcccggagttgctattagtatctgcaacaaggtacggaaacaaaagaagattcaccacaacaactagaaaatataaacaattcctgtaaaacagggaatcacggttggtcaaacctggcatggctcagattctaggcgttgttgatcaagtttgaagcgcgtaccaccaattagagtctgaacaccaatcccgtcatggaatttgagtagagccttgccctctgcagcgatctggcttgcaagttctcttgtgggacagaggataagagcaaaaatcggagcaactttgttaacgcccttaccgctgttcatagctttcagaactgtttcaattgcaggaagctttttttcaatcttacaacgttatcttaagaaacaacaaaagctaaggcataatctcaggataagggattgtaaaataccaaaaacgccatgctctttcccgtcccagttttggctttgactaatgcatctttacctgctttatataaaagataatacgttgtcaaatgctaaccatttgagccaaaagaagaaactaaaaccagcagagtaatcagaaaagaactagaagaatacataccgtctaggcactcagagagagtggcatcctgtactctagtcatcttaagaatgccagacgcagaaagtgcctttagcgtcaaaggagatatacaagactcatcaaatctgcaaccattaacagagttcatcaagatttaaacttgacaaatcaaattcctttacacagccagtttaaaatacctttttgcactgtaaatcgagtcatgaggctcttgcttctcctccattacattatccacagattttcttttactgagatcttctctaactgtattaatatccaaaggaggataaagctcttcatccgtgacattacgattcactcttttcgtcagcttgatatcgtggtttcctaacgacgcactgcttcctgttttcctcaaatccatccaacctatcatctttccctcattgccttcttcatctgaatcctcttcagttgaactatcgttcttcctaaacttccttcttccaaacaaacctttgttccttataactccaacaacactcgtcgagctcttcactttctccttggtaccagaaaatttagaagaaaaaggactcaaagtatctaactttttagcatcaacgtcatctccttcatcacaagaactctcatttctcttaaatctactcatactcgaaaaacctctcctactactataaaaacacgatgtttacccattgaatcacatgtcgcagaaactaatctcctcacatcaataggcgtagaatcaatcgaatccgaacatgatctcgacccttgatcaaatttcttcaccggaccatcgttatcgttccacaaatcatctgcaccagctttcataaaccgatcagccaaggttttgatatgttctttcgggctcattggtccatgactctgcttcgatttcgtcgttttctcaccggaatctggatgaccccacattttagctcggatctcggtccgaattcgagcttcgtaaagctgtttctcttgatccaagagcttgttctctttctctcttgctttcttctcgtgcatacgtttccattgccacttgtttagtcctccagggaaagttctcggaccaccacccatgttccgagagaatattcggttccataaggacctttcagaagtggtgcgcttactaagccctgaaatatccagtgacacaaagataaagataacatgacaaaaagacactttcacgaaactgagacacagtatcgaacacataacattccttagatgtatgtatgagataatggccatgtgataaaagtgagaaacagaggctatgaaggaacaaaagtaagagcctaatcaaaattgcttgcatcaaagcccaatgttaagcagtatttcaaaaactaattgatactaggaagtagtttacaaaaacagaagccttgaagatgctagaaacagcccacatagacccttgaaacaagacattgatccggtacacatagcatcacgtaagcatccaaattttaaccgaacaaaccgaattctgaagtaattgagtgcaaagaaactctctttaactcttacaatacatttctagagttaagcaatcgaaagcagacatttttctggaaatcagaaccaaaatgaataattgaacttatcaaattcttaaacacatatagttcatcttagacgaacctgataatctaaatctgaattcataaaggaaggatctttaaaaagcatcaaacatatactcgaacaacgataaaccctcgaaagaaccagaaattaactgagagatgaaaagggtttgttaccggagtggaagagattggtgctaggttcagcctgacgacgagccggtggagacagaaaagagaaccttgaagcatttgaacagaacagtcgtctcaaaccaaccggagacgaagctacttccgtcacagctctagatatcgctggaagtctcatagccatcgccatagattcaatggattgatttgatcggtcgtattgattcttcttcggggggaaaaaaggttttaactttgaaaagctaaaaccctaaaccaaagagcagagaacaaacaaaatcgatttgatgcgaaaacgagtaatttactagagtgagaagatgacctaaaaaaaaaaaatactgacataaaatgacggatatacccttgtattacttcaaaatttcggaatggatggactagtgatagaaactttacaattctgatattcgtaattaatggaattcgccaatgtgcagctccaattttcgattttttttcattggcacgtagaaacgttaatgagtctttaaatggttaccgaattgttttttggactatcacactaaatacttcaatattttatgaaatttgacataa

SEQ ID NO: 16973 - DNA, 1025 bp, Arabidopsis thaliana landsberg
  unsure (1)..(1025): unsure at all n locations
gatgcagaacagaaaatacttgtctatgagtttgttcctaacaaaagcctctactacttccttttcggtataacaaatcatcactcattcctctaaagaaaatatcggttttcggattaatcagattgttttctttttgtttgtagataatgagaagagaagagttttggattggcaaagaaggtacaagatcattgaagggatagctcgaggaatactatatttacatcgagattctcggctaacgatcattcaccgtgaccttaaagctagtaacatactcttagatgcagacatgcatccgaagatctcagatttcggtatggcgaggatctttggtgttgatcaaactcaagccaatactaaaagaatcggtggtacatagtaagttgtttcttcctcttggtgatcttgacacttcaatgagttattcaatttcccattatgattaaacaagttctctctttagtggttatatgtctcccgagtatgcaatgcatggtcagtactcaatgtaatcggatgtctatagcttcggagtgttagttcttgagattataagtggcaagaagaatagcagcttctaccaaacagatggtgcacatgacttggtctcatatgtaagttttaaacctatcaagttccatatttacctgaacatagttgcaagtgttgattgattgaataatattctaggcttgggggctttggagtaacgggcgaccattagaactcgtggatccagctattgtagaaaattgccaaaggaatgaagttgttcgatgtgtccatatcggtcttttatgtgttcaagaagatcctgctgagcgtccgacgttgtcaaccattgttctgatgctcactagtaacactgtgactttacccgtgccacggcaacccggtcttttctttcagagtagaattggaaaagacccgcttgatacagatacaacgagcaaatctcttctagggtctgttgacgatgcatccatcacagatatacatnctcgatgatgatgagtttt

SEQ ID NO: 16974 - DNA, 1595 bp, Arabidopsis thaliana landsberg
aaatgttaaaaatgacaaaaagaaaaaaaaatcaatgttacaaattttattagcagcatgggttatcaaaattatatattttaaataatttctgtatattaattattttgtctctttactaacattaaaaacctgtttttcattttttaaatagttctcgtacaacaaagataaaagttagaaatgaccaaaaagagataaacgttacagtttctctggtttttctttttaaaaaattttagtaatacgttacattgtgtacacaataataaagttgcaaatggcaaaaattccaagacaaaggttcagaatagtgactgctttctgcggtgcgggagaaatacggtgcggttcaaatagtaacaaaaatacataaatacgtatatatatgtagagattttgatattgttacagcattgttgcggtgcggttttgggtgcggttttggtcaccattcacatcccaaaaaataataagataaagattacaatttttatattaatttatttttccttctttttttagtagttaaatacttaaatcatttccgtagattaaagaatcaattttgtgtgtgtccgtagataaaacatgtgaccagatttcttacttaaaaaggttagaagatgtaacaaagtaaaactcgtgcggtgtccttgtccttatataacacatctatgagactatgactcatgggatattgtaccataatatctctctctctttctctcgcaatcgctttcacttcagatttcaaaccaatcatggcagcatcaaagctcctcgtatccgacatggcctctgtcgttgatcacgtcccttcaaactacgtacgaccagtctctgaccgtccaaacatgtccgacgttgaaagctccggcgactctattcctctaatcgatctccacgacctccatggacctaatcgatccggcatgagtcaatcagtttgctcatgcatgctcttcttatggcttcttccaggtaagtgcacaaacaatccactttcaatctctcctatactctgtttcttgagtaacactcttatcttttcttgattttacactagggttttgcaaaactgttttttttttctttcatgattttacactagatttgtttcctctgttccagatcaagaaccatggagtaccagaagaaacgatcaaaaaaatgatgaatgcggcaagagagtttttccggcaatcagagagcgaaagagtgaagcattactcagcagataccaaaaagacaacgagactctccacaagtttcaacgtttccaaagagaaagtctttaactggagagacttccttcgactccattgctaccctatcgaagatttcatcaatgaatggccctcaacaccgatctctttcagagaattcacagtcgaatacgctacaagcgttagagccttggttctgacacttcttgaggcaatctcagagagcttaggtcttgcgaaagaccgtgtaagcaatacaataggcaaacatggtcaacacatggctaataactactatccccggtgtcctcaaccagagctaacttacggactttcggggcataaagatgcaaacttggatcactg

SEQ ID NO: 16975 - DNA, 2455 bp, Arabidopsis thaliana landsberg
  unsure (1)..(2455): unsure at all n locations
aaaaagtatgttttctacaacttgaacaagtctcttttgaagtgtcccgaattggtttcagatgttgacatttcgaaggtgtgtaaagaggatagagctgtattcaccactaggcagcaagagttaggccaaactgtgaaaaaaaacaaaggagagaagggtaagagtaattctcaaaggagtggtgttaagcaggtttggcaaagtggaggcgtttatacattggatcagtttgaagctaagtcgaaagctttctacaaaacccaattaggaacggttaaggaactggcaccagttgtcattgaggcattgttctggaaagcggctttagagaagcctatatatatagagtatgctaatgacgtgcctggctctgctttcggtgagccagaggatcatttcaggcatttccggcagaggaagaggaggggcaggggattttatcagaggaagacagaaaataatgatccatcaggtaagaacggtgaaaagtcatcgcctgaggtagaaaaggcaccccttgcttctacaagtttatcatctcaggattcgtccaagcagaagaacatggatattgttgatgaaatggaaggtactgcaggctggaagctctccaacagttcgtggaaccttcagatgattgcacgttcacctggttctgttacacgtttcatgccagatgacattcctggtgttacatctcccatggtttatatcggtatgttgttcagttggtttgcctggcacgttgaggatcatgagcttcacagtatgaattatcttcacactggctcaccaaagacttggtacgctgtcccttgtgattatgcgcttgactttgaagaggttatccgcaaaaattcttatggcaggaacattgaccaactgggtacgttctttttgaaaactactgctaaagatgatatactgtttctgtatttatagagatatgttgttattataatgcatgtgaaaaatgaggtttcctagaatgattaccgcattgacgttttctttattagcataattttcctactttgcaaatgaaaatatggctaacattgaccatggtatgaagagagtttattaattgtggttaattgtcgtaggtcttattgcttttgcgctatgatagatagaagagattgcaatactcttaggaaaagcattgtcctgtttctcattaactcttctctgctcgttgttactgtcagctgctctcacccaactaggcgaaaagacaactcttgtatcacctgagatgatagttgcatctggcattccctgctgtaggtaggccttttatttcatttaaactttcacttctgttatgtggagatatgaggcagtgttttcttataactacttccattctctgctatatctatgtttatttatgtttgtttgcctacgtaggttggtacaaaatcctggtgaatttgttgtgacttttccgaggtcttatcatgtaggattcagccacggtaaagtgccttttttttcaaacatttctttcaagtcttagtaattctgttcattccatttgcattctacaaagtggttgagaaaatgtgagaaattgaataaagctgtggagaaaaagggtgtttatcgacatagcatgaggtgaggattgatcttccaatcagaagaatgaagaatcatatttctattgggtagttatttcaggcgcatagtaaaaaaagtggatagtttggcttaggttaggaatacgaattacaaacttttcggaatccataactaagcgggtttaatataacttttcctaggttttaactgtggggaagccgctaattttggaaccccacagtggctcaacgtagcaaaggaagctgctgtgcgtcgggcagccatgaattatctacccatgctgtcccatcagcagctgctatatctcttgactatgtcctttgtttcaaggcaggttaccatggtctctttgtcatataacctgtacgttttgatggaccatgtcaatgctcatattcttgtaattattacattttccagagtgccacgatcattgctaccaggtggtcgtagctcccgactaagagatcggcagagagaagaaagagagttccttgtgaaaagagcttttgtagaagatatattgaacgaaaacaagaatttatctgttcttcttcgagaaccaggctctcgtttggtgatgtgggaccctgatttacttccgcgtcatagcgcactggctcttgcagctgctggagttgctggtgcttctgctgtttcacctccagcagtggcaaaaaaagaacttgaggagggtcattctgnnnnnnnnnnnnnnnnnnnnnnnnnnnnnnnnnnggaattgagcttgttcatggacaagctgacactgatgtatactacgacgatgatgatggtcaaaattaacgatttccaagttgatactggaaccttgccatgtgtg

SEQ ID NO: 16976 - DNA, 688 bp, Arabidopsis thaliana landsberg
tcgatctgcacgagtaagagttgggtccattgttgttccacactcctattagacctccaggaacagcaaactgaagctcgttctgttccgcgtagagtgaaatgatgcgagagtaaattggagtgcattttgagttgccacgctcgtctttggtaacgataccaggtcggatttcgattaattggttgactctcaaaacaccctacaatatacatgtagttaagagatactgattacaccatataaagcttgatgtacttaagaggcacaacaagagaaagggagagagagagaatagatacccgtaggatacttccacctgcaactccacctttgatctcatcaacctcataaccaggtttgttgacatcaaaagaccgaatcactatcatatttgggggtgacacaaaattcctctcagggattgggatcttcttgacaatgtactcgcacaccacatcaatgttgtatttcagttgtgctgagacagggacgatcggagcagcatcagcaacagtgttctgcaacaggatgtgaaagaaattttagaaccaagttcttcaatacttagcttaaccaagtgacgaaatgagaatgctacagcagatccttaaaaaataagccaccctaaccattataaatttctgaattgcatcatgctgattaatggcaacattctcttgaataa

SEQ ID NO: 16977 - DNA, 1697 bp, Arabidopsis thaliana landsberg
acccataaaatcttgtgcaattctttcaaatcagaattaaccatagagaaaaaaggtaacatatatataatcattcgaatttgcagagtgattaactaaaaaacaatagaagatggaggagacgaagcagtcattgatagcatcgttgccgtcggcaccaagaaaaccaaagtcgaaagtagagagagttgtgaggaaaacgttcaaaggaacagctcatctatcaaatctgctcccaaccggttctgtaatgagttttcaaataatgtgtccggtcctaacccatcaaggtcagtgtcccaccatcaccagtcgctggctcacctgcttcctcgtctccttatgcgccatctcttgcttcctcttctcctttaccgactccattagagacccaaacggcaaggtatatacatacatatctctgtcacattttccgctattttgtaccattcataacaacttgttgacataagcaccaaacttaatgttgcaggttaggtacggattagcaacgtggagtgggctattagtgatggatggatcgattagtttaacggaggaggagagggaaaagtataagctcaagattcttgattttattcacgcaatcatgtcaatgctcgtcttcttcgcagtctccatgtttgatcagaacgtaacccgttgtttattccccgttccttccgaggaaaccaaggagattcttaccagtttaccttttgtcatcggcgtcatttgtggtgccttcttcctagcgttccctacacgccgtcatggcatcggatctccccttaccaaagaataatttcatactctagacaagaactgaaaaacttttgtataacaaaaagatttgtgatcttcaatttttgtttatggaggacatgtaccaaatcttgaaaaaactattctttaaaaagaagacttgtttaacaacacgaaatttaatgaagagggagataattccctataaattgtatattaccaaatttatcccaatctccacacatcacaagacagagatgctttaatcatcacccaataagcttcttaaacccagctttctgttccgcagttaatctcgctggaaacttgatattgaacttgatccttaagttccctttctttgtctgatctttctggagtggcattccctctttaggaaccacctcttcatactctggatggatcacatttgtgatcgggattgtaagtgtacggccatcaagggtcgctatgtttgcggtgtagcctgttaaggcatcagctagtgagactttctgtgtgacaatcaggtcgttgccctcacgggtaaacactggatggggtttctcgtcaatgatgaagactagatccgctggaatcacacctggatgctcattgcctttctctgggaatgtgatctttgtgcctttcttccacccgggtttcactccaatcgttagaatctcttccacttgcattgccttactgcatttaccagaagacagatattagatattgttaagacaacaactagggtcagctcaaatcaacaattaaccatatggaagctggggaatgttgcagaatctaaaagcttgaaactttgtttcatatatgttcatcatacttgggacttgggaggttgtatatttctaaaaccatgctctatgttgactagtagataagcctaataacaaaatggtataagtgtg

SEQ ID NO: 16978 - DNA, 665 bp, Arabidopsis thaliana landsberg
tatatgggtagatctatatatgggccaatagttaagttatgtaatatatcatttttttggttaacgaaaatccatgtcatttgtaaatggtccttctcatttaaccgtattttggataatccaattggggtttttatattttgagttagaatcagacgtgcataaagtctgcgctgtttttttttttttgaatacctgaaggttcggggtcaaagcccgtaatccccccaggcccgaaaccatatcatgtaatattattttcgtcccaagcgtcactcgagccgacgacctctaagtttcgcctaaggtctttaccaattgagctaacgacctctaaccttcgcttcgttttttgactgtagtgtttttttgctttttgattttgtttcctggtgagtgcctaattctttgtttatctgttaatttcgttaggggcaatttttcgtttttggtgtgggtattttgcatcaattggagtgagtagaaggagaggattgattgatttggtgttccaattctaccaaccggaaaggattagaagcgatgatgtatcttcagaccaactattacattggttttgaaagaataagtatgtcttctgtttgctaatttgaaattgtcattaattcagactttatatctattttaaccgtttggtaatatcg

SEQ ID NO: 16979 - DNA, 568 bp, Arabidopsis thaliana landsberg
tagtaactagaggatcccctaaattaaaccactcacttaattgaagggcattaatttggacactacgtttagcataaagtaaagtcatatttcatgtttaatcattataagcagatgaagataaattaaaaggattgctcgcgcggtgagacgccaataacactttaaattgaattaagaaatcaacgactcgtcgcgcgacagagcgcacaacgagacacttgcattaattataaagagacgttaagcgtcgcgcaacgaaacgcaagacgacatacgtcatccgaactgaatttaaagtggaacgtcgcgcgactggacacgcgacgtcacacattaaacaacctgaaattaaaatggatcgtcgcgcgacgaagctcgcgacgcagcacattaatagaatataaaattaaacaaattcgtcgcgcgacacattacgtcgactaaatagattaaagtagatgacaacgagatgaagtgcagtacgatgacagtcgtacgcgcgagagacgctacgtgtgcggtttgccgcgtaatcgtgcaggtacgcgtggcgctaggctgccga

SEQ ID NO: 16980 - DNA, 677 bp, Arabidopsis thaliana landsberg
accttcgttttctcttggggtgaagctacaataacacttgaagacgttatggtgctttcaggtttctctgttttgtgttcacccgcttttgctactctcgacagctcaggaaagaagattatggagaggctaaagaacgcatggcagacgattaaacgagaaggtaaagtcaatctgctaacgcaagttgcatggatggacaggttcatgaactgtggtggtgagcttgagcatgttgccttcctcgtcttgtggcttggctatttcgtgttgccatcacgcttccatcatctctgtgaaactatttttcctattgctgttaatctttcaagtggtactaggattgctcttgctcctgctgttcttgctcacttgtatgcagacctaagtctcttgaaaacccacatcagcaaatctccgcctagggtcgaaattagattgagtgccttgtttatgttggttcaagtttggacatgggagagatttagggaactacaaccaaaacctaattcgttgctagcaggtaagccaagagtggctatttggaataagctgaaacagcaaaccagcaacgtgagacagattctcgacaactcgaaaatcgacagttttgagtggcgttcatacacaagaagggtgacaaactggaaattttctcagtttatcccgagaaagcg

SEQ ID NO: 16981 - DNA, 822 bp, Arabidopsis thaliana landsberg
actggaaggattggaaaatgggctgcagagctcaatgaattttgtattgaatatgttcatagatcttcgattcagtcacaggcgctggcagactttattgctgattggacgccagggactcaggaggaggaaacgaataaagacaacgaagcctggacagtgttttgtgatggatcttggggaaccttcggagcaggagcggctgctgtgttggtttcaccttccaaagtcaaaatttgttatgcggcaaagcttgattttaattgcacaaataacattgctgagtacgaagccctgcttctgggtcttcggaagctaaaagcaatgggaatcagaagggccatacttaaaactgattcccagattgtttcgggtcatattgacaagagttgcaaggctaaagatccgaagcttgaaaaatatctggatatggttcgaagagttgaagcttccttcgaaggattttctgtcaaaaatatccctcgaggacaaaatgagcatgctgatttgctagctaagtcagcagcacaggggcttcccttaccttcggatgtgttcttcgaaacaataaaagcacttcggtggaacttcttgaaagagcagtcctcaatatatctcctgtttatagcgaagattggagaactgagatcatctcttacctacagggtaaatttctttcagatgacgaagcttataacaggaggatagaggcaagagctcgtccatatgtcatgatagaaggggagttgtacaaacatggagtttgtgtccgctactcaagtgtctatctagaaccgaaggcatagagttgatgaaagaaat

SEQ ID NO: 16982 - DNA, 1066 bp, Arabidopsis thaliana landsberg
tcgtctccggccgagttcaccccaccccacccattaaaaacggggggagtggatccgtatattcatactcccatttttatcatcttgtaagtttttgaactttggcataaataaaatttcttcacatttttaaacgcttcggctaatacgatgagtgacagctctgagtatcctttacgcctgctcggctacaacgcgctatacaagtacgagatgaaatctatcagattacctctgagaagaaactttcatcttgagaaacccggctatactttaacaccggtaccctagctcgtttctaaacgctggtcgggaagtgaatctgatcggatcgcaaccgagaagtttcacttaaaaacccagtctctcacactggtcgataaaaccgttcggatctaaagaaagattctaaccaaaaaatatcgaactccaaaaacttattggataaagccatccaggcacatgttttacaaattattggataaagccaggcataagtgctacaaccaaacatactaacaaaaaaaagggcaagaaaaatcccgcttcgggtccctagtcgagctcttcggacgggcggttactctcggcaggaaggagcgatccggattggtcggtaacccccgcatcgtcggcaagagtctcaaccgacctatgaccacccagactcagaggagcgggctcgggagatggagctttaagatcctctttcagctcggcgataaagcggttgaggttagcctcggtgtcggcaaaatcctttaaccactcatcgacttgatcgttctctttatccagaaccccgccttcttcgagcaccttgattagctgcgcattggctcgcgcctgggacaggtacatgaattggtcattgacctcatcaaggagcgacactttgtgcttggcagctttcaacttggcgataaaggtttcagaaacctctcgcctcgtcatttgaatggcccaagccagctcactatcacgaagtcctctcgcctcggcaaacatccgctttagacgaacgatctcagaatctgcttggccatcttgatggcgttctctttgt

SEQ ID NO: 16983 - DNA, 792 bp, Arabidopsis thaliana landsberg
gtcatgtgttagtgttcttcaatccatttttctttcggtctcaatttacaaattaattttgtttggattttaacaaattaaataaataaataaaactcttaacaagtaatgtaattaagttgcaggtcttattttgtccacatcaatatattatctgttcagctcacattaattagtttctcctatggttatcttatacattctctccgttttgaattacatgttatttaaagttttctcatataaagtaagaatgttttatcttttattaatatattttataaaaaattttattgaccaaaagaattaaaacattagaacatctccaatgtgagtctttagaggagagactctctattaaaccagaataaaaaattagaaaaaggaagagaaagaaccgtttctcacctgagaaactttgagaaactttgagaaactcatttctacctttactttgttctgattagtttaaataataattaaaaatttgaacagtaaaataataataaaatttatattattttataaaaatgagtttctggagatggtcttaaggataaaactataatatttaccaaatatctgcattcaaaacctaaaaacaggcccaatgatttgggcatatcacacaacaacgtcgttaaaaaataaatttaaaaaaatcgtttattttttttttgccaacctcactcttcatcggtattttataaacctaagtaccttagcaaagttaaatgtacaaagtccaaaagatttcaagaatgataaaccaaaaaaaacgtaaaagaatta

SEQ ID NO: 16984 - DNA, 750 bp, Arabidopsis thaliana landsberg
tatgacagaagttcatgtatgcaaggtacgtgagtttccctaactcttgtggaatttctcctgaaagcttgttttgttaaacgtccactgactcaagtgccatgaggttccccatagatgatgcgatgtggccactgaaagcattgtttgataagttaagaacatgaagctctttcaataaaccaatggactttggaatctctccttcaaatttgtttcccgaaaagtcaatcactgtgaagacttttaggacacgttccagctccatctctactcctttattcatcaaaaccattgaatcaaagtagaaataatctgtactcatgtacatgttgctcatggtctctccgttagattgatcttcattttcgtccagtgaaaacattgcagtccagttgacaaagaaatttgctggcaacgtaccattgaattgattaccggatatgtcaatgattcgcagcttagaaaactgtgttttctctattggtccataaaatgcattggagcgaaggacaagaacttgtagctcttgtagagaactcaaccataaaggaaacgtatcactgattttgttgctctccacattcagaagtccaagggaagagatatgacttaacgatcttggaagctttccactagttggttatggccgacgtaagagaaattagactctcaaatatattctctggaagaactccactaagacgattatgtcgaagatttagagcttgaagatatggagactgaata

SEQ ID NO: 16985 - DNA, 1435 bp, Arabidopsis thaliana landsberg
tagtgttgtaggattttggatctttggaatcatgcatatattagtatgattgatgctcgtcttcatagttgatgactcaaagaaatgcttcacctcctgaatgacatcttgacctactatgtcccagcatcgtttataaaatctcgcagtcaaaccgtctggacccggtgccttatcatctccaatctgacttattgtatcatatatttcactatcactaaaaggtttcgtaagatccaagttgattgtattagtaacagttgaaggaaaatctgcaaaatcaattggggaaacttgtactccatttgtgttgtagatagttgtgaagaaatcttgggcgtgacgaccaatctctttgtctcccgtgtatatgtgtccttgatcatcactaattgagtttatcctgttctgtgaaattcgaacctttgcacaagcatgaaagtaacctgtgttacgatcaccctccttcatccattggttacggctcttttgtttccaatatttttcctcatcactataagcctttgtcaacgactcttgtatttggggtatatgttgcctttcaactctaaccgtactctccatcgctctgtttaaacgttcatgaagtgtctttatgtgcagatccgaatttaaatttgatcgatgtttcagttttgccatagcttgacgacagcatcagattcgttctgtaatggcaattgattgagaattgtgagaagtgttccaaccttcgtgaacgacacgtttgaacgtggggatatcaaccagtcagttatcaaacctaaagggcttttgtcgttgtgcaaatgagtcattggtatggaccaaaaccggtttatgatctgaaccggagaagtccaaaaattcagtttcagcattaggataagttgcagaccaaactgaattagtgaaggctctgtccaaacaacacttcacagtgaacgtgtgtctttcaccaacccatgtaaacctatcccctcttgatctcatatcttcaagatcacaatatgaaatcatgtttctgaaatttctggaagtccactcttctctcaaaggaccaccaatcttctcatcattggataatatctcattaaaatctccaattaacaaccattcagcattgcgattgtctgaaatttgttcaagttgttgccaaagatgatgacgttcagattgaataggatggccatacacacaagacaagtagaagctcttattattatatgttacaaaggtatcaatgatcctttcatcctgagaaatcaaggacaaagatacattgtttttccacataagagctaagccaccactccttccattggggggctgagttattacattagaaaatcccaaatcacaagctaatttatgtagaacatcacactgattaagtgtttcaataagaaatagaatatcatacttatatatgcga

SEQ ID NO: 16986 - DNA, 2636 bp, Arabidopsis thaliana landsberg
tccggttcgctcttaattcatgggtatttgattcgctttgtgttgttctctccggtgttgtatagttcggttcaaggattctaggatccattgagtgttttagaaattcgatttggttctctcttttttaaatccctttttagttttttccttcaaattaatatatattgataatgggccttcccgacaaaaattgggcttagccatggacattataaaacagacaaagcaggtacaaaaaggattttggttcttttttggtctattattattggttcagatatttgaatggagaaccaaagtgctaaacaagtaagtaagtaacacaagctgttaaatttcttcacgggagtattttctttttcgtcactatagaaacaaatgttttctccacacacaaggccattcggcccattcctatattttatgtgttccaaaacatattttataaaaccgttcttctatatttattagtaacactagttaatcacccgcgctatgctgcggtattttcaaattttttgtatcgtttaatttaaatataatttttaattatctaatcatttacttatataataagtaattattcttagtattaaaatatattttttctaacaacattctcaacaatgcattatacacacaattcataaacaatgttcgtcttaaactaattaaatagagggtaatattgggattctcgaaacctaagaatttgatgattaaacttcttacatactcttcaccctcggcgatttattatatagatatataacaatatgcaaactattcaaactattaattaatccatgactactatacactcattatttgagttaagattacagaaaaatatcttcgagtatgagaaaaccgataaaataattttattgaaaaacatataataacaaaataaatttagtattagtacaattaaatatgtaaaattaaataataaatacatcattaatctataaattagaagttgaagagcttacattaattatttagtggacacatggcaaatgctaaaatgatgatgtgtgaatcatatggaaagagttggccaactttcatatatacgattccatgaatatgcttttctgagctaatgactacatgcaatcaaaaaatcattcaaatatcagattaatatgttttttagcaaatcagttttttggcaattaatcagaaaagtcaacaaagtcgagagtttgtcctgcgctaaacatcagctaaaggacacacatgtatcaaacagcttgagaatacaaagaaacctataatttcacaaatccatagtcaggctcgtctagttataacaaacaaattcatgagattgttttcaatctaatatctaatgagatttactcaataaccaaaatactttttaagcaaatcaaacattatcaccatagaaaatagttcgtatttaaattggcgcatactattttatcaaacagtgagagaaaaaaatgtgaatcaccaatttgaaaaaccaaatttcatatactaagatttatgtgttgttttaaaaattaaatatgtattattagtggagggtttgaccgtgattaaaacgaaatcgaattaagattatatcggatctttgtgagcaaatcctttcctctatattaatgtatttaggtatttactgtgaacatcaatctcaccaattaggttttttttctttcttactctcttgcagcctcgctttctctgaaaaagcattttagtcacatgtctctgcttctcaaccagccctcgaagctactatgcttccggaggaaatctgttctggtaagatcctctcctcttctctctaatggtttatcatcttcattgcggcaaactccgccttgtaccatcatcgacgctgttccatgtggagaggatctcggaaaactcgtcatttacaatgctaacgcagttcacttcacttacttggaaaagaaggtgcctctagagttggtgcgcagtgatcccatggtaacgatcgggtcatcccatggttgggtagctactttgagtcaggacgacggaatactgcgtctccaagatgattttaacccggctgcatcggatacgaaccctaaacgcattcccttgcctcctcttgtaactctgccccattgccaaactcaaatcgtcaccaatgtgtcaatgtcttcatcttctcccgaggatgaggactgtgtcgtggctgtcaagttcttaggacctcagctcagcttttgcagaccagctcaacgtaaacccgagtggatcaacgtcagaatcgcaaacccctgtttctactcctctcgtgtcatgtattcggagaaagatgacatgtttcgcattcccggatctggaggccatctcattggatcatgggatctcggtacacacatgcacacacccaagattcagaagctgcgatttaaaaagtttcccaatcttgcaaagaccacacggaagcttctggattcttgctgtacaagcgagcacttggtggaatcacgatccactggtggtgaaatgttcttggttaagtggtacaagagaaccgctgagatcgtcaatggtgttgcgaaaatgggaaccgaagcttaatggtgttcaagcttgacgaacaaggaaacgcggtttacacc

SEQ ID NO: 16987 - DNA, 1148 bp, Arabidopsis thaliana landsberg
  unsure (1)..(1148): unsure at all n locations
aaatccgattaaggaaattttctttgtgattctaaaaaatgtgataggttcatgagttactgtattagcaacataggactcctgtctttgatgtgaaaaacaatattttagctaactacgtaataaagataggttcagatttctacaatagaagttacaacatttcacatgactatttgataaactctatgaattttccgttcttgttagggacaaggaatcgaagatggttgagacgattgctagagatgtatcaaacaaactaaacactacaatctctaaggattttgaagatatggtgggtattgaagcacacttgcagaaaatgcagtctttgttacatttagataatgaagatgaagctatgatagttgggatttgtggtccttccggtattggtaagactaccattgcaagggctttacatagccgactctctagcagttttcagcttacttgttttatggagaatcttaagggaagctataatagtggtcttgatgagtatggattgaagttgtgtctgcaacaacagcttctttcaaagattttaaaccagaatgatttgaggatattccatttaggtgcgataccggaaaggctatgcgaccaaaatgttcttatcattcttgatggtgtggacgatctgcagcaacttgaggctttgactaatgaaactagttggtttggtcctggaagcaggattattgtaaccacggaagatcaagagcttttggagcaacatgatatcagcaatacataccatgtggatttcccaactataaaagaagctcgtaagatcttttgtagatctgcttttagacagagttctgcaccatatggttttgaaaagcttgtcgaaagagtgttaaaactttgcagtaaccttcccttgggtctccgtgtcatgggttcatcattacgcagaaagaaagaagatgactgggaaagtatattacatannnnnnnnnnnnnnnnnnatagaaagatcgagggagtacttagagtcggatacgataatttacataagaacgatcaatttctttttctcctgattgcattcttcttcaactaccaaaacaatgatcatgtgaaagcaatgcttggtgacagtaaattggatgtcagatacgggttgaaaaccctgc

SEQ ID NO: 16988 - DNA, 634 bp, Arabidopsis thaliana landsberg
acaccctaccactgagatccgtgtcacgccagcacagatccgaaatcgttaacaaagcagtaacccaccgaactgaaatctgactttcgtcgcaaaccacaactttaaacagagacgtggagctgtgagaaacacctctcagatctccacggcgcccaaaaaccggaacgaaactgagagatttctcaagaccaccgaaaaaagccaaagtaatgcatcagaacccagttcaaccacacctcaactgccggagaaaagaaccgcccaccaccgtaaatcaccgttgaaactcttccgtcatttagatctgaaagcaaaaagaaaaggaagaaaaaacaaacgagatgtactttttgagaacaaggagagagaagagaggattttaatttggaacgattgtccttcttttctaaatccagaagacttcaagtctttagtttctgatttccacccagacgacatagaattccaacaagttttggaacttgttaagatgggctacaaaatgaagaaaactgaatggaatacaggatgcgttgatgttcttgttgcccttgaagaagtaggtcaaaacaaaatgaataacaaaatatctgttagcgagaagcttgacaggattttgacaatccttgaa

SEQ ID NO: 16989 - DNA, 753 bp, Arabidopsis thaliana landsberg
tgatctctgtcgaagaccgcgttcacacgtctaaagatgaagtaattggcaagattaccctgccgatgaacgtgttcgaaaagcgtttagaccaccgtccagtccattcccgttggttcaatcttgataagtacggtaccggagttcttgagccagacgcaagaagaaaagaacataagttctcgagccggattcacctacgaatctgtcttgaaggaggctaccatgtgatggacgagtcaacaatgtacattagcgacacaagacctacagctagacagttatggaagcagccggttggaatgttagagattgggattcttggagcaaatgggttggtgccaatgaagttaaaagacggtagaggaagcactaacgcttattgtgttgctaagtatggtcaaaaatgggtgagaaccagaaccattcttgacacattaagtcctagatggaacgagcagtacacatgggaagtatatgatccttgtactgtcattactctcggagttttcgacaatagtcatttgggctctgcacaatccggaactgcagattctagagatgcaagaatcggaaaggtgatctctttctctctatatatacaatcaatcttaaggtgaccatatagttctgtttttatattttacaatttgcttctttgaaactagaactgaatacttttttttttttggttcgggttggtttataaataaatttcagttcatatgattttgaacaaaatcttaataaaag

SEQ ID NO: 16990 - DNA, 1495 bp, Arabidopsis thaliana landsberg
gtttcatgcctccactatatttcccagcaggtttatcagcaaccccttcgcgtgataggttcacactcttaagagacttttctatagcctagtaaccatgaattaacgttttgatacttttggagtattaatataggaaacaagtaagatgataacatacttggttgagatcagagcctttgagattcttaagtcttccgtaaaagagcaaatgttcccttcctgttagtgtttcccatagcaagctagcacacagtagggacaagagaatgatgacacttatatacagtggaataaattcaaatgttttcaagaatacttactcatgttgtgggcaaacacccatgctagtgtatactttgtccatattctggcatatgtacaaacctttaacaagagctgttccagatgttggttttactagcccagtcatttacttatataaatattggaacattcaggataaaaatggagaagatcaattacttacatatcaaagactagaagactacccacgcgatgcgtgagaatatacttaagtttatttttcaaaatagaatgaaatgatttttcaaaggaaattgttttaacatggttttttttaataaaccaaaacaaaagtgacgatagttgtatgcatttagataattgacaactttctgtcattttttaaaattagactttactatacacatgattgtactaattcaaaaatccaactttctgataaaataacctattgaacaatttgtattattttttttaataggaaaatgtttttgttcacaaaaaataaaattctaaattaaatcaaattattatttttttagaaaaaaaatacttgaatgattccacatagtaacatttttttttcttttaagtctcctttgttctaattctttgaaacatttgatcgtggtattttattcgactgttgatcggagcctctcactaatacttgttcttttgcttttagtttgagaggttttgttcctcatcttgccaattttaattctagtcatgcattgagttccgttttattgcctttattcatcggatttgaaaacagagatgctttggctcttgtacttctagcataatctatgtggttgagtttgtcatgtttagttgaaaatatatttcttttacactcgtaaaattttggcccaaatttgatgtagatgtttttgacgtttcatgattcgccccaccaccaacaacactcaagcaagtttttcggttgtgcgagtttttaagtctttctcactcaaatcaaaagccaaatgttggtaaaaactgttgtgttttaggctacttctaaccgtatattagtcgattgtaattcgacttcaacttttcgacaattttgacggtttaacagccctcatctataggttcgtcttgccaactataagaaacatatattttaatttttgaagtcttcaaatcacataatgaaaagttttcaagacgtatccattcgatggttatcaat

SEQ ID NO: 16991 - DNA, 531 bp, Arabidopsis thaliana landsberg
cccaagtgggctgcatcttagtgagatagcgctcaaaactacgccgaccacgtgatcggtgactctgcacatataaggtatgtcgctgctctgccgcctcgtccctggtacgatatggggcgattcgagaatctgattcctgcccgagatgctggagatggctttctttatctggggatgaccatgaccatgaacaagctgcacgcgaggaaacttgaaccattgatgaatggactcaatgaaacggcgggatcaacctcggaacacgtcgacccatttcactgcacttaagactcttgtgcaggatccgacccggctcacaccacgggggttccaaaaggggatgttggtcccctcatcgccgatcaaatagtaccacccctgtcacattttatagaaagatgcatagaacttagctttcacagtatgaccttgtccaagaaagcagacaaccctttggcaggttgattcaccctaagtgaacggagctgatcatgctgttgcgtttcgttatgcaactcgacgttgaat

SEQ ID NO: 16992 - DNA, 1137 bp, Arabidopsis thaliana landsberg
acaatggagagagtattacttagagaggatctaatggaaggcatgctctcaaaatcatctgctaattcttcttctacatcagtactagacaacaacgacaacaataataacaataacgaagaacactttttcgacggtatggtcgtttcttcagacaaacgttccttgtgtggtcaataccgaatgggccacgaggcctcaggatcatcttcattcggatctttcttatcgagcaagaggtttcatcatacaggtgatctcaacaatgataactacaatgtctcttttgtttcgatgcttagtgagattcctcagagttcggggtttcatgcaaatggtgttatggatacgacgtcgtctctagctgatcatggggttttaagacaggcgtttcagcttcctaacatgaactggcactcataatctatatagatatatatgtatgtatcatatatgtatctatgcaggcctaatatagtttacacataaatcatctgggaatatatatatacaagtacgcggtcttacaaatgtatacgtatctgtttaagagaatattacactctaagacactttttaaaaaacatttccgtggttagacactttctaaagagaaggcactttgaatggataatttgaccaatttaccctctaaccatatatcgctttatcgctctcctcctcatattctttctctctctttctctcacgttgtcgaaaaataaacaaaactcaagccaaaaaaatatatttattcctttttctttctttcctcttcaacaaatcatcagcttttatgagaaagagagattgagattcaccttctttaatttttcgcgtgtgctttgatctgacttgaaggaaaaaaatttcagaccatcaatttgagaatctgtcctatctggctgatttagttacatgactcgttgaatgcttgaattggatttacggtttggttttcgttttatgtttttgctgtttgttgcaaaattaatctgattacttgttctttgattctttgtcttgcttttccaatttcatattcgagattattctcttgaattggagattaaagcctcgtagtggacttcgaatcgtttgatagtaatggtcgaatcactagttgatggaacttgt

SEQ ID NO: 16993 - DNA, 1114 bp, Arabidopsis thaliana landsberg
ttcaattaatataccattcccatatccccatgccctttactaaattatatataatacgggattttctcaaagtataaaagaaagataagacaaggaaaccatgcaccatctataaaagacgcaccaaacagagcctttcactgaattttgtggtaaatgaatagaactctgtaattgagaaaaaaaaaatgaaataatattaagaaataaaaagagagacatatttaagttacaaaactagaaaatattaaatcacgtattaatatttttctaaaacaaaatagggaacttttacttctgttttgaatatataactgatttttaatagaatttgttcaatattttaatatagtgaataaaaaatttgtatatatgaactattttttttacttgtgtatatatccgatggggttatgaaatttttctatattttgtttttttaaaatatcccgtcctgtgcaaaacacccatctaactcatccatttttacaattttaccctatatctctaactaatgcagattaatcctatgaagtctaaaataatacgcaatatgacccttatacgtatattgtaaccttatttacactcacatacattagatttttaaaagaatttgtaggtagagctgaactttttgccgagaaggcttcgatttaacatattaaatatcaatattttacaaaatatttatcgtagaaaaaaatgacgaaaaaggggttacattgcgtattatttttaacttcatcggataattatgcattttctggaggtggatgataaatatgcaacaatagatgagttagagagtttttctttttgcacataaccttaaaaataacaaaatttatttgatatgtgtgggtaactcatgaataaatttgacacgtgtcatgatcaggtgagttaacaattttgaaaactcaactttgtataataagatatttggcaaagtcaaagccggaaagcaataacccaataattgttatatttaaagaccatgtaaaggttactcgctttctcttataattgatgaattggtttcattaatttttatgtttaagtaaattttacgttgatcctagtaagtaaaggacgacatgatgcacaatgc

SEQ ID NO: 16994 - DNA, 732 bp, Arabidopsis thaliana landsberg
  unsure (1)..(732): unsure at all n locations
agcttccatcttaacaatctcttgcttcgtgtaagtattgtctgtgatgtaacaaaagtcatccacatttggaggagtaatctcttcatactttctacaaatttttcaaaaccaaaatccaaataaacaaacccacaaaaaaaaaaaagagattcaaacaaacaaaacaagaaaaagcttacgaagcaataagcattgaagtaactcccaaaagctgaagcctttgtttgttaacagtcttgagagacaagaatctatcaatgtaagaaacagcgaggtaaagagtgtctgagagaagtttgtattcttcagcaacttctactaaccaatcaaccaaaactcctctcatattcgaagttacatctttctgaatcttctctatataatcaaccaaaggtcttgactttacctgaatttgtgttaatcaagaaactaactcagattgcgaaatctaggaaactagagatgggttttgtttatttacctctaattgacgaagatactcgaagattgaggtaacataaggaccacacatctgtggatcatcagatcttgtatcaatgtctgaatttaagatttcgagtgtcggaatcgaaactgatttcttcttctgttttgtaggggcttttcgagatttcttgatgttggacaagtttggaagctctccgagtacgactctctttcttgtgattcgntcttttgctatcgccgcttncatggaagcttttcttt

SEQ ID NO: 16995 - DNA, 2336 bp, Arabidopsis thaliana landsberg
  unsure (1)..(2336): unsure at all n locations
gatccctattaattccagagatatctgactctaccccaagggattggctgtagagagggtattgactttaacatgttgattcgataatgcctgcttagttagagatcgctaaagggatttaggtcagtgtctagctttgcttgaggatttctatcacgggagtgaattaatctgttgttgaacttgttgtctagggatagcttctgtaaagttttgtcaaccgcctgaatagattaagtagaccacactattcgattaccccatccttaggaatcgtttatccatttgattgcctgttatcatttctgctttgtcattcacttgcctgctattgccattcctgcttttaatttcatttcatttctgttattgcatactaggactgttagaaccaaccaactatctgcttggcttgacttagagctttctgatcatatctcatctgtttgcatcacaccggattggattgacatcctaaaatactacaacgacaagatagtgttttagggattaattgagtaaaatcctactatcagcaagtagaccaggacctaatggacacagtgcaattttctccaggaggagaaattatttccattcgtcttgcacgttctgaactaggtacatataacaggaaagagctactccgtcaattaaacgatgatagtgttctctttggtagcagtatgacttgttgtttatttttcttttgtcttataaatctcagatgcaaatgagcgtaacatgatcattacagctagtattgtaagctttgctctgtttgtgataatggcttctgctgcgtttggtttctggagatataaaggtacaaactgatgttcttgctacctttctattgatttcttgtttttttttatttacagtactcatatcttgctatcggtaacacactgatgacctatattataatcagctaagatatcaaaggatgcttcacaagttgcatggaggaatgatttgaaaccacaagatgtatcaggtttaaatttctttgagatgaataccattcaaaatgccaccaataattttagtatatcaaacaaactcggacaaggtggattcggtccagtttataaggtcagagattttttatttataacctctttggtcttttctattatttgcttatgctctccagataaccttctgctatgtgtttcagggaaagctgcaagatgggaaagaaattgctgtaaaaaggctttctagcagctcgggccagggcaaagaggagttcatgaatgaaatagtactcatctcaaaactacaacataaaaacttagttcggattttgggatgttgcattgaagaagaagagaagctattgatttatgagttcatgttgaacaatagccttgatacctttctcttcggtgggttccttctagcttcattcctttactatcagcaactttttctctacatggaactgtcttatctgattgttcatactctatattgtcgcttagattcaagaaaaaggcttgagattgactggccaaagagattggatatcattcaaggtattgcgcgtggaattcactatctccatcgtgactcacacctcaaggttattcaccgagatctgaaggttagcaatattcttctagacgagaagatgaatccaaagatatcagattttggattggctcggatgtatcagggaaccgaatatcaggacaatactcgcagggttgtaggaactctgtaagactctattttccataacattgttaacaagattcatagtcataaactcataatcgtttattaaacattgggtgaaactattcgatgttcgcacagaggatatatggctcctgagtatgcatggactgggatgttttctgaaaagtccgacatctatagctttggagttctaatgttagaaatcataagcggngagaagatctcaagattcagctatggcanagaagaanaaacccttattgctatgtaagtacaacttttaggtattcatacagttgcaaatgtctcaaaacgttttttgcttttatattcttaagacctgaatctgaacaacaggcgtgggaatcttggtgtgatactggaggaattgatctcttggacaaagatgtcgccgattcatgtcgcccactggaagttgagagatgtgttcagatcggtctgctctgtgttcaacaccaacctgcagatagacccaacacacttgagttgctgtctatgctcaccacaacatcagatcttccaacaccagaacaaccgacatttgtagtgcacaggagagatgacatatcatcgtctgaggatttgatcactgtgaatgagatgac

SEQ ID NO: 16996 - DNA, 3179 bp, Arabidopsis thaliana landsberg
ctacatgactagattaaatgaatatggacttaaataagtttacttgatgaattgagatatgattcgagggcttacttaccttgtgagattgttatacttaaatgagatatgctatgaggttgtgaataaatccttgctatattatgaatatatattgatacatgatttgatgcttgattgtctatactagtttggggcatggtaaactacttatatatagtactgcatgaggttattgtgtctaagtggtattcaaggtttacccgataccatcatgtttagagtaagcttctgtctccctttttgtgttgtgattgtgatagtaagtcttgatcctgagtggtcacttacatgatggcacaagactcggagcgtatgccgagtaatgcatgacgatgcattaaagtgatgttctggttataagcctttgtggctatagctcgggtgttcacaattgtgtacgtacgtgtggtgtgggtgtgcacgtacgtgtgtgtggtagcatacgtgtggagaacacatatacacgtatgcaggagtttgtgttgatgttgtggtgcacctttttggtaaggttggtagtatgctgggcccaaggttcattcatgtgtctagtttggctgcatattctggtattattataagtatatgataatacgtttattacgtactctgtgatctctgatggataactttacctattaagttgattaaaccctagagatttatttgtgcatagacccagctcactgagtaatcttagattactcatgagtctacttgtcttacaggtaaccatagtaggatgaccatagcggggagacgagcactaggaaatgccggaaataggatgctttacgttgcttttgcaaaattacttattattatgtaaattttaacaaggatccgatataaagatatatttttgggtaactctttgccaagtataagctatatactatgcataaaatgttttcttaaaggcagccgagtgtttaatgatataagacctagtccgggtcgctcaacactataatatcacgagggttggcaagcctaagtggtgttcctagtgggtggaaggtcgattataatttggttaaagaaccggattcatctggaacctctactaagttgtgatcgatcaacttcactgtagcgtaactgtgtcacccgtggcttgtctagccatagggcaattcgggggcgttacaatttttgttatcagagcatggttatgcgatgctcgtggacacttgggttttcgatgattttatcgagtaaatttaagtcgcagaatgcaacattagattccggttgttcgtcttttagatggctaagtgggggataggtttacctcgttttgcagatgttgtctagcaaaggaagcaacacagtcagttcgttgcacggtcttaatgtgcccaaccccgaaaactttgctccgccgagcagtacggacgatgacagtttgtctgtggccatgaatgatcaaattatggccgaagatagtaaatctactaagtccgatatgtcaattgaatctgatccgtctgaatgttcggagaatgatgatgatcatgatgacccgttatctagtgaagaagcgaaccatgttgagtggatgatcaccgatgatggcaatttatttcgggctatcaataaaccaattttcaccgattttaactatgttttaggtatatgttttatagtctatttgttatttctagagtctttttagtctcttttcaagtattctatgcaatgggacaacaatggagataaggagacattttggagcaaaagctaaggaaaaggaagctaaggacaattttgattgaggaatcagcgaggagtgtcgactgacacactcttggtgtcgatcgacaccagtttcggtccagcaaaaaccctagccgctttcgagtttacagaagctcaagtttgccccaaaagactttcctatttgcattattagtccctggacgtttttagggtctatatatattgtttttagacctaagtttcttttatcaagtcttttatcaagttctttgcaaaccctattgtaagagacataagctattcatccattgttattcagagtttcattcagatctatatacaatgaagagatcccttctaactcttttctttattcattgtgtttatgctttcacacttaatcatgttgtttgcttcaatcaatatgtctgagtagttttcttgttaggaatagggtttctcattagggattcatatggtttagtagattgtcccccttgttaggttatctgtagaattcttcatctttgattatgcataatgctagatctggagtaattaactagatcttgaatccagacaatagatatgcccgccataggtatctgtagttggatctattatttgatgagtctggtttataggtgtgtaataagaatcggcctatctactaaaatgaacaattgaactcgttaagaatgcatatttacgttgatagtttctcggcttctctggttattataagctatagatatagggagttttgcagcacgcccaccggttattccataattagagtttgagtttaagaatggttcgataacaacctagctttcattagatctactaactaatagttaccctgagaatacccttttcctggctctttattaaatcgtttacaacacaatcaatctgctgtctttttactttgttctcttttatattcactatcaccctgctagtttaatctcgacatttaactcgttatttgaacaaaagaactctgtgaattcgatcctaaaatacttcaattgatctcttatttgagagagtagttctaggtaatttgaaccatatccctctatccctcctctttttattgaccttaggcaacatgatggtactgatgtcccgtgtcagcagtttagcttcattagagctaattccattgtcaacaaggcgcttgacatactttttgagtggagcagaggatgtctcagtgtatccttaggaagtgaggtgaggatcttttcaatgatagttgtgcacttagcagggtggaactcctacttagaatgacgcttccttagataaggaaaatgatagaagtaggacatattccagctgcatcgggattctcacctcaaaagatgcagtccagacccagtgtc

SEQ ID NO: 16997 - DNA, 5627 bp, Arabidopsis thaliana landsberg
cattacaagctttggaaggcatctcgtgacattgacttattttaagaaccttttccctagtttactctgcatgagagagcaaggaacagaagttctgaggggcaaagctcttctctttgttgcatttctctgcaaaaacagtaggcgttggctgacaaatttcttctgcaatgcaagatttcttcctgtggtggacagattagctaaagaaaaagacagttacctgcaacaatgtcttgaggcatttgtgaatgtaatcgcctccataataccgggcatgctggatacaataaccaatgatatccaacaactgatgacaggaagacgccatggacctgtctctccccttaatagtcgagctcctgtaaagactaatgcacacctgttccctgtggttcttcaccttctgggaagctcttcgtttaagaacaagatggtcactccacaagtcctaaggcagttggcaaatcttacaaaacttgtggaagcatcgtttcaggtcagtagttacaacattgacatccccttttacattaatgaaatgctatcttttattttattttgcactaatgggcttggtcaattgctcatcaacatttgaattccttaccttcactatgacaaatgataattactcgtttattttattgttaatattgcttcttataggattggattaagattttcatacaactgtatcagaattttcaactaaattacctctttcctctgttcactatagatatgtgtgtaagatgttttaagaatctgttccgtttgctctcttgtttaaaccatggtttatgtaaacaattttgcagggaagagatgacttccgtgtaacccttcttcaagttctagagtgcataacaggagatgcgcctctggttacacaaaatggtgagattattatccgtgagattctcccatctctggctgcaatttacaatggaaacaaagacggtgatgctcggtttctctgtttgaaaatctggttcgattcattgaccattctcttaactgagtgcaccgaaatcgagcaacaaatatcggaggatttgaaatcaatatccaactctcatttcctcccactctaccctgcactgatccaagacgaagatcccaatcccagcttacgctcaaaagctccttgtcatgctcgttgagtttgattacatcaaaatctccaacttattgcgtcacaatacggtttcacaatgcttcgagtttcttctcggagacttatcaagcgcaaatgtgaacaatgtcaagctctgtctcgccttggcttcagctccagagatggaaagtaaactactctctcagctcaaagtagtgaggagactcggaaatctgctggaattcgtgaatgccaaagatatggaagatttcctagaacccactttaagtctctgcagagcttttctgctacggtcacttgggaacaagaaaggtctcatttccaactacacaaaagagccaacgcttttatcagaggcatcttttacgttcgaggttgatccacaggaatgcataagagacattgcagatttcggtagcaacattggcctattcttgcactttgcaggcttagacgatgacacaagcatcgcagtcgcagatattgcctctgaatgtgttgtgttgctactcaaagcggcttcgagagaagccacgacgggattcttaaccaatcttcataagatcacacccattctggactcgtggcgcaggaggaagagcacagagctacacttgttggttctgaagagagtcttgcattgtttgggttatgcttgcaagcagtatctatcgcaggcgatgattttgtcgatatcgggacacgatgtctcaaagatcaacgcaattgtctctgagatgaagaactcagacgccgctggtcttaacagcatcgcttcactcgttgccatggagttgcagagattacctcgttgaatttgaagtcatctgaacaatggtaacaacagttaattgataattaagttctttttatcattgttaagtctttctacaatttctttatctcttgttgttaaaccaggattaacgacgacaatgacgctgagctgtagattttgagtacatgcgaggtaaaacaaacgcaaaaacatgtgacaaagtgaaacccagaatcaagatttatctcttcttaatgtatatttctttctattgcaatttttgtaccactaatacaatctacttccttaatattatcttcttttagacaaacatttgttaaatatttgagattagtctgattagtttagattttagtattaagttgatgggtatccagttttctttaagcaaataaaaactctagaaactaaataatgcatggttgagtaagattaacataagctgatctaaggaaaaaggtgagtaaaaatataggatctttttcttagattttgctgaattatttgtgtgttaataggtaaatagagttcaattataatatcatgatgtttgtattatttttagtaaaaaaaactgaaggaatcatcccttgtggaaagctttttcactaaattctcagtcttcaattatatcttccaaacacaccaaccattaaaatgtcgccacgtggttaacgaaaagataccactttccctcccactgaaccaactccaatttatagacttgcactatattcttagacaatttaaattaaattgtattattatggaactttataatctttttttttacaactttatatacatatatatttatgtgcgatgtacgtaagtaatatagctatactaaattctttaaaaaaaaattatacaaaaattgagatattaggacaaattatggggatgatatatatatatatatatatgtctatcactggctatcataatagcaaccaaaacagaactaaattcattctatatcatgaaaaatagaaaggtatatatgtatttgattggaaattgaaaataaatattcagttttgcaaacaaggtcttttctttagtcttttcctccaaaaccttattataatttttatattttttataggatagataagaggaaaggttcttttatatagagacatcatcattacaactcaaaatgcactccgatcagtagatagagaaagacagatccaacaaaaaaaatcaactttgattttcatcatttaaaccaaaaacaaaatggctttttcttttctcaataaacttctcatcatcttcatcttcatcttcatctctctctcttcttcttctccgacaatttctctcgtccaacagctttcaccggagatcgcccctctcctcccttcccccggagacgctttaccttcagacgatggcagcggcacaatcccatcttcaccaagccctcctgatcccgacactaacgacggctcctaccctgacccgttggcattctctccttttgcttctccgccggtttcttctccttctcctccgccgtctcttccttccgccggagtcttactcatctctcttatcatctcctccgcctcgttcctagcgttataacactactatagttcacttcgcttatccatcaacgaacgttttggttttcacgtgttttgtccaaaatgtatatcattatctcgaatgagaatatttaacatttagtttcgtagtaagctacattttacaattttaattattttccttttttggtcgtgtttgcccctcttgaaaatgtgagtcgatatgttaatcatttcgaatcttcgattaagttatcatatattcatatgcatatatgtaatgtcaatatgtaccctaataacaacgataatatcatttgatataacgttcatcaatcatcatgcatgttttatattaggaccaattcttcatatcatataaaatcaaataaggattacttactatgtgtttgaatgagcaattaaataatattttggttaattaggggaatcaatgtttaggtgaagttcatttgtctgtttctgctgttgcttttttctgacaaagggccttttgaaaaagtttaaattatgcaataatataaaatgctttacgaacttaaaggcctacctatgactaatgagtgtataaactataaactatatacaaaagttattttcttcatatggtaagaagcaaaagatgaagaacctatgttcatatggttacttcttgtaaatttaattgaaaagagttgtgtatttagcaaaataagatgaattactcaaataattagaacatgatatgcagattgattaaagataaggttgttaaaaatatcatatatagtatttaaccatataaatataatcaactaattgcattattccaaaattccaaaggggttagagagcatgcatgtgagttgctcctgagcttgaagatgccaaagcataaaagtgttcttctcctgtctcacagtacttttaattactttctcattttcttaatactttatgtcaaatcaaacataataatttagtatatagaaatagatgactatacaatttaaggttatgtgcgtgacagattgtataatcactataatgttgtgttggtgcccacttatcttgtccttattgggagaataatagagctccaaattatataacgaaagaacccatactcatcaaactttatcatctctacatgttattttttcttcgtaacatctcaaacacatgatatcatgtttaaatatgtacagagccttgatgaaggtcgatgtcgactttgtaaagaacagattaaggagaaagaaaacaattattatatttcaatttcagttttggtaaccaatttcaatatatatacacatatattgattttgtgtcaacacacagaatgatgagcacgacttacatgcacaccacaagtgttttatctcataataaacgctgaaccgataacaaactaagcttcaaaccaacacatctattttgtacaacaaatatcatatgtttaatactgacaacataattagaagcccaagcccaaacttgtattcaaaacccataaactacaacgggtttaagaactcagaaacgctcccatattatcatcctcagtgtgtgtagtaattagtaatttagtactatggtttggtttgcatatgatataataaactaaaggaacgatgagggtgaatccatacagagagacgtgaatgagatcacggccggttaaaaagtatgtattttagctagtaacgtacgaaacaaaaaaaatgtagattacaaaactgaaacagtatatttggaatgcacattgataatcaattagtgtggtacacattgtactctactgttaatatacaatgtgtggaagtacttggaagatgagaggattaattaactgaattaaacatccattcttatcaagattgatttcattattattatttttattgatatcatatatgcatgcctttttcaattgtcaacaaattagttaggtttggctttaaaagaagaaagggacaaaaccacgaaggattaatattaaagaagccgcttttgtttatccaatcattcgcttgaacaaagcaaagatgctaacccacgctactaacccacccaatgttattttcttacataaatttaatgatctaaatatggttatgaactg

SEQ ID NO: 16998 - DNA, 760 bp, Arabidopsis thaliana landsberg
tcgatccggcggcgaagtgtctgggcgtgaaatcaggggtttcccattcaggtaatccatacggctccaagtgaatataatctccgtttatctcaccactctcactcggtatccaattatccgactccggatactacgcaaagtttccacgactagacatcacatctctctactggttctcgtccgacccctgccttgatatctgcatccaatccaacaacgatcttaggtttctaatatttaccccctctatcctaatagtggtgaacgacccggattatcctaagtgccttttgcgactatttactcgataaaacatttgaaaaaccggatcccaaaagcatcaaaaccatgctcggataccactctttgtaacgcccccggtccgcactaaaactcggccagtccggcactgctcggagacgccacaatggaaatgaatttccatagagtagccgaggttcagaaacacattccaatccttagcccactcaaggttactcatttccccatttgagatccacttaagcttgccaaccctcacttcacccaaatgttgtgtctactcaaataaagtcttatcagtttgaaacccgtataatttaaaataaatatccgatttcaatatcattagagttacgaaaatacaaggaaaaatcacaacataaacattgtttttatggtcaaggcatgaggcccaaaagtacatgatacgaaaatacatactttaagtgttacaaaaggacattgaaaaactact

SEQ ID NO: 16999 - DNA, 918 bp, Arabidopsis thaliana landsberg
gagaactttgtagcttgagctgctgttcggagaactcgttttttatttctccaattgaatagcgggaacttcggctatttcagtaggtgctttgatcatctattcaaaaatttcaaaatcagcattagattaaacattcttcgattcaaaacaaggaaaaaagaaaagtattacctccaaagctgagaggggctcttcggtagctttggcagcctctgtctttgaaacccttgcagcaggcagtatagcagctttttctaaaaaatatgacttcgaccggcgagttacaacttttgtcctctttggtttcggcgcggcagaggaggtcgtcgttgcaattttcctttttgtcccttgtttccgtgccggaaagcagtagtaatgatagacaaattgtcacacccgtttctaagggtagagccgggtgcatagcatatgtgtgccaggatctatttccacacatatgttgacatcacaagtgtaatatatcaaaagaacaatgcataaaagcgtaaataacaattatattaacatattacacttcgaacagacataatgtcttaacctttattcatcaaagtacagcgaaacaaggacatccatccacaggaagatgaccgggggtatcactagactagcatccatggagttcagcatcataacttcatctgcaacttctgatcaaaattaagcaagggtgagctcacttatggtcggggctcagcaagtgggggaaaaactaatgcaggtttaacaaggtgaggctaaggttgagcagtaagcattttagttggtcaacattttattaacaacacctgtcttactaataagtgtgaatcccaagtattcccattaagcaaaggtataagagtatatcaaaagcacttaagtgggggatcctctggcctgcaggcatga

SEQ ID NO: 17000 - DNA, 870 bp, Arabidopsis thaliana landsberg
tgctgtagatgagaagtcgattatatggagaagctgcttattgaaggacatgagtttagcgagtcagaatggccaggtggagacacagagactagtggactggtgcctgttaccccaggggttgttaagaaagcccctgcaagacgtggtggagtaaaaaaagagccagctaggagagagagagtcaagaaagagccagttattagaggaggacgtgaggagaagaatcaagaagatgctgctgtaattaaagatgatggagaaaccatagatatgttgaagaaattcattgcggagcaacacaaagaaacagcgagcaccttgaagagagagatggatcagctattcgagggactgatgaaatgtgaatgtggtggactgcgatcttcaaaagacagcacaatggagaagcagcaggaagacatggaacacaacaccacaatggaaccgaaagacgatggaaaagctaacaccacaatggaacagaaccaggacgacgacaagtctgatgatgaggtcattagttatccctctctttaaggctgccgcctgttgttctttctgatcagaggacaactctttttgtgagacttttctcctcttagcttggacaggagacggaagagcggttgtctaacagcagaggagggctgacaaaatcatccatttcacgaagaagatcagtatagttctgtaccttgcttggaggggaatctgtgaaatatcggtgttcaacgacacattctcctctaaaactgtctcagtccagatgtcatcatcctcatcctcttttgatccagattgatagtcttggtcattgtcttcttcactgaactcattagaatcatcattgctttcgctatcaccatc

SEQ ID NO: 17001 - DNA, 866 bp, Arabidopsis thaliana landsberg
  unsure (1)..(866): unsure at all n locations
ccaccggagttcttaagaccggatcaggttcacgcagaccgagagcacagatacaccaccgtccagcctcttgccacggagggtacacgctactctcgccaccgctccacgcccatctcgtgttgtcttattccggccttagtctgcccgaggcaaggcttacccatgacgaggcatgtgaccagctaaagggtcctcgatcaacaagcctacatcgagacggtccttaatcgactcagacggagacactacaccgagactctcttctcgtgcaagtcacccgcccggtctcagcttaatcatttcaccccaaaaacttggtacctggcagaggtacatcttttccgatgttgaatccatcacgaccgtgatggatccaccatcaagttttattttcgaaaacaaccctcccactttgccaagcatcttttgtaaaacaaatccttttgtttttctaaagcagtactaagcatagaaaaacttttttgtaaaatcagggtttcaaggaaggtaatcaagttcaaggaaggtaatgcaggaattgtttaagcattcaattcctattacctaatgcagcaatcaagtgagaaagattttaaaaacnnnnnnnnnnnnnnnnnnnnnnnnnnnnnnnnnnnnnnnnnnnnnnnnnnnnnnnnncggatccacaaatatcaaagtagaagcagtttcctgcctgagaatccgagggtggtgaggtcttctcttcagtgacttccacttcttcttcgcgttctaacataaccatatatatacatatataagaatgaatgccatgtaatgctcatcagagtgcgaagataataaacatttattatctaagtcttgaatacaactttccttca

SEQ ID NO: 17002 - DNA, 1822 bp, Arabidopsis thaliana landsberg
acattcacagcaataaaccgagaaatcttctaatggtaaagggaaaactagaggaattaattattagatttagacttttacctttatatgccttcaaaaattcgtttctccctcggctaatgagcattaagttcgagtgagaacgagaactcaagtagcagaacagaagagaacagaactaaaagaacaaaaacagagtgtgttcgacatttgtaagaatataaactgaataagagaattcatatttctgaacgaagaaaggagtacttatatagactcataatctgaatttcttacaaaaaaatattacatcaaacggtcgaaaaatgttaccgtttcacaacgttcataaaaaatgttaccgtttcacaacgttcatattttcctactctcaactctcaagtcaaatcaatataggaaatcgtaattacgctcaagactctcaggtcaaatattatttgtatttttcatttaacagttgtattatactctctggtaatctcatgaaaatttgaaatcgtcatcacgcatttacttgtcttccattgatttatgagtcttctataatgatcactcttgatgatttaggttgtctaaactccgattttttttttttatttttttttgtttcagctacttctccgatttttaatacgagtttcaattatacataatactactactagaaagcaaattcttgaaaacaactgaactgaaaccaaaccgttaacttgaccactcataagcgaaatcatctaaaacgctacactaagcgtttcatcagtctcgaggaactcacaaaccaagctaagatattgttactttgtttgaaatataaaattttgagaagaaaagaagcaaagatgaggataaattaccaaacaaaaacagagttgatacagagcagcagataacaccaaagctgtgcacataatctgtcataaaaaaacaaactttttttttcgacaagttttacagcaaaggaggttgaactcagattttcggttacggttgcaggtacattacataaccgtcttttcttccattagaccttcaggcctcatccatctgctcctgaataaagcagtcgatcattgagttttggggtgttattatccgaataatcttataagactatcaatatgcgagtttctgatgatgcaattgaatatgaaagtatagaattgggcaaacctgcatatcggaggtccaaagggttagattgtcccttagcaactgcatgatgagagtactgtccttgtatgactcctctcccaatgtgtccagctcagcaatggcttcttcaaaagcctagaggtgatgaatccaacaagaacaagttagaaatgcgatgataagatgagctttaatagtcttatagaatcttgtatatgtgatgcatgagatgttccggattcaatatgcaccaaaaccccgatcagattctacacaatctcgtatgcataatgtatgagatattgtggttctaaagtcttgtcattttaagagattctactgacaaaaggaataatttggttaatgtgaagcgttagtcaaaaaagttatatcaaaagaggactttgcagaatgtctttttctttagaatctctgtttattaaaaagaagtgggtccgttcagaaagaagaaagagttactttttataaacaacttgtctatttctggtaaaggtttcaaaattccttcaaatcaacccaacacaatgaatacaacctcgggccaataggaatagtaaaacaagtggacaagttagtaactcaaaatgcaaattacactctccctaaccaaacttaaggcaatgat

SEQ ID NO: 17003 - DNA, 957 bp, Arabidopsis thaliana landsberg
ctcctgaggaggtaattggaaagtttgtgagtattgaacttatgatcaaagactccaaacacattgtcaacttggagcaaggcgccacctccacacccaaggtgcaacttgttgcattcaaagcaacggaagaaaagaaggaggagtctacaccaagtcaccaagtaggcttccaatcgacgcctccaagctcgacaacgaggagatggctctaatcattaagagctttcgttaaatcctcaagcaaaggagggggaaggactacaagccccgctccaaaagggtgtgctaccggtgtggtaagtccggtcactttatagctaaatgtccatattctagtgaaagtgacagtgatgaagacaagaaggggaagaaaaagatggagaagaagaattactacaagaagaagggcggcgaggcgcacatagggcggtaatggaactccgatgagagctccaccgacgaggacgccgccaacatcaccgtcaccaagggacttctcttccccaacgttggccacaagtgcctcatggcaaaggacggcaaaaggaagaaggttaaatcaaaatcctccactaaatatgaatcttctagtgatgataatgctagtgatgaggaggataacttgcgtaccctttttgccaaccttaacatggaacaaaaggaaaaattaaatgcattaattagtgctattcatgaaaaggatgaccttttggattcccaagaggacttcctaattaaggaaaataagaaacatgttaaggttaaaaatgcttatgctctagagatagaaaaatgtcaaaaactatctagtgaactaagcacatgccatgacactattgccaaccttagaaatgagaatgctaatttattagctaaggttgattccatgtttcaatgttttactccaattctaagatgataatgatgattacttgctggattgaagattgacat

SEQ ID NO: 17004 - DNA, 2018 bp, Arabidopsis thaliana landsberg
  unsure (1)..(2018): unsure at all n locations
ttccgacgaaccctaaccctattcccttttaccgatttgatcccaattcttcatcaatcctctcaatctctcaattgaacgcttcattaatgaaagactcgtggtaaaaaaggcacgagaggaagaggaaggggatcgaagattccccccccccccaaattgacccacttcttcccagcatgtacgagttgaatcaaagaccttgaattgaggacccaggggtcttcccacacagtacgagttcacgccggtaaatcgttaaactccgcttcaagattctgaacgagagccgattgcacagcctccaacgggtccaaccgtcaaggactatcctcctccgacgcaacttttccagtcaggcgaaggatctcctcccggatctggatcgactctatttcgagcatccagatcgactcaacctagatctggaggatctgctcatcgtctagcctccatgtcgaaacaatctccagcagcggtttaacaggaagctcctcctcatctttaagctcctcatccgatataagctcttcattatcttccaagtcctttgcgctttccatgatcatatcaaatcctccacctcagcaagcatcaaaacctccacctcgagcctttgtatcacatcacagcgtttaagctcaaaactcacacgcagaggaagatgaagatgaggaagctaagtttgaggctgatgttggaagggaatcttctcccacggaagattcacttacagctctacatgagttgcttctccacccaagccgtgagaagtatacaacggtcatctctcccacatttgagcttgaaacccgatggtaagttgcatattttagggagagttgctaagttgtattaggtgtgtaatatgtgtgtgttaagtgtgtgaaaccctatggtaagcttagtttattaagttgattaggtgttatataagttgattagaataagagttaatattgagtaatgtgtgtgtgtatcctcaaagttgattaggtgtgtaatatatttaataagttgattaggttaagcgttaatattgagtaatgtgtgtatatatgctaagttgattaggtttgtatatgctaattggtttatgtacttgtaggtttggtcacgacaatggtaagctgacccggaagatcacaaaggtcttcacaaacaagtttaatgggccattttacagttggagctgtgtacctactgaaagaagacacatatacttcctcgaattcgcaataaattaacttctatctcttattaatctcttacatttggtttggtttggttgtttgatcactaacatcaaactctcctcttgttttgtagagtacacacacatggcatccatcactgctggtgtagttgaagaaaaattctttaaaatatgtcaaacgcgtatgaaggacatggtttctaaggcttgcgcaaaacgtgccaatgagcgaccgccatggattgagaagacattgtggaaggaaatgtgtgcgtattgggacacaaaagaagccattgccaagagttcaaccacatcagcagcttgaatgtctgactgtaatggtcttggtcctcacaaacatgtatcggggccaaagtctttcttacagattgagcaagagatagtaagttacatttgtttatttatagaatgatttttatttaagagtctgaattgttttgtgaacaacatttcaggaaattgagttgggaagaccacctactattggtgagatattcgttaagactcataccaaaaaagatgggacttttgttgataggaaggcgcatgaaattcatgaggcatatttgaggaacaaggaagctaagttggctgcccgtgagaatgatgaannnnnnnnnnnnnnnnnnnnnnnnnnagaactatctcaagaggaggatgatgaggtcttccttcaggtaatggtcttgatcctcttgtcttttgtttgcagtcaactgtcacaaacgagagatgggtatactttagaatgagaagcttagggaggtcatcaatggaa

SEQ ID NO: 17005 - DNA, 991 bp, Arabidopsis thaliana landsberg
tccgcttcagttctcgagtctcctgatatcggtctgcttcttcttatttccttctgtgttttaattttgaaggttttgtctgatttatgttttcttctctcttggttaaagagaatggaggaaaagtgtggccgacttttaaggaattcaaattggagcagctgaaatctgcgaccggaggtttctcttcagacaacattgtatcagaacacggcgagaaagctccaaacgttgtctacagaggaaggcttgatgatggtcgtttgattgctgtcaaacgattcaatcgccttgcttgggctgatcatcgacagttcctggtaaatttcgaaaatcttcaatgcccttatcaccaatctctgtaaagatttgatctttggggtctaaattggagtaaatgttgttgtttgattaggatgaagctaaagctgttgggagcttgaggagtgatagattagcgaatctgattggatgttgctttgaaggagaagagagattactagttgctgagtttatgcctcatgaaacgcttgcaaagcatcttttccactgtgagtaacttacaacgctattcagtttgtgtgatttgaataatcagaacaaggttggtttcatagggtttgtgtattttctagtgctgtagttgattgaatgattctgtatgttttcaggggagaataatccgatgaaatgggcgatgagattaagagttgcattgtgtttagcacaagcattggaatattgtagtaataaagggagagctttgtatcatgatctcaatgcttacagggttttgtttgacaaggttaatatattgattcaatctttctttatctctctgagtgatttgtattcaaagtcgtaaattttgttttatcctttgttggtttacaggatgggaatcccacgttgtcttgttttgacttatgaataatagcagagatgggaagagttatagcacaaacttggcatttactcctccagagttttt

SEQ ID NO: 17006 - DNA, 1120 bp, Arabidopsis thaliana landsberg
ttcttgcgagcaaaaagtactatttttgcttagagtttggtgggttttctttttcgtggtttcttgctaccatcttgtggtagactttgttctatacaagaagcaaaaaatggtgtcagttcactttgtaatttctgatttggtgggcgtctgcgctggcttgtttctctgttgttcgtgcttgtggaagaaaggagaaggtgaaaggatcgaccttctcaaagaaccactcttgagcagtgctgaatctagtgataatgaagaggtcactgcacctttttcaaaagctgggattctaagccgcatgagtttctcctggatgagccctttgattaccttaggaaatgagaaaatcatagacatcaaggatgttcctcaacttgaccgtagtgacacaactgagagcctattttggatatttaggagtaagcttgaatgggacgatggtgaaagaaggatcaccacgtataagcttattaaggcactcttcttttcagtgtggcgagatattctattgtcaactctgtttgcttttgtctatacagtgtcttgctacgttgcaccgtatctcatggatactttcgttcagtacctgaacggtcaacgacagtattcaaatcaaggggttgttttagtgacaactttttttgttgctaagcttgtagaatgccaagcgcggaggaattggtatttcaggttgcagaaagctgggattggaatgagatcagtcctggtttcaatgatctacgaaaagggcttgacccttccctgttattcaaagcaaggacacaccagtggtgagatcataaatctcatgacagtagatgctgagagaatcagtgcttttagttggtatatgcatgatccatggatacttgtcttacaaatcagtttagcgttattgatcttgtacagaagccttgggctaggatcaattgcagcttttgctgcaacgtttttagttatgctgggaaatattcccttggcaaagttggaagagaagtttcagggaaatttaatggagtctaaagataacaggatgaagaaaacatcggaggccttactgaacatgaggattcttaaacttcaaggatgggagatgaagttccttcataagatt

SEQ ID NO: 17007 - DNA, 1065 bp, Arabidopsis thaliana landsberg
gcgtggatgtggcaggaactccaaatataccagttgattgaagatactaccagtaggaaacttagtctgtgcatgattcagaattagtacatttatatataaacaatatgataaaaactaatctaatcaattgcaagaaaatctaccatcaagggtgagaattctaagaacagacgtttgactgaagttagagattccagaaggttcttattgattatctgagaggaaacaatcatacttgcctccaccagctctggtacgttctctatcagacagaacccaatttgacctacaatcttcaagtatgttaaagaaggagaatttatcacatatccagcacgcggatcaacagtacttgatgtataaattgttagtctctttaaggatgacaccgcaatagtgaatgtctttacactgctgaatggatatcgatgcaccaccaagttttcaagattaagacagccagataaaggttaagagctgattcattgtcttttgaagtccacatagtgaaggtgcagagttctaagggatttcagacaaatcgaagaagggacatccataagaatcgaatacttgagttccaagatatctagcgtttcacagttatacaagctttcaggaattgagaaccgtcccccgtcaacttcgagtaccaacttaagcaaattgcaggcaaatgcaatgccaatcaattttgcagtattcattgaattacataaatgtaaatgaactatgagatgcaaactatgcagaaccggagccttatgtgaaagcagagcccttttaacattctttgaaaatgttttgaattcatgtctctgatctaaagaatcaaagttgagtttaggcaacatcttccacagaaactgccattgcttagacaaaacactcgtggtaacagcaacttctgtaggaagcaaagacagtatctgaataatcaaagcctcaggcaactgactgatcctgtccgcattcacaatacctcgacctcttttgctgccaaagaccacaacaaaagacacgaattggtttttaagttttggagattactgttaagggatc

SEQ ID NO: 17008 - DNA, 700 bp, Arabidopsis thaliana landsberg
tgcccgacaaaaggcactcggcaaagaggccgacactcggcaaagcctcggattccggtagtgagggatgacttaaatacaaataaaatgtcttcaatattggagtaactttgatggaacatatattgtcttaaaactataagttagaagaaatgacttaaattcaatcctataatgcatgaatgaattagatggaatataaaattgtcctatgagttggaaaaaatgagctagctttaactgtttaatagcaagaacggcttagatgtaaataaaatttcttaaatactagaatggtttagatggaacatatactgttttaaatactataagttgaaagaagtgtcttagattcaatcatgcaatacataaatgacttcgatgcaacataagggcttgttcgtttgtgccggattggtgggtcggaacgattccgaaccggattgcttctctaatttatataaacttcgattagctggaacgattccgggtgcaatctgacagaaacgaacaaggccttaagtagctttcttccagctatttgtgtctctggtctccttcctatatctcaagaattatataggtgaaattaataaggtgttctaaattaactgtaaatctgcatttctgataatatttatgttcctttcgtgtgtataacataaacgttttatattccttcctgcttgggtagctagct

SEQ ID NO: 17009 - DNA, 894 bp, Arabidopsis thaliana landsberg
ttctcgacctcgtttggattaggtcagatcctcattttacaactttggaagaagactttagtttgggctttgcccatcttgggaccttttgggtggtatagaggcccgttaaggtttttgggctgctttcttttggtctgccctaatgttgtgcaacgctcatcatttgcgtccacaactatatcggtaaacctttgtctctcccttagttacatgttgtcttccgcctgtttcgacattcaatgattcatcggatacttctccgggttccatctgcttataccggatacttctccggcaaacccattttgcttccgatatagaacgacatgtgttggtttggatcccgtcaatcttcagcgaagtttgctcaccggatacttctctagagtccctatgcctacatctaacgcaaatttaggttgttttcaatctagaagcacgtttgatagtttgaattttgtctcaacgtcacattgtacttctctttgtactgtgactatctccttaccagtcgaggtttttgtgttgtttgcgatttctctcatatgcatgcttgtgattgttggtttcagcacttctcatggtcccctatcaagcttctttcagcttgtgtctctatgttttagttattttgggtaaaacgctttaatcttcaaacttgattttcgggtttgtccgttgaagcttaatcttcctgtatctttctaatatgaatctatgaatttggtgcacaaaaaagaaggtttaaatcaatatggagtgataaggcacattgaatgtatgaagtttttaaatttgtgggatatgtctttatttttttgccaaaaaataataattgaaatttttaattaatgaaatctcaagatgatgtggcgtattgagagagtgttt

SEQ ID NO: 17010 - DNA, 2140 bp, Arabidopsis thaliana landsberg
cgatatttattgtaatgatatctaaacaacatggtgaatgttaatcgatcgaataagatatgaaattaaagtattaactaaaacctttgggagaacgacctgtgtccccctaccaagtttcacattgtatcacaactacacagaatctaacactcaatctcggtccccatggaatgaaagttaaaaacatgcttccccctaaatcgaaagttacagactctgatccccaaaaatgttaattccatggtttgccttcggtttattatacagaacccgatgtcaaaccaaaacccagaaggataaaccgaattaaaccttattctcgaggtatcacacaacccaacccgataaatacaatccccaaattgagaaatcctagaaccctaatctcgattgttcttcttctcttttcttcaccattttcgaattcaattctgagcttgaatatgagcaattcatctggagctacgagtggagcatcaaatgttggacagagaagaagattcgtgggtgtgccaaagatgtgttggtgtggtgctactatctcggcgctcatgtctaagtccgcttcgaatccatatcgacgttactatcgttgtgcttatgctgcaacacataaggtaatgtgattgatatttgagttgtttcatacaaatttatagcctaattctctgttctttgtagcttgttgatgataaccacacattcaagtgggttgatgaagcattgttagatgagatagagagattgactcgaagaacggctgcacttgaagaaacaatgtcccagattacaacagagaatatggaacaccaaaagatggtttttgagaagatgcaaatgaagctagagagagagattgtggagagtgtagaagaagaactgttggaatcaaaatcaagcatgaagaaaatgtcgattgctgtcattgttggttgtatgatcatgctaggtttgagtaaggtgataggttaggtttgagtaaggtgataatttaaatctagtgtattgggttgttgttgtttgtttgttttcgctttctgttattgttgttgtagtgtactaaccgttgatcgagcttatgtttgtgtaatgaaaaacccaatttggattcttgtgcttgttgttgttgtttgttttgttgtgtttgagaatgagtaaaacaaagacaaatggccaaagaagacaaaatagattcgttgaatgagtcaattggtgtattctaagaaatcaccaaacattattgaggcaaagaacatccgaaacaaagaaatgaaacatccataaccaaaattacataaccgagttaagttttaatcagatggtaaacaaaaactagacccatctaatcctcttacacctaactaatctccttctaatcagccttgagacatcacaactccttgagacggttccacttggctgccttgagtgccatgagtgctagggcctagactgccttgagacatcagtccttcaaaggcctaatacacattttaaagcaaaacaagagtcaaactattttataggcttaatacacgttttaatgcaatgcaaaacataaccaaaaggctaacctgtactgaagactttttcttcttgtggaaccttgagttgtgaccagctgcattacaaataccacaatgcattacccttttcatttgttttggtgccatcttagtaggagtctcattctttcccttttttctcttcttgtcttttttagtctcttttcctttctttctcccaggctgtggtggtggtggtggtgcatgcacatcaggatgttctgtcgatggccaaaatgcaggacctctctgcggaaataggccgtctgtgtaatttttcttccacatgggtgtccgaaaccagtgacacacataatcttcaacctcttgcttcttgtttaacatgactccataagcatgctcacaaggaatgccacagatttgccatttctgacaagtgcaagtcctctcacttaagcatatcctatgagaaactcgttacctatagtagcttcatacatatcattagtgcttcttcttatggtcagctctgaagcttttttgaattctttggcaaggaagttactaacatatggcgtgcatcacgccttgtgctcatgagattcaacagc

SEQ ID NO: 17011 - DNA, 675 bp, Arabidopsis thaliana landsberg
  unsure (1)..(675): unsure at all n locations
caaaacagccgatccggaatactccatgcctcgatggtgcccagcaggattgacacgatcccaaaagagaaaattacagcgcctaagagcaaaggagagccaagagaaggaggcggaaaagacatttaatgacacacatccattatacccgccaccgcaaaagaaatggagaccgaaggccgttgagaaaaaacaaacggccacagaaatagaaagtcaatctgcaccaagcacggaccgtccggcccctacgcacggaccgtccgtcgttcaccaggaagtttctggacaacctgcaccaggcgcggaccgtccggccaccgcacgcggaccgtccgccgttcaccaggaagcctccaacgacacgacaacatcaatggaggaagacaacctgcaaggagaagacctggtcgactacgaggcttctccnnnnnnnnnnnnnnnnnnnntaaatattattacattttctgctgattgtnnnnnnnnnnnnnnnnnnnnnnnnnnnnnnnnncagtttgattttggtcctaaagaagccgcctttactaaaccaaaagaatcggtaaatcatttaaagccgctcttcgtgcgcagccacattgatgggataccgattgctaagatgttggtagatggaggggcggctgtaaatctaaccccttcctcattatacag

SEQ ID NO: 17012 - DNA, 1790 bp, Arabidopsis thaliana landsberg
gtcgggaccctcttagtgatgcagtgcatggtctcaaggctatatcttcttggagaaagcttttggaagtcgaggaagatcataatatctgggtagtctcaacgccttatagccaactagtctcggaggtagtgttacctgctgttcgaatagcaggcattaatacctgggaacccagagaccctgagccgatgcttagatttttagagacatgggaaactttgctgccttcatctgtattgcaaacgattttggacacagtagtgctaccaaagttgtcaactgctgttgaatattgggatccacgaagggaacttgttgccatccatgtttgggtgcatccttggttgcctatacttggtcagaagttggagtttctttatcagatcattcagatgaaattgagtaatgttcttgatgcttggcatcccagtgattcatctgcctacactattctttcaccatggaagaccgtttttgatactacaagctgggaacagcttatgcgacgttacatagttccgaaacttcagctggctttgcaagagtttcaggtaaacccggcaaaccagaatttagaacggtttgattgggttatgaagtgggcatctgcagtacccatacatctaatggctgatatgatggagaggttcttcttccccaaatggctggatgtgttgtaccattggttgcgtgctaaaccaaggttcgaagagatccagggatggtattatggttggaaagagttattcccgcaagagcttacagcaaatgagaggatccgaattcagttaaagcgtggtttagatatgttgatggaagctgttgaaggagttgaagtgtctcagccaagagcaaaggcaaatgagcgtacacagtccgtgccggctcaggctcaagctcaggccaaggctcagatggatagcactgaagtgttgagtttgaaagaagtcttggaagtatttgcgcaagagcaggagttgctgttcaaacctaaaccgaatagaatgcacaatggtcttcagatatatgggtttgggaatgtgagtgtcattatagactcagtgaaccagaagctgttggctcagaaagatggcggttggtttcttgtaacccctgatgacttattgaggatgcacaacaatacaactgtttctgcaaaaagatagtttcatttcattttgtaagtttcctgatgtataaaccatcttcaatctcatcacattttgtctctctgtcttaaatttcatatctttgacttcttcttatttagataacaaaactctaataattcttgtgaagtttacactttttttttttcttgtttcttcatagagtaagtaaaaaaggaagtagataatacaacacacgataaagaaacctatacaaacatttttagagtaaccccacaagatgattgatccatcaccagtcgtctgctcctttagatacacccagaatcacagcgattgttgctagaatagcctgcaacgtttagacatgaatcaatttaatttaatttgtcgggagtccaatgggatataaggaaaaacgagagaagataaggacagagagtagaagaaatattacagcgatagtgcaggcaatgtatcctggtttctccctgtaatcgattctccttccaaacatcatgatgaacaatccgacataccaagggattgctccaaggaaaaatccaacaatgaaccttccacaagaccaaatattttctcaggcatgtgaagagagagggagattcagaaaatactaagctcgtgtttaagagaaat

SEQ ID NO: 17013 - DNA, 855 bp, Arabidopsis thaliana landsberg
  unsure (1)..(855): unsure at all n locations
agatttggttaatgaacttgttgtctagggttaatttatcgagcacgtcaatcacctctaaactgaggaaacaaaactactcaattatcccatcctcgggaattctctatctgattgaattctttgtttattccactgttgtttactacatcttatcatctgttgtttaatttttgcaattcttccttgttactcgacctgatactcgaccacccagttgtctggcaacagactgtgcagtcgagtgtctttgtttcatattatgtctgttactcgacctgtcactcgaccacacccaactgtactgcaacgagctgtgttggtcgagtgttttactgtctctgcttgattctctgttttctgcatgttcacttaggactgctagaaattccaaaacctgttattgcttggcttgacttagtgacttctgatcacatctcatctgtttgcattacacttaaagtggattgacacctaaaatactacaacgacacgatattgttttaggattaattgatcttaaaaatctnnnnnnnnnnnnnnnnnnnnnnnnnnnnnnnnnnnntccattcaaaaagcccattcactcgggcactatagaggttatccattccaaagttactctatcaaatgacccttttgttgatcccactccatttcgatctccctttgaaggaagcaattacaatatccaagaggttattgcgccggtcttggctcacaaaccaaaaagacgtcgctctcgctctaccaagcgttcgagaagtactcctcgaaattgaatgaaattcttgtggaggagactcttacaatctcacggctatactctggcaaagcaaaacaaagagaacaaaa

SEQ ID NO: 17014 - DNA, 2215 bp, Arabidopsis thaliana landsberg
caaaaaagccgacctaaagaaggatcaacaaaagacctaaaaaccctctgtcttctcttcttcttcttcttcttctccttgctctctcatgtcgtcggcggcagattattcaatcgttaggctatcgttccgacgctctacagtcattacaaacatttcaatacaacaaaaactcatccttttcttctcttattaaccataatttcggattccctttctaagtatacagctttcccagaacgagctcttgcaaagccaaagaatgtaagtatttgtttctttagggttttagcgaattcaatcttagtaagtcatcttcttcttttttcgacctttgtataattgcaggtcgaggatttgtgttaagaatttgccaaaacatgtgaaagaggatcaacttcgagatcacttttcacagaaaggagaaatcactgacgccaaattgatgcgttccaagtatacttctactactctatcaaactccattgttctcgcaactaaattttgtacttttattgattgttttaatctgaatcacactctgttttttttgtgtgctttttgcagtgatggtaagagtagacaatttggttttattggattccgtagtgctcaagaagctcaacaagctattaagtacttcaacaatacttatcttggtacttctcttatcattgttgaggtttgtacttaaaactatgacactctgttttaacttctgtactagttaggaactctgatttagactttcatttggcttatagattgctcacaaagttggagatgagaatgctcctcgtccgtggagtcgtctttcacataagaaagaagaggaagctaaaaaatcttctagtgaaggcttaaaagatggtaatgctaaaggaggtaaaaagaggaaagcagaggttgatgatcctgaatttcaagaatttcttgaggttcatcagaggagtaagtcgaaaatctggtctaatgacatgtcgattcctcctgctcctgaagaaactggtaaagagaaggtcttggtgaagaaagcagatgagcaaatagtttccaatggtgttgagcctaagaaagctaaaaaatcatctgatactgaaaagactaaaaagagcaaagttgttgctgccagtgatgatgtttctgatatggaatacttcaagagtaggattaagaaaaatctgtctgattcggagagtgataatgaatctgaggatagtagtgaagatgaagctggtgatgatgatggtaaagctgagacagatggtcaggatgctgatattcgttattttcctattgatggcgatgttgaagctggcggagttggtaaagatgatgatggcgatgccatggaagtagaaggtgatggcaaggtggctcaagaatcgaaagctgtcagtgatgatgttcttgacactggtcgccttttcgtccgtaacctgccttacactgcaacgtactagatcttcttgttcatctcatacacttgttttctgtttatctttctgttattcatcttatacatctctgattgttgtcaataatctcatgcaatagagaagaagagcttatggaacattttagcacatttggtaagatatcagaagtccatcttgttcttgacaaggagacaaaaaggtccaggggaattgcctacatcctttacccgattccggaatgtgcggcaaggtattatttatgtcaaaaagtagttttattactgctggtaaccccttgaggtctaagtgcatgcttttcaagaagtagccttgtgttgagctctagctgttagttcaggttttaaaacatttgatggtgatgcagggcaatggaggaattagataactcaagttttcagggccggttgttgcatattttgccagctaagcaccgagaaacatctgataaacaagtgtcagtggcctaccctttctaagtttgggtcttccaacttgcaaattttttttggactagcttttctgttagttgtttaacatggcctttttcaacaggaatgacacttctaacctgccaaaaacattcacgcagaagagagaggaacaaagaaaggcatctgaagctggtggagatacaaaggcttggaatagtttattcatgcgacccgatactgtacgtttttcctgtgtaaagaatgcatcctttagtgtttttaaatatagcttgcttcaagtttttttcttttcctttttggggc

SEQ ID NO: 17015 - DNA, 952 bp, Arabidopsis thaliana landsberg
  unsure (1)..(952): unsure at all n locations
atcgatatcatataaaataaattccaatgaaaatggcaaaaaacatcaagggacctccacgatttggagattcccgcattcttctatcttccaattgctttcgttgtctaatgtgaactcaaagacaagctccgtggaagtcacctcctctacttcaagttcaaatgtatatatatgctctgttaaaactggatatatataacagccgcttggtgtacatagaactttgagatcattctgtttgaccctgatgacaataccaacgcccatcgatatccaatcataannnnnnnnnnnnnnnnnnnnnnnnnnnnnnnnnnnnnnnnnnnnnnnnnnnnnnnnnnnnnncttgattttcaaggaatccccagaagtagctcggtaattgaagcaggcaggcacttgtgtaccgggtaacatcgcatctatacaaggtgatgtgtgcatgatgagatctctggcttcttgatttagtttgaagcatttggggaaatggagactaatccatggattgttaaagggacttacaattatcaagggaatctgaaagttgggggagtgataccagattattgcagttgtagagtccaagtatacgtaaacgagacattctcttgacccatggaggaacttcttgtatatctttgctcaactgcagctccgtgatgatgtcaagagcatgcgaaaattccttgaggctttcaaagtatgacatctgaaataaagtaagacgagaccacgacatgatcgacaaaggaacttcttttattgcagttcctgtgagcatgagaagctcaatgtgtgtggagatctcaggaaaacgtttcaactgcaagcaatctgtgagattaagtgtactgagagctttcaagttgatgttgattggaagagtctctagctntgagcatccgcacattatcaacacacacaatttttgaaggtttccaataga

SEQ ID NO: 17016 - DNA, 627 bp, Arabidopsis thaliana landsberg
ttcaagtgcggcgtgggtggtaaatgtaagtggcaagtttattgttcctttgtcaagacgaagcaactttttgtgatcaagacatcatgtacattgcatacttgcaccctaacagaaaatgcatgatatcaacatgccaacaaagatatgctaaagacattagtttggaaattagcctatagctacaatgagaaagagtatgcttccgatcttaacatcttgagatgttatgatgatgccttgtctgatgatgtgatgagagaggagccacatacatggtcgctgtccttttatagacttggtagttgtttagaggatgtagacaacaacgctaccaagtcattcaattccaccatcatcaaagcaagagcaaaggcattggttccaatgctggaaaccataaggaggcaagaaatgacacgtattgtttagaggaacaagaaatcactgaaccaccaaggaagatttttaaaatatgttatgaagatagatgcctctgagaagaatagttgagataaatgcacaatatactgttgcacacatggcatatttgaggtatatttaagatggaaatggtaaataaagttgaccttacccaaaaaaaaaaaatgttttttttagggaaaa

SEQ ID NO: 17017 - DNA, 609 bp, Arabidopsis thaliana landsberg
tggtgatcgaagctaaatctataaggaatttgaatctttgtatgtgtttttttcgtggagatgagaagcggcggcttggaaatgatgtcatcttcagcaatcgtagcgtttaatttgaaggagggtaagaattggtggtgggatgtgaatgaatctccggtgtggcaggatcgtatcttccatgttcttgctgttctatatggaatcgtttccgtcattgctgtggtaccgtttacttgtccttctggttttgaattgggattggaattacggaatgtgttgatttggaatcggaagattaggcatttaaggatctgaaattgaggaaatagttgttgtatggagtgttgattacagaaaaaaaccctaaattgattaaagttccatttgtttttctgtagattcaattggtaagaatacaattgagagttccacaatatggctggacgacccacaaggtctttcattttctcaatttcatggataacggaggtgggtaagtttgtctcttgaaagtttttgagtctgttttgtgtatcttttgacgattggctcgtctttttctttgtaaatccagcttctggttttctcttccggcgagaagcacat

SEQ ID NO: 17018 - DNA, 908 bp, Arabidopsis thaliana landsberg
aggagggacctccatagactccttgcataattcacaaggaaccttctcctctcgtatcttcaagaagacgacagcatgatcatgacacagcggatgttcgatagcaggcggtgacggtttcataccacaagtcaaatccaccttgaactcacatgtgggacaactataacagggagtcaatagcttttgtccacacaaatcacatggaccatctttcgagtcattggtgagcaggagaggatgttcagggtgggaactatggctgatctcccctggggcctcagcacagtccttatggaaccaaacataacagtaaggttcattgcaaaagtagccggcgtacatgaaaccatttacatggcagccatcacattcatcatcaatacatcgagccgaaggaaaaagagggtgctcatgaattggtaggtctactgcttctgtagccattcttttgatcgggtacaaatgaatgaatcaaaggggtttgttaattagtttgatgagatctccaagtgaagacggaagactttattttatatttatgatctacataaattgggtggttggtgtatcccatcaataatcgtcatcaagttggtgtacaactgttctcgtttggttcataccataaaaacaaaaaaaaaactattttcctgtggtgctagttcgattgggccctgtaatacaattctcatgcttttaaacgtttttttcttctccaacttcaaactaaccaaataacctaacgcatcaagagattcagagtcatgcctttaatgttaagggatccggatgttggaatctagtcattgttcaatcctcaaattggtaaaatggaactcagcttgagaagagaacacgatcaaaagagatgaagacgtcgtaggaaaggaagagtcaaacagaag

SEQ ID NO: 17019 - DNA, 1616 bp, Arabidopsis thaliana landsberg
cgtcgacactccggttcgcctgctatgtccaccggttcgcctggtatgttacaaaaaatttgttcccaatcaaaaaagttttactaaaacagtacgaataaaattaattaatttttttttgtataatattcaaaaataattgtatgcattatcatgtcttcactaattttcaataacctctatcttttctcaattcgcgcgaatcatacatgcataacgctattagctaattgaaatttcttttatctgaattattttttaattagtaaaatagatagtataaagtgtaacattcttctcctatataaagaaaaacgaagcaaagtttataaaccaattgttctttctcacaaacgagtgattttcatatttcagcacaatctggaaaaaaaagtagattcactattttattttcagttatatacgatcaagataataattaatgtttatgattaatttacgttgctaatttacaataaaaataaatataattatgtgaatataattttttttatataatatagttttcttatataacacattcacttttttaatacttcatattataattttttaatgattacatttttgttgaaaagtaaaaataattttatagattgtatttgtattatttttataattagaatcatttattatcgtaaaatataaatcattactaaaattttagtaaattaatttgtcataattaatattgaatgatagtgttgaataataacgaatcaacaattcgagatagtgcacaagagttactagaagattagtgagaagaaatatggttatttctcaaaaagatatgtactttcaagaactatgtttatctaaagccaaggatgagactttcctacaaatcgtcaaagtccctatatccacctataccattaatgctcaacctcctagtagatctcgtagactttctgtgcatagtcgtaatgcacttcacatattgatacatggaaaaagttcaaaaaacaaattagatctctttgcgtatacaatcagttccagacttggggagtttggcgttgctaagattattagatctaaaaggagtaaaagtttcaaggagccaagttaccttccagcatccacttgagattcttgaacttatacgaggcttgggtatgtcatctttcttcttctctgcggaaccttaagcgtttgctctatttgaacttatatatgttaattatccgcgtccagttcatgtgccaaatgttttaaaagagatgctagaattgaggtatttgtttttacctctaccaatggatgatacaacaaagttggaattgggtgatctagtgaacctggagtacttgtatggtttctcaacgcaacacactagtgtgacagacctcctccgtatgactaagctccggaatctcactgtatctttgagcgaaaggtacaattttaaaactctatcgtcatctctccgtgaattgcgaaacctcgaaacgctttatgtccttttttcgcgcaaaacctatatggttgatcatatgggagagtttgttctggatcatattattcatctaaaagagttgggattggtagtacgtatgtcaaagattcctgatcaacatcaattccctccc

SEQ ID NO: 17020 - DNA, 1415 bp, Arabidopsis thaliana landsberg
cgttttcgtgcccagggaagaagggttccctcggtttatgatcttttgacgaacactttccactcttttagcattaggccttgaaggtagactaataccacaatcttctaactttggtttagtaccatcacaatcatctccattaccatatatcggaatcacctcggcgtcagtcacttccccatcgcaaaccggacattcctttatgtttaagtaaattaaaggcaactgatagaagcaaccccaacagaacaaatgaccacaacaagtcaaaatcggatcttcagctttctctaaacatatgttgcagtcaaagaagccaccaggaacagagcttgttttctccatgttcaatgccttggctatcaaataagtcttgttttcgccattttcgacaagtctctctcgagaacgctcatgtataactcctgcagttgaatctctatgttcgttaggcgacaccaaagccggtgttgttgttgttgttgttgttgttatttctcgttccctgattctcgaaactatcacttcaagctgtcgtatgcgttcttgaatccgctcttgagcagattcaagctcttctaacattggagaaagggccgtcatcaaaccacccggagactccgactcagaagacggctcttgattcaaatcaagatccattgtctctccttgaacactagttgacatgagagctcaaagaacaccaaaattaacaaagagattgtgttcttatttgaacagatcaatcaaacctagaaacgtctctctgtcaacctctacgtttccgatccatagatgatagatcccaccacaaccaattcttccaaaaccaataaaggctcagcctttttcttcaatcgattgaattggaacttccccagattccgaaagtaagcaacgcatgcatctgtatagaatcaacaacacaaatcacaaaaaggaatcaactttgaactaatttgcctaacggaattcaactaaacgatttcaggaaacagataattgatcggacaatcggacaaaacagagccatatatgaagtttgacgagaaagaagagacctttggagagagctagagatcaaaggatgacgtagatttcaatggcggtgcagaccatgatgatcggtggtgagagagagagagagagagacaccgatagaagaagtaggtctttggatatttaaaccaaaaacttttttttaatctctgactttaggacatgattgtcttcctaatgtttaaggtttgtggttgcgtcagttaaattgtttgatctatgttgtaagaaaatatataatttttgttggcatacttgaccaacccatatatatttatttaaattaaacacaattagttaacatatcttgactattaaacgcaaacacactccgattcataaaaacaatcaaa

SEQ ID NO: 17021 - DNA, 1369 bp, Arabidopsis thaliana landsberg
aaccgagatataatttcggcctgttaaaaatcatggagagattagcaagaagctgtcaaaaatcatttttagatggggagagagcgtgcagtttcattaacctacctttggctcattgtagattgtgtgaagagagtcgacaagagggtggtcaaacaatgtcaagcagcgatcctggctgaatgcaatgagaggaattctatgctccaaagaataaagacaggtctgtatataacaaatcaacattttagtaagtataagataggattcctagaactcagttattcaatcacgatacacagggataataagttgagcactatcataggtacttaggtagctttttgctgcttaacatggtagagaattacatgatgcaaagagactgggttccagaattctaatgcatggtttgtgaactaagccgaggatgtgagaattaattctgtgagtcgttgtagtctaaatcctaagtggacttacctctctgcagacattttggtctaagtttcctcgatacacttctttcccttgtctaccatagacaagtaatccctgtaattaaacagatatttagtgagactacattgatattggtgcacctcactagttccctgatgttagagcaagtaaacctgaacgaaaacgcctggagaggactctgagataatgccatcggatccagttagatcagccgtcttcaagattctgatcgcacctgggcgggactgtgataaataaataaatttaggaacatatcctatctccaaaacatttcaaagacaagcaaatattaaaaaataaggaaagatattgttggacagatcaaagaatagtccaaacatgaagtcattgtaaaactgctgtcttctcaccttccccgtagctatgactactttaagtcccctcagaagggcttcttttaaagcttttgcatttgcctccgaaatctgacttttactgttaagcagtgtacctaatagagttcacatcaaaatcccatgagaaagcgaagaaaaccgaaacaaacaactacacattattaaataagtaaccttaccatccatatcacagaatatataggagaactttggtttgtacaatcttaggccatccccttccttcctgtctaataacagtagtctgtaagtttatcttagcaagaacaagaagataatagggggagtgtaaatgatcgttacacagttgcaatttagtatacacaggaaaaataccatctgatttctccggctgaactgtagttgttttttgaatgtcatatgcactctgaatgagtccttttcctttccacccaaggttttttagcaacaaactcctttccttttccatttcttgctcagcctcgtcg

SEQ ID NO: 17022 - DNA, 1387 bp, Arabidopsis thaliana landsberg
aaagccgttaacgggaattgttggaaagaaaactgttaccatttcttgaagaactttcacaaaatatttctgaccagctaagtgtttgggcacggcaagacctccacgatctgagtttctacagtttgatgttgtctcactcttttggatagcatcttcagtgttccaatgcacccacatctgtttccaaagtgtatcaccaatccacggtggttgatcaccactctactttgcttgactgacaattcctttcatccttttcttggcaataaccaagtatccttctttgacgagcttagtaacgccttgatccgaataatacttccgctacataacaagcagctaggttagcaaagatactaagagtcagtcaaagtaaacaataacagaatgataagtaatagttgacattaccgcaaaatttctgaagtatctctcttgagtagctattggagtaaccttccaactgaaataatgcccatcaaacttcctccaaactattccagaaattactctagacagctttcctttgtgccggttaaacctgtaaaagtatgacagagtattaaacaccaagacattgcaaatataaacataatcaactttagctgatgcaaccaataaagaattagctttcatgaaatagttttaaaacaagaacgaatgagctaaaataggcctttaagcttcaagtcgaatacaaaatagttttactgaagaccatatcagcactagagcaaatacagaatctcaacagagaaacaagaacgaaataccataacataaggctataaaacatgaaataatgagctaacataaggctttagtattcaagtcgaatcctaaaacgaagactgaagaccagatcagcactatagcgacacatgatctcaaatcaaacaggcacgatcaatgacaaaaacatatccaaatgctaagaaaaactcagctcaattaccaacaaaaaatcctatctatttaaatactcgagaaaaagggagatattaccagagagtctcgactcctgggattggatccttagacagaatcagaagatgttgtcggcctggcagagcaagtaagcgatccaatagttcttggtaatcgacattagggttttgttcttcttcctcgacttcctcatcatcttcttctccgacttcgccaccaacttcttccccatcgtcctcctcatcttcctcttcataattaaggttttgatggtttggtgggagctgttgctccggagtctgagcaggctgttcttgaagaggaggaacctgatgttgacgagcagcaggctgttgctttcgaccaacaagaggcggttattcagacccagatggcgagtgttaaagaggagtcggggtttttctcatttaggttg

SEQ ID NO: 17023 - DNA, 855 bp, Arabidopsis thaliana landsberg
caagcaatagtgatacatgaaaggttaaaaaatatcttttctttgatttttgaactcgtctcttttcggagcggaatatcctctgctaacaaatgtcatgtttgtgaccatacatgtgctggtctagatagagaatccgacagaagcagcatggcaaaaaaaatcctcagataatctccaaaacaacactaacttgcttccaccagaccatcaataaaaacctgatcatcatcaagaataccacgtgcaaaaacatgcttctttgtaacatttgcagacaacaccattataggttttgatttcatcataactcagtgggcctttcacaatgtttagcagaactctaaataaatactcatcttccattttccttggaacatagtgaatgcgacttaaagaaaaaacccttggatctctttttaaacgccttattttctccatcccatgtgaaataggccggaatttcagcatataaacaatctctagcacacttaccattctttccaataacattttttctattcaaagtgagccaagccataaactgagagtcttcatttgctactcgttctagaacatctttaatgttagactttggatcaaaataagctggttgttttccttctacatgaaaagataatttctggacaggagttgatttatgatgaattggatatttaaatatcctccaaatagcttcagatgcggaaacgtatctgcaaacaattcatcatgattgacatgaattattgattaactatcacaccaaaccaaattattaagtaaaaaacagagtaataagctaacctgcaatcaaaccaatctttgatctcactcttcttcttcccagctgaa

SEQ ID NO: 17024 - DNA, 1079 bp, Arabidopsis thaliana landsberg
cgctctgatattccataaagcaatggaaatatggaatggaagaaaacatttgaattttacaagaaacaataaatagaaggcctacaaaacatgacaacccacacacacacacacgaaaagagaaaatataaagaaggacatgtaacgtgacgtagcgtagatctccattcactccaatcgttttgcatggagcatgcatgtgtgtgtaccgtgcacgtagtagagaccacacaactccttcataaaagccctctctctcttaccatcaccaaaacacaacaatccgatcagaaaatatgagcgaagaactaagtcaaaagccatcatcagctcagtctctgtcactgagagagggcagaaataggtttccttttctgtccctgtcacagagagagggcagatttttttcttctctatctctttcagagagagatggaagaaagttttcttttctcagtatgttctcttttctcatgccactgttggaggttattaagattattattgcttctgtggcctccgtaatcttcgtcggtttcgcctgtgtaaccctcgctggttctgccgcagcattagtcgtaagcaccccggttttcatcatatttagtcctgttctcgtaccagctacgatagccacggttgtcttggcgacaggattcacggccggtggctcttttggagtgacggcacttggtctcatcatgtggcttgttaagtaagattattataacagcttatattgagatcactcgagatttatgcttaattatataatattcataaacctatagtttaaaagtatattgaacttcatttgttaacgtactttatagatattgaacttcgttcgttttcttaattggtctctaagtatatatacatacttttttgtgtgatgcagacgtaggatgggagtaaagccgaaggataatccacctccggcaggacttccaccgaattcgggagcaggagcaggaggagctcaaagtctgatcaaaaagtcaaaggcaaagtctaaaggtgggcttaagagacttggtgtaagaagatgttaaaaagtaaattcggtggtagaaagg

SEQ ID NO: 17025 - DNA, 1443 bp, Arabidopsis thaliana landsberg
ctccaacaaatcgaaatgcatatgcagatgctagcagaggaaatagcctgttctgctgagttttataatcaatcacctgtgataacaacatgcagatatatattacatttccttttctagccaacataatagtcagcagacgttaatgagagttttaaaaaacctataaaaacgccaagtcgaagaaaaagagttcagcaggaacttacagacaaatttggctaaaaccgcaagatatacaagcaaacatactttgaaatttgttatgatccaacatcaataggtgtaaacaaccatgcacatgaaatgggttaataagtacctgtgtctcaatgccaccattatgtgcgccaaactgcctccgcactgcgctgtaccttgtagctatgcaaactgctcgagacagcgcggtggaagcatttgacacaatagactgtctcacatacaccatagtaccatacaccaattgccttggaacatctgatgctacatattttccttctcttgtaacttttgacagtctataagaagaaaaatgcacaaccataaatctgtttctcttagggatattaaatgataaaatgcttttattcatagaaagggccaaagagagaggacctcatgagcatttgatctctaggaatgcgaaaatgatcaaacataagaaaaccattgtccattgagttatatgccccgtttccaaacttcattccgatatcaccaacggttatacccggaagaggagaatgatcatccaaactacgcagctgcacgatgaatcctgaaaaacagaaaaatcttgttactcaatactacagatgattattaaaaaaatgaataagaaatcgttctagtgccttaccatgtacaccatggtctttgccattggttattagacgagcataaataacagcatgagtagaaacttttcctaacccaccaggccaccactattcaacaatcaagacagatgaaaatcttaaacaactaagagagactgtgcataatactcaatcaaaggattcttggtatactcactttggatgcagtctgagttggagtgtgaattacaaactcatcagtcttgggatcaaatgtggcagttgtctcaagtccttgaacatttgagccatgaccaagctcagtctgtgcataacacccaataatctgcatcttattcgccagcgacaaccacttcttctgctgctcctctgtaccctgccccttaatagcaggcacaaacattccctacagacagagatacaaaaaaacatgaatcaaagaatcaaaatcctgtctctagaagataaatgagacgtaggtagtacccagtgcagatccacataggcaggctgatcgataaagtgcctcaatcttcctgcttcttcctctgtaacaaacaaaaaatgaaagagcacaagaataagacgccataacaaaacc

SEQ ID NO: 17026 - DNA, 541 bp, Arabidopsis thaliana landsberg
gtctgcagatattttagatttaagaaaaaaaaaatacttattttcgtggaaatttgagctttatctaaagggcagtagcccatttaacgatttgggtcgctgtaactgaaaaaaagtaactccgttgccgggactcgaacccgggtctctcgggttagagccgagtatcctgaccagctagacttcaacggatttgtaaatcatttcatctttacttttatataactcgagattcagaattgttaaggtatagtctggtaggaaacaaaaaatctgtgttctctgttcggataaagtccaacaagatattcgacatgtcaatatcatgtgtggtttccacatacgattgtagttcatatagtttttgaaaaagtgaattataatgatgtgtgtacctacttctataattaacaagcatattatgggtggctgatagtataagagaatcggttgggttgtttatgtatatgggttggcagataattgtttattttattttaagttttaaggaaatttccttcttatagataattttggattt

SEQ ID NO: 17027 - DNA, 3758 bp, Arabidopsis thaliana landsberg
  unsure (1)..(3758): unsure at all n locations
gggacttatttacagcggttgctactgacatttaattaattgtttcaatttttggcatgattttctctaaccagcttcatactttcgaaactttcaaagatttgggccatttgattttaatatgtgttgtgatcttaactatcccaaatttgaactagagtttctgaaattatataaaacaaaatatgcaaggagaaatcggtggtatcgtaaaatcccttaaaatgagctaatcacatctaaatacatttcatatcttcctttaaataatcctacgaattaacacaccattgtaataaactagataagtatggatgtgattatccatcactaatctctatccataagatatggatgatgcttatctctatccattacttcctctttaagatttggatgatgtttatccattacgtcctccctaagatatgggtgatgtttatctattacttcatctctaagatatggatgatgtttatccattaattcctccctaagatatagataatgtttatccattatttcttcgctaagtaatttactttctaactaagtaaactctactatatatagttcatttcattcatttgtaagttacagagagaaagagaagagaaagagaaagcaataagaaaactcttgtttcgagttttattctctctagtattcattcttctttcttactttgatcttttataacacgttatcagcacgatcgtctctccgggagttatctaaccaactgatcgtctatttgatcaagcatcttttgaggtaacatttaaattatcttaaattcatcttaattcatttataaaaaattatatgctttatattttcggagtatgaggttatacctcctccttaatcgaatggtaagctatgcctcttcgaaatgccataaatggctcattaattgaatgattatttatttctatagataatcatgtcaaatctagctaagctcgatgtcgttgcccttgatgtatctggtaaaaattatatgtcatgggaatcagatattaagatgcatcttagatcaaatgggcttcttagcaccatagatgcatctgaaacgacatcagatgagagtaaagctaaagccatggtatttctacgccaccatctccacgacaatttgaaaaatgaatacatcacgagagaagatcctgtggatctatggcaatcacttaaagatcgtttcgaccatcaaaaatatgtgattttgccaaaagccagacatgaatggctaaatctccggtttttggattacaaaagtgttagtgattataattccgccatgttcggaatcacctccaggatgatattatgtggtgaaaaagtgagcgattatgatatgattgaaaaaacgctctccacctttcatcctggaaatgtaatccttcaacagcaataccaggccaaaggatacactcgttattccgagttgatgcaagtccttttggttgctgaacaagataacgaactcgttgtgatgaatcatttatctcccccacctggatcagctccacttttagaaatgaatgttgctacatctagtgatgataattggtgaggatccagaccttgacgaggctgtggtcgtggtcgtgggagaggttgtggtcgtggccgaggaaaaggaagaagttttcatcacaatgatttcaacatggataaaaccaacaaaaatcttcatgtgaatgatgttggccgtgttaagaaatgacaaattgaaagcacttaccacagatgcggcatgaaaggacactagtacatgacgtgtcgtataccaaaatatttagccaatctgtatcaagcctcacaaaagacaaaagaaagggatgttgaaactaatctcatcatgataagccgggaccttcctttaaaggccaatcatcttggtatggcagattttctcgattgatcatgaaaacgagaaatcaatgtaatatattatagccatatgtataattatgctatgcatgacaagcattatagatgcttttgtaattctggaataatgttatatattatgacatatggatagcctatgtcaaagtttcatgaataaatattttattccagaaaatatgttatgacatatggatagcctatgtcaaaattcgagattgaggatgaaaatatatgtctggcggacagtgcttatacgcacactatcttaagagataaaagtacttctcctctctcgaaataaaagactccgctagaagcgtgagtactataaatggccatgcaaagataatnnnnnnnnnnnnnnnnnnnnnnnnnacaatgccaaggggaactcattttaaagtaaatgatgcattatatttccctaagtctcatagaaacttgataagtttcaaacgatatccaaagtaatggatatcatatagagactatgaataaagatgacattgaatatctttgcataaaatccgagaggcgaatatatattaagaattgccaatgctatcctgcagattatattgcacaaaaataaatataatcgcatcagatgttaatgtaaactcgagtaacaatcactcgtgtgagtttactagtacatttaagatatggcatgaaagacttggacatcctggttaagtcatgatgcgaaaaattatgcaaaattctaatgaccatccattgaaaaaccagaaaatatttaaatctggtgagttttcatgtaaagcatgttctcaaggaaaactcagaataagtccatcgccaaacaaaattgggaatgaaagacctgaattcttgtcgagaattcatggtgatatatgtgggccaatccacccaccgtgcgggccaattcgatatttgatggtattaattgacgcatctactagatggtcacatgtatgtcttttgactacacgaaacacggctttcgcaagattcatttctcaaataatcaggttaaagacacaatttcctgattatgccataaagaaagtcaggcttgataatgctggagaatttacttcacaagcctttaatgactattgtgtatcgatgggaatcgatatagagcatccgctccctcatgttcataaacaaaatggcatggccgaatcattaattaaacggttgcaactcattgcaagaccgtgaatattgagaacaaaactcccaatttctctatggggtcatgctatattgcatgttgcggctttggttcagattagaccaagcgcagataatgaatattcccctttacaaatgacttatggtcaagtaccaaatttatctcatctccgcatttttggatgtgcggtatatgtgcccatagcaccgccacaaagaacaaaaatggggccccaaaggagattgggaatatacgttggttatgtatcaccgagtataataaggtatcttgaaccacaaactggtgatttgtttacggcacgttttgccgattaccattttagtgaagatgaattcccagctttagggggaagaattcatcaaatgcatatgcataaagatatagaatggtgcgcaccatctttaaaatatcttgatccccccacgaagcatcctgagctggaagtacaaaagattgtacatttacaaaacatggcaaatcaattaccagattcgttcaccgatacaaaaaaggtgacaaagtcatatatccccgctgcaaataccccatcaagaattgaaattcctagtgagctgaaattagatgggagcaaaattaatgaacctaaggttcaattaaagcgtgggaggcctattgg

SEQ ID NO: 17028 - DNA, 1930 bp, Arabidopsis thaliana landsberg
acatgaatgtccaccatctctcaaatgcaaaaaaggtttccattattcgacaatgaattgctttaatttaaatatgtatcattcttttccatggacattatattgagaattaacaaaccttagattatataacttatgacattgtacaacccatgtaattgggttattatcattgagcaactcactttttatgatatcaatatagagtcattttgatatggaacacgaatcgatcccgcgcgtgacccaacgcgcccccaatctctctcaaccaaggcgattttcatctttgaaaccctagtttcttatcgattccgcctctccggccaccggcgctcctcgctgtggtcgtgagagggcccatgtgtttctccgctcgccggtttggccctttccaatcggcgatttgacgagtttgacgatcgagttgtgtggtgaggtcttcggtggtgcttcctgcggttgataaggcgtcggcttgtcttggtcctatcggtgaggacggtgattgtcaccttcccggcggtctcgctcttcctctagattgctcgtggacagcatctgagcttttgtgaggctccctacggtggttctcggtggtttactctacgcgttgttttcgacgacgtttctgcttgtctcgtttcaagtggtggttaggtcctgttctggcaagtggtttgagcagtatggtctcccagatctagtctctctttcctttggcgtgcggcggatctccaatggttgtggctcggtggggcgtattatgctctgtccgacattggaaagctttgctctcctctcttctgtgcctgcttcatgtcttcactcggttagttttttctccctccgctttgaaagagtcgttggtttccctggataaacgcgtgctcctgtaggttttgttctctgtcgcttgttgttgtgttagcggcgactgtctgtgcttaggtttcaacctctggttgtgtcgttctctagctcttgtcttcactgggggtcttgttcagttcattgtgtgtctgttggtgtggcttgttgttcgagccggcttctctgacttttgcgagtccccttttgaccactttattcagctcatctcccaagccaaaggtggggacgagacaatgaagaatgagtattgtccgagacttgctttgcttctgcaattgtttcttgttagtttcgtctaggatggagttttaaggcttcgcttgatcaaaggtttggactgcctcagatcgcttgcgcctttagtaactcctcgcatctccaagacatgtcgcacttgttttctgctttggcatccaagtttattgcttccttgttgcattaatgtctgcgcttctgctcactgcttcggattagtgttagctgcgtgttaagcttcgaaaaaggttaggtagtcttggtgtttgatcttgcgactggtgatgctagtatggcattttgagaatatgatgttgctatgcacgtgctactgacttcaggaggaacttggtatagtggtaagcattgcctgcctcattttgctcgtgtagttccgcagttgatctctcggctcgggctgtcgttgaaaggacgacctactcgcttatcatcaagctcttcgctgccttgttctctctttcactcttgtttctcttcccagctacactttagggattctttagatcttgtttcaattctttcttcttccaaaggcatttgtttgtttacggattgaatcgaagttttgatcaagaatgtgtatgcttccatgttttttaaacttttttggcatgggaccataaatttggttatgttttcttgtgtaaccttaattttcattgtgaaatgaatatttacattcttagcaaaaaaaaaaaaaaaaaaatagagtcaattgaaatttcttcttctatcccttaatgcatataaataaagttac

SEQ ID NO: 17029 - DNA, 986 bp, Arabidopsis thaliana landsberg
tgacaactccttttaaaacttttgtaactcattttaacaccttttacaatttttttacaagatttataagagcttttaaagagttgtaaaaggatttacaaggatttttaaacctttgtaaatctttttaaaatctttttaaaactctaataaagtctttacaatcattttttaactattagaaaaacatttgtaagtattttacaacaattataactctttttgaaccattttaaaactctttgtgaacctttacaaaatgttttaaaaaaatttacaagagtttttaaaggattttaaaacccttgtaaatcttttaaaaccccttataagtcttttagaacccttgtaaactatttaaaaatcttctaaaagtccttgtaaaccctttaataatttttgaaccatttttaaactcttctgaaccccttacaaaagcttttaaaaagatttacaagagtttttaaagggttttaaaacccttgtaaatcttaaaaaatcttttaaagcccttgtaaattctttaaaaatctactttccgccatttttttttctcaagaaagatgtttttgaagaaaaaaaatttggctggaaattttttggctcaaaaattttgttggcggaaacattttggtgggaaattcttttgggaatattttaggcaggaaaaatgaatatttcatttagttaacctaaaacattttctaaatagggataaaatggtcattaaaaattaaagtcggttataaataaaaattgccaacatgaaatggtataattgaaaagaggtagtgttaaaagggcattcatagcaatttttctattttcaatttttttttatgttttgatttaacaaatgaataaaaacactatattacaatgataagtacaattttatccaatttaataattaaataaattatattgttaaaataaacttcaatgaccttttttaattattattattatccatactagatcttttt

SEQ ID NO: 17030 - DNA, 940 bp, Arabidopsis thaliana landsberg
gcgcatggcaccatataggagcttacataaacttaggagctttctatttctggttgatacccattgctgcatctttagccttctggattcatctgaaaggtgttggcctttggattggaatccaagccggtgccgttctgcaaacgcttctgcttgctcttgtcacgggctgtacaaactgggaaagccaggtcctacttctttttcgttcttttcttcttcatgactagtttctcttgtgaaataaacatacagatcttgaattggatgcatgtttgaactgtaggccgataaagcgaggaatcgaatggctttggcctatggaacataaggcgctgcagaacagcacttacagaatcagatctccgcgtctgaagatatagggacctgatgatccttcggttttaccattttgctagtagtcaaattgctgtactgtatgttacttttggactagtggtagccgcaagtaatattgcatggttttccaaaaaggagccttttctctgttctcaacaacaaagaataatgaacagattcactgaactgtgagcttgaccatacaagcagagaccaagaagtggtggtattgatggagctgctacaaccaccacatatctccaaattgacagcatctgatttcctgtcactagtcccacttctcacaagagtaactgaattactcgaacctgttaaagttatcaaaccaattttaatgatcaatcttggggcaaggctttaaaaggcaccctcagtgtcaattagaaacataacatagagtttctactgagtcttggggcaagagctgtccatcagtgatacattcctcaatacagacatgttcataagtctgtccagaagcaaaacatgattacctactctccatgggctcatatagttaatagaactaaactctgatagccgacaccaaatgcatgaa

SEQ ID NO: 17031 - DNA, 1506 bp, Arabidopsis thaliana landsberg
agggcaaaaatactaaaaacattttttaaaagataaagcaataaaaaagtatacaaacaaattaacaagaaggagagctctcactataaaacagagcacatgttcttctcactaaccactcaacagagaagcaaaagaaaaaaaagctattgtttgaaagaagaagaagttaactatggcaaaggatgtggaagccgttcccggagaaggatttcagacaagagactatcaagatccgccaccagctccgtttattgatggagcggagctaaagaagtggtctttctacagagcagttatcgccgagttcgtagccactctcctcttcttatacatcaccgttttgacagtcatcggttacaagattcagtccgatactgatgccggtggcgtagattgcggcggagttggaatcctcggtatcgcttgggcctttggtggtatgatcttcatcctcgtctactgcaccgccggtatctctggtatgatccttctttaatcttgattgcggtttggtttagattaagattatacactttttgagtattagaagtacaactaaaccgaataagctgaataagttttacttactggatgtaagtacaacttgcaaactcaaaatttagacaagtaaaaattatatggtatggttttggtttgtttattcgaaattaattattttgccaggaaaaatattgcttggttgacattactatttaatcggtttaaaatcttaggtttaaaagacgaaaatcatttgtttataaaacatttaataagggtcatgatcaaatcggttcttatccgaatgatatatatctaatctaagcctagtaattattttaagcaactgactaaccctgtcttaaccagaattgaaaccggttaattaattgcttgttgtaccttaattctcaagtactggtaacattgtcaactctttttgtttccttaggtggtcacattaacccagcggtgacatttgggctattcttggcacgtaaagtgtcgttacctagggccctattgtacataatcgctcagtgtttgggtgcgatttgtggagttggttttgtcaaagccttccaaagctcttactacacccgttacggaggtggagccaactctctagccgatggctacagcacagggaccggtttagccgcagagatcattggtactttcgttcttgtctacactgtcttctctgccactgaccccaaacgtagtgctagagactcccacgttccggtgagtcacatatgtagtgctattaatcttcaatatggttaaccgactcacaaccggaaccaaagcaaaccaaaccaacatttgatttcaatcatgctaataaatttgaattttgatgaaataaaaggtgttggcgccacttccaatcggatttgccgtgttcatggtacatttggctaccattcccattaccggaaccggaattaacccggcaaggagtttcggagctgccgtaatctacaacaagagcaagcc

SEQ ID NO: 17032 - DNA, 889 bp, Arabidopsis thaliana landsberg
ctactgaaaacctaaaaagccatgaacacactcttaccctctttcctatactactccctttgccctgtgatgcttgtggggtttcgcttgacgctcgccttgattcagtttactcttgtttgctttgtaactacatggtacacagaagatgtatctacttacctcgtgtcattaagatcacccgtcaccagcattgactctctcacacttcctcagttgctgttccttctggtgatgagctctcttgtggagtttgtcgcaaactcgttgacgtcaactacgggcaatacgcttgcaaaaagggatgccactatgctgtccattcgaaatgtgcaacaaagaatgaagtgtgggatggtaaagatcttgatggagtgcctaaggaagaagaagaagagattgagccattcgtgaggattgacgaagagacaatacaacatttcagtcatgaccatcactatctaaagattcatcatgggaatgacaaccatgaaaacaagttttgccaagcttgcatccttcggataacagtttcggatagcttctatagctgtgtacaatgcgattttgtcatccacgaaacatgtgcaggccttcctcgcataaaacaccatccactacacaaacacccgctcaccctctaccatttacactatcctcatctcaacgaggtccagtctaaatactatgacctaggtttcttcgcgtgtagtggttgtagccgagaatgttgtggtttcatgtacaagtgttgtgaaaaggattgtgactttcaactagatgcaaggtgtgcttcgcttcctgatcctataatccatgactgtcatccacatgatcaccctctcttcttcaatttgaccgaaggtgaatgcatggtttgtaagattac

SEQ ID NO: 17033 - DNA, 957 bp, Arabidopsis thaliana landsberg
  unsure (1)..(957): unsure at all n locations
tggtttaaacctaaatttatcctcagtttcttgcttcatcttaaaagaaactaaaatttcctaacttatgtacaaaattcaaatagaaataaaataatctcaaatccttcaaatgaattagaattttggggaagtcaaaacttgcacaatcgaaattgtacttagggttcgttcgagaaaataaactttgtgagaatctcaaagaacaacataatcgattgttaaccacagatggtgtttttgatattattaatgaaaataagtgtttaatcgtacaagtgtttggatttgaaataggaaaagtgtttctgccttcaaagtcggtgctattgtgttatccgaagttgagagcattttcttgtccctcctttgtgaagtccttggaactccttacacactactgatagatcgcctctccagcgatattctcaaaagatttccatttatcctttggtcggatacatgatatatttgcctaagaaaaattccttattcttcaaagacttcggaaaatcttctgatttgatattatcttcgaagattcttccgtatcatttctcagattatcagaaatgatcctgttttcctaaaaatgatcctttgatcgtgataggattttacaagtatctgctttggatattcttgatgtttgcctcggagtactttctcttggttcattgatcgttcaagaggtgacttcggggtaaccggtatactttggcacggggcatggtgatgattgtcccttgcgctcagttgattgtctcccgaggcgacatagacggtnnnnnnnnnnnnnnnnnnnnnnnctcgggatgtgtttctagtactaacaccgagtccttttatatgaacttactctcgagagtatgatttgccgaggatacaaaccgttgcttcagagaaggaaaagccatcctcaacgattggcgaggctggaggttcgagttggcagga

SEQ ID NO: 17034 - DNA, 514 bp, Arabidopsis thaliana landsberg
gtttctccagtagccattagaaccattgcaggatcaaatatttcactagacttagccaaactcgactctccaacatctgaaccttgttgctttgatttgtttctttctaaccacttgtaacactgcttcttgaagtggccttccttgccacaaatccaacaaactcttttaccatctgcagacttagaccgagacctattctttcccttatttccttgattgttgttctttccttctggcctacctctagcataatgaccttctgctacaggcctattgttctgagacaattccctttctttatctctcgctccaaccatcacatcatctaaccttagcttttctctgctgttactatacttcatagtctctacaagaccatcatacctagcaggcaaagaactcagcaataggatcgcttgaacttcatcagttacctcaatctgtagatgattcagatctgcaacgatcttgagaaaatcatctatgttctcatcaatctttttattttctt

SEQ ID NO: 17035 - DNA, 676 bp, Arabidopsis thaliana landsberg
  unsure (1)..(676): unsure at all n locations
caactaccttagcagcatcactcgactacaaagagtaaatagtctaaacgctttaagaatagcaattaagcttattgacaaaaaagattataatacaatgcttagatgcatatcatctccacacaaatgacgaaccttggaaataacttcttctaggaaagtaagtaagtcgctcaagatgcaactctagactcctcagtttttatgctctctgacacaaaagcattaaaaaaatgttgcagtgtagaaggaacttgttgaaatcgttgtgtattgttcttcagatcttcattgagaactttaatattcaagagagcctgcaataccacatgtatttgtgaaactatcaaaaggaataaggaagtgaagagatgtggaatgagttctatcagtaaattcagagaagcatcaaaccatgcaatagtagccacctacaacgaatttatcagactcactgagcatgtgttatacataatttaaccgtaaagaagaaaattactgacctgtccatggaccatacgacatactaaacattccaaatccgataaaacctgtagaatatatttgttgttgttcaacacttgcattacacatatatagaggaaagacanacaatagtggtacctttgacattgaagtcatgatatcagctagaaagaagtccgaaaaagtcact

SEQ ID NO: 17036 - DNA, 1433 bp, Arabidopsis thaliana landsberg
acaaaaaagtgataaaatggtgtccttagtaactgttgagcaccatagagaactaaagtgactgatagagctccctggtttccttgatgttggagtgaagttttttaggtagtcttttcccgtccccaacatgtgattgatgtttacatcatattcaggttctatttaggcatctgcaggagaagctcaatgttactgaggtatgatatgcgggtatggcgtctgctgacatcatatttcagcacttgtttcatttgtaattgcagtttagtcctacggttgatgcctactgatctatgataaggggattcgttctgatcttttttcttgtctggtgctagacaaagctaaaggagacagagtaccaattagcaccttggcagtcagatgtaaaccactcaaatgcttcacctttgtcaccatatcagcctgttggtgtgggtttgagatattcagtaagttcgtattccttaatgtcccctcaattttcttaactgacttgaaccaaaaaaccttcttttgtttccattagacagattcagaacaccatcatcaagacaggcgtggtggctcagctgcgagtaattaccatcttgatggtcctgagaggtattaatacaccaaatttgctgttgattcgcggataccaaagataagggattttaaggataatgccgaaagcaatgaatattgtaaattttgggagtaatgggctgagtacagataccgagcattaaataactgtcaagctgttctgtcaattagacattttattaactctttggtactctctgaaccattaattttttcttggtacttttttctcttttctatatatatggccacgaaaaagttaattttgttgcacggtaacattttctgagtcctcgcctggggtttatgaaagctagtggtggatgaatgcttttgattgcaatgttgaaattagtttaatgatcaaatgtgtcttctgtaacagtaggtcgccagccttccagatgcctgtgcaaccagctctcaatcaagatgaatctcatggaccaaataatcgtgttcagtttcgtgagcctctcagcaatacttttatggacgatgcatatgctgacgtacaagcagattcaaatacaactttggaaaattcgacttatgtggctgtcgatgatccaagcccttcaaattatccgattttggccccagttcttgaagagccatcttcatcattttctgagggtaatggtttaataacaatgatagtgacattataacaattccatcaccgtctttcactttgttttaaatattgtgaattacttttggcagctgcggatgatgatccgttgccaggtattgcagacttacagatatcaggagaaccttttcctgtgcgagagcttcaggtgtttggtactctatcaacggaacgaccaaatgta

SEQ ID NO: 17037 - DNA, 542 bp, Arabidopsis thaliana landsberg
tgagggccttggaaagctagatgttaaccaaggattgtgagtaaccaaaagcattactctaatccttgcacacttactaccttggataagaggggagaagaaccctagacctctcttaaaccctatctcccaaaaccctagataagagggaaaagagagtgaacaagtatgcaaaacatgagtaatatttacccaaaccttaagtaaccttataaccagcaattaggggaaggaaatattgcaaaaagacccctggagaaaccccaattcaaatctccaagtggagagagagctagagctctctatttctctctaagttaaaaaatacacctacactaaagatcagttgtgttcacctcgaagctggcatcaaatccacctatgttctataccaaaaatgtggcataccacccaaggcacccactggaaaaagctgagcccgagactcggacgtttgacatgccttggcatggtttttgtcgcgaggtgggcagtgtgacacacccgatttggcgaccagagatctccctacctaggccata

SEQ ID NO: 17038 - DNA, 2226 bp, Arabidopsis thaliana landsberg
  unsure (1)..(2226): unsure at all n locations
tttctgtttttggcttgattttatgtaactgattaaaacctttattataacttttaagtaaaaagtattttaagacaagagatattcgtgagtctatattagtagttagattaatataaagttttaaattaatacagtttcataagaaaagggtgatacaaatactaatagttaatcagccattatggtgatacagagaaagatacagacagaacataaatcaagtaattattgagatggtcgggctgaagcccatttaaggcccattttattatctcagcccaagctaaggcgtatctatcttctttcgctttttgtttctctccgaagaaaaacagactcagaatcacgcgccaaaatcgcaatgtagaggacgaacatggaagagagcataatgaaagtgcaaagggtaatcaataatcacgaaatttcaactacgttctagttccctgaggctgtttttgtattgtaagtaagtagggtttagtagtgaagaagtcaatcaaaatttggggatttaggtttttatttatttattgaagaattgtgtgaatcgatgaatcctgttctatgttgtgaaaaatctgatgaattgtgtcattactgagaaagattcgaagtcctgaatgaaattgataacaaaggatatgattttcatgttcataagcatagatgatgactaaagttactacactattagtgcagatttattcaaggaagtaaaacataagtgcaggtttgtgttgataaatcagttggcgactataagtttggctcttgcatcatctctgttgatttggaattgatctccgagtccaaaatgagccattaatagccaaacaaagttgataagttcaccgcctttgctaagttgagaagcatgttcttgagagtcacaatgaagtgatgcatagcaaagcaactcaacccacactttgctcactacttcccacatgttttcaccttcattcattagctcttttgcaagcacgcttgcatcaaacaacacggatttgcttctgtctcctttcacagccattggatcgatttctgtgttgacagagagaatagctcgacatgcttctttcatgaggttgttttttacatatcttgatttgtcgacatgtctcctctggaaaaagtcctttgcctcttctaatgtgtctctgaatctgatcttcccaattccagcaacctcggacatcagaccgggttgcaagatcaggagatacatcatgtagtctgagatgattttgctgaactctcggttactgtaatgcttgcgttgttcatcataaccctctgggatagtctctttctcatgttgttggtaacagagctcggttgcgatgtgccacatcaaaagactctgatcataatcgacctttgtgacatagcgtaccagtttttcacgttctgcatccaccggcaggttctctcttaaagtccattctccccgagccaaagatatcctcttggcattttcaggactgtctccatactttgatttgtttttcagctcttcgaagatgaacttccacaattcttttgtcatgggctctccgtgtacaaacagcgtcttgtggaccatatcaagcgtatccgagatgtcaaagaactcactgaggatatcccacacagatttgatgaaatgagggatgcgggatatgaactcgaaatagatagggtgaatataacgacgggcccaaagatggcttcttgataacgcattgacttcgtggctgatctgtctgtgcacttcattgatcaacttgacaatcgatccaaaaactttctggattatgagattgattattttgaatgggaaagctatgatgatccataaggagcggaactcatctccggcatcgtggatcctcttttgtctttttttttgtggcatatgctagaaagttgaatacgttgatgcttccacaccacctccggaagaagaatggcgtcgtgagcatgtgatgcacgtgtaccattgaacacttatcatcaccttccttgatgcacggtttctcaccttcttttgtacacttatgctcacctttattgtggcactcttgcatcttccaacgcagctttctgaattcaagtaaccagttgaaaaatctatctttccatgatagaggctcatnncgatcgtncttcaagctactaagtgcagcacatgtccagtctgagaacagaaacanaaggatggatatgaaatccaaaact

SEQ ID NO: 17039 - DNA, 3163 bp, Arabidopsis thaliana landsberg
gtatggtttcgatacaacttgtggtttagtgagatgcagtttcgtttggcgaatattagagtaagcttatgacaggaaaaaaaaaaaaaatagtagtaaacccatacctaaaagcaaaagaagcaataagaagtactgtacctcgctttaacctcccttttccttttttatgtttcttttgacaaccaaatcttcatcatcacgctctctctttttgcctttagccaatttctctctccaatttcctatttttttttttaatcacatgaaaaatgataacaaaccgtgaaccaagtcactaaacataaatggttaaatggagttttttttattatacaaaacacaacattgctgtttagaaaaaaattactctactttctcattaacattgaattctcaaaggttacgtactactattatttaagctaaccaaaaaatcgaggttaaggttggaaaacttattccggtttagtttatagttccggttcagatctaaaccaacttgaaactagacaaagacagcgtcgttagcgcatgtaacccgacaacatcattctcactctctcctcttctctctctctctctctctctcttctctcagtcggaagcagaggagccaaaatcaatggcggccaacaattttgcgacgaagctaagcagaaacaccaatagaattaccgtaatcttggtctacgcattccttgaatggcttctcatgttctttatcttcctcaattcctttttcacttactttatcgtcaaattcgcctctttcttcggtcttaagcaagtatgtcttctctgtccgaagctagatcgaatcttcgagcgaaagccagaaaacagattcacttacaaagagcttttatgtcaaaatcacatcgccgagctcgctagtctgagtttttgcagaactcacgggaaattatccgaatcggcgaacttatgctcagattgctctaatcgcgaagaagaacagagcaacattggtttaggtttttgcacatgttgtcagaagagcttagcggataaaccataccctaattacttgcttctcaagtcatcaatttgggggaaaactttgggtgacagagaagatggaggattgatcttagagatgatcgatgatgataaatttggagatgggtttgagatagatagagaatcttatcccttagggttcttcagagataaagcagaagaaggaaagaagcaagaccagcagcaaaatggtgaagtgatttcagatgttgagagttatggattaagcttgagagaagtgtctgaagaggatgggttaagatctatcatcagcaataattctcctgggaacgaagctaaatcaagagtttcagaggatgaacaaaggaatgatgacacaagcaatgttcccacatatggggaagatcaaatttcaggtagagtaagaacataaatccaaagtctgaaactttaaatgtgttagttttctgggttttatagattcctcattgtgatcaaacaacagggcgtgtagaagaaaaagaagaagaaacaggagtagcagatttgttgtatgaccagtttgagagcaagaatttcactggtaagcaaaaagaatgactcttttgttatcgaaaatctcttcaagcaggccttgtgcacatatgcatacatctttggtttggtttatctaactttgtgaagcactttaagtctgaatatagttgttttctttcataggtagccaaatcgaagaagaagaagaagatagagaagaaacgactaaggagcttgatccggaaactccaacttcagtcagtactttgtttaacaagaaacttcattttcttgctagaaatgagtatgcagctgctgaagatgcaggagatgggaatgtattagtgagtgagatggacggtggcgatcctttaaggactattgaaaggttgagagagacagtgagagcagaacaagaagcactgagagatttatatgcagagctggaagaagaaagaagcgcgtctgcaatatcggctaaccagacaatggcaatgatcacgaggctacaagaagagaaagcgaaagttcagatggaagcgttgcagtatcagagaatgatggaggaacaagccgagtatgatcaagaagccttgcagctattgaatcatttgatggtgaaacgagagaaagagaaggaacaactccagagagaacttgaggtttatcgggcaaaggttttggagtatgaatcgaaagctaagaacaagatcatcgttgtggaaaacgattgtgaggctgatgatgatgataaagaggaggagaataaagaagaggataattcttctgagatggatgtggatttggagaagataacattagattgcgtacaacatatgagcatgcttggtgaatctttatcagagtttgaggaagagaggttagtgattttggatcagcttaaggtgttagaggataggctagtaacaatgcaggacaaggaatctgctgaggatccgggagaattcagcaatagttatgaagaagcgagtaatggacatggaggactaacaatggcatcaatggcaaagagtctgctacctcttctagacgcagcagagaacgaatcagaagacgggtctcaaggactaccagaatcagatgaaaagaactttggttcggacagtgagaaactggagataatcaaacaagttgatagtgtctatgagaggttacaggagctggaaacagatggagagtttctgaaaaactgtatgagttcagcgaagaaaggtgacaaaggaacagatattcttaaagatatattgcaacatctccgcgatctcagaaccattgaactcactaacacaattgaaaaccagacgacacaggaagagtgatgtttattcacaagaattatatatgaactctctctcacaccattgttcagacagatttcaagccggaatcaatgtctttgcactgctcaatggaggatctgagaattacagaaattcttagatgtctcttgtttgtgttttctttttttgtttggtgtaacaaaaggtttcacacacactagtcattgaatttgtatctgtcaatgtaaattctgtgtttcttgtagtttatgagagttttcagttggaaaataattggcacataaaactggttcgttctgcaa

SEQ ID NO: 17040 - DNA, 938 bp, Arabidopsis thaliana landsberg
acggatgacgtcaggccgtattgaagatatgcagcggttgggctactttggcggcggggtcgatcgcactccggggacggaggaagtccccgaaccggaggcgagtaggttgtattcgaggcgttcttcgccgccggaatccgcttgcctgcacaccggtatgtcggcgaagtcctgcgcagattcagcgttcaaatacatcagcttacaccgaacgccatagtggcgctggcgaagtatgtctgggcgacgacttcgtacggcgggcagccgtcggttgaagttttcgcgaagaattattgcttgcattggcagaacagggtggttgaaggcggagttgcgcagttcgggtcgtgcacattcacgccgaagaccggcaagaccacaatgcaagtggtggagttggttccatgcgcccgcaacaagtggggcaactggaatgaattttggttttacgttgctgagggtaccgtcgaaggccatgagggactccccgtgtccgagatgtgctctcatttttactcagcgcacccgccctttgaagtggcagaggaggatgtggacgaaggggcccttcggtgcgctgccggccagagcagtgggcgcgatttagttgaagagttcgtggcgtacggggtgtggcccttggcgcatggctgggcgttgggcgaagtgtgccctcgccagatgccttttcacggtggaagggtggtgcggagtcctgccttcgcactgaatctgcgaaaccgcgacccggccgcctttgtgcgtgatgcggaggatggggcggtgcggctcgtgggatgttacgtgccgaggacggaaggccagcgcacgtttgatatccgcgggtcaaatgatcgtttgaacagggttttcgaattaaatcaagttgtcgtacgatggctatcctggtcaagacgaactagttgttttgc

SEQ ID NO: 17041 - DNA, 1194 bp, Arabidopsis thaliana landsberg
ttcataaggacaacgttgatttcatggtttgctatgaggcgtgaggcggctagatccgaaacatcggcactcccaccaaagatgagagaagttgtgcatcaaaactttcaaaagtcagtcagatttgctgtacatcggatcgataggtacgattatgaggtcaggagagaaggttctagtgtcttccacgtcaagctaatggaacgcacctgttcgagtagagcatttgatttgcttcacctgccttgcccccatgcaatagctgcacccgtggcagagggagttccacttcaaggactgatggcgcccgaatattcagttgaaagctggagaatgtctttccaaggaacaataaaacctgttcctgatgttggtgacgttttcgctttgcctgaaccaatagcctccctccacctgttccctccagcaacacggaagccaccgggtaggcccaaaaaaaagagaatcatagcaagaggggattttacggtaaatgtattgtttttggaaagaaattgaccctatttgattgttgatttcttaactagcatgtgttttccgcagggaccacaacgccaactaacacgttgttcccgttgcacaggcgcaggacataatcgcgccacgtgcaaaatgcccatatgaaggtttgcaacatattttacaaaaaagcatggtgtacaaaacaataacacgactaattaagttattacatcatatgcaaggggtattgtatatcgcgtcttgctcatgggttataagttgtgtaatatatgcaaggggaagtccatcaaggatggaggtatatgtaaaaggaagggtaacttggtttaatgtacatattagcaattagatgttgcgattagggtggcgcctaaacgttacatacaaaatgcaatcaaggaaatcacagatcctatcggtgccttaatgaagacgatgttctaccaggcaaagggaaatattttgttttttggattttgtgtaagaaactttgaattcccccttttgtagacagacccatgatattaagtaaagacgcgagtgtttaattagaagtacatgttgtagtgtaaaatgacacacagcgcatcacatctattacttcacttagaccaaaaggtttaaaagatacatatcgaattgtagcaattaatccatgatgcaaaaactgctcaattaaataatcatttt

SEQ ID NO: 17042 - DNA, 1356 bp, Arabidopsis thaliana landsberg
gcacatggagtttggatctgagatcggaagacacttgcagatggagagggtcctctctccggctcatttgggatatctccatccattataccgacaatataaaaatttggcatagattccgagcaccgaaggttgcaatccatatctgcgatagagggaaagatggatcataagacgaggttagagcaataatttataggagcaacgtatccctcaaaatccatttttttccatcctagaatggagcgattcgaaggagaatttatgttgtccagctaatcatgcctttaagtttgtaatcgagaatataccaaattaaaaggtagtaaaagttttccataaataaaaatgggttgaagcccgttacgagttcaaccgaagtaaaagcgagttaaaataaaaaacattagtttggggacatttttggaagaggctcaggaacagactccttcatcgctggttcagcattcgaagtggatgtttcgttcttatcatccaacttgggcttggttttgacgtgtttccaggtgttgctgtcttctccttcatcatcatcttcgctttcagaagggatcacttcacccggtgcagacgcgggtcatgaacttgacttcaactgtggaggtacatccaaagcatggtcgggatcttggcaacagaatcgaagttcctccactcccattgaaagggatcgctttcctgagccctcacattcctttccacacaagcgatgcgcgcctcaagcatctgcctcttaagacccgagcgctgcctctcatcgcacatgcggtggtgtttatcgataacctaacatggaaaacatgtgaaaatagggagagagtaaaagagtcttcaaagagagcggttaccgaccttatacatgaaatcttacgcctctttcttatccttcggaggaaaatgaaaggcggcgtgcggaaagaaaatgtcggccggttcgaaaccgtcaccgaataaaaacaataggctgtcaggatcgagaggacaaacggtggaagctccttcgttttccatccttgaagtgtttaccaagtaaatctctgagatcatgcttgaaaaaatttaatggcaaattgtactcttatttatagtgaattagggttttccttggaaccacaaatttaataattgtggcgtgtccgaatggtttaaaccattttttgaaatccagaaaaagcaattatagcctcaaaggcgtgaagctttttcctgtttttcgagaaaggaaatggcaaccgtcgcattaaagacaaaagactcattaaatacaaagaaaaatagatgaggcccaagcccagtaaaaagccaaattgattaagcccgtggtgggaaattgca

SEQ ID NO: 17043 - DNA, 1174 bp, Arabidopsis thaliana landsberg
gtcgttgaccatgtttttattgtaggatttgacaaagttgagtgagccttccaccattaagtcattcagccagatggggacgaaaatgcacctgaaccatctaatgacgtacagtgcgaacggacgacttagttaggatcgaatggacgtacagtagatagtttgcttattaaaaattaaaagtaatatttttcattgtcattagtttttacagttcttttttcttttctattttataaatatttatgatttttgtacttttagttaaaattcattttttctatcatttaagacatactttcatcttttcacttttattaatttatttattatttttttacaaattcaagattaacaatatcttgtacacatttgtgatttgtacgtacacggttgtaattatatccatacatgtacataaacatcaaaataatttgtatatttacgtttgaaagaatttttgaatataaaaacaaaacattcaatccatgtactaattacacttgaaaatacattaaaacttaagaatcaaacgaacctattcgaaaaataagaaataaacccaaagctaacaaattattcgaaagatattaaatttttatacctgaataacctgactcatagttgaaaacccataattatccaaagcaaactgagaaccgaatgggtattcaaaatatagttatatacttaacattaattatatttagacttttatattccaattacccaaattacaattataaaatcaaagttaacgtacactagtacatttatcaaagaatatgtacgtacactactaattatgtatctggtgaattatgtatctgggtaaattatgtaaagatgaatgttttacgtacacgaatacatataggcatggtagatgtgaaatgaattgtaatggtgtgcaatttagtattggaagatcggttttacatgaatgagagtacgattcgttgaaatattatatatgcataatctatattaaaatatacagcatacatataacttacataataacttaatctggatgtcaaaaaaataaaattaaaattttttcgtagacaatggttagagaatttttaaactcatattaatgctgcaccatgtacgttccaataaatattaaagtgtatgtacatagtattaaatttatgtgattatagacatt

SEQ ID NO: 17044 - DNA, 623 bp, Arabidopsis thaliana landsberg
gggcatatgatccttatgtcagaaaagcaacaggataaagaacttaaactagacaatcaaaaagtggtttgattctcatcaggacagggcatatgatcctcatgtcaagttggatatatgatatcattagacctcttgcaatgagacttttctagtctcaactatatataaatcaaacaacttgtggtcatacactaacggcatatactacaatctgatcacattgcaatcacacaaacgaaataatgggtccatcaaacagcacaaaagtagcattttcatataaactatatggtgtgttgaaactaggatctaggtttgagatcaatacttacaacagagctgataggagtgaaggtatcttgtcctttcgcaaccgtccatgggagaccagatgcctgaaaaaaaagagaatgtaaacacgatatatgcttaagcacaaacctaaagtaataaacagattaccattcatgcaaaagtgagcaaaaccacacattcatgatttggttttatataaaatggcggttaaaaacagtcttaaaagcctaaatcacgatcccaattatgagaatccatagagcttataaaagacttttaataaaaaatgagttctatcatcgatg

SEQ ID NO: 17045 - DNA, 3162 bp, Arabidopsis thaliana landsberg
  unsure (1)..(3162): unsure at all n locations
accaagcatacccctccacattcttctcttacactcaagaactcgttaagaacttggaagtagaggtgcaatacattcgttcaagtgacaatgcagcagatctattcacaaaggcgcttccaacttctacatttaaaaatcatgttcaaagcattggaatgcgtcatctacaaaacctgtgaagtcccttcgagggggagttcacgtcactgtactctttttcccttgtcatggtttttatcccaatggatttttccattataaggtttttaacgaggcaatacgtaactcatcaaaagtgatggatactcaagggagagtgttatacacttgataagtatggatgtgattatccatcactcatctctatccataagatatagatgatgtttatccattacttccttcctaagatatgaatgatgtttatccattacttcatccttaagatatggatgatgtttatccattacttcatctctaagatatggatgatgtttatccattaattcctccctaagatatagataatgtttatccattatttcttcgctaagtaatttactttctaactaagtaaactctactatatatagttcatttcattcatttgtaagttacagaagaaagagaagagaaagagaaagcaataagaaaactcttgtttcgagttttactctctctagtcctcattcttttttcttattttaatcttttataacacgttatcagcactatcgtcttgctgggtgattgtctaaccgaccgatcgtctatttgatcaagcatcttttgaagtaacatttaaattatgttaaattcattttaattcatttttaataaattatatgcttgatattttcggagtatgagattatacctcctccttaattgaatggttggctatgcctcttcgaaatggcataaatggctcattaattgaatgattatttatttatatagataatcatggcaaatctagctaagcttgatgttgttgcccttgatgtatctggcaaaaattttatgacatgggcatcagatgttaagatgcatctaagatcaaatgggctttttagcaccatagatgcatctgaaacgacatcagatgagagcaaagctaaagccatggtatttctacaccaccatctgcacgacaatttaaaaaataaatacatcacgagagaagatcctgtggatctattgcaatcacttaaagatcgtttcgatcatcaaaaatatgtgattttgcctaaagccagacatgaatggctaaatctccgggttttggattactaaagtgttggtgattataattccgccatgttcggaatcacctccaggatgatattatgtgctgaaaaagtgagcgattatgatatgattgaaaaaacgctctccacctttcatcctagaaatgtaatctttcaacagcaatatcgggccaaaggatacattcgttattccgagttgatgcacgtcctttgggttgctgaacaaaataatgaactcgtgatgatgaatcatttatctcgcccacctggatcagctccacttttagaagtgaatgttgctacatccagtgatgataattggcgaggacccagaccttgtcgaggtcgtggtcgtgggagagatcgtggtcatggccaaggaaaaggaagaagtttccattccaatgatttcaacacggaaaaaaacaacaaaaataatgttggtcgtgttaagaaaaggcatgttgaaagcacttgccacggatgcggcatgaaatgacacttctaccagacgtgtcatataccaaaatatttagtcgatctttatcaagcctcataaaaggcaaaaaaaagggatgttgaaactaatctcatctgtgatgagtcggaaccttaatggccaagatgatgatagtcatcttgatatggtagattttcttgattgatcatgaccccgaaaaatcagtgtaatgtattatagccatatgtatcccaagaattacacatgctttaattatgggataacacttttattgtaatatattatgacatatgaatagcttatgtcaatggtttaatgaataaatattttattatagaaaaatatcaaaatatgagattgaggatgaacatatatatcagctgacagggttctacgcacacaatctttaaagataaaaatacttctcctctctcgattataaaagacttcgctagaaacgtgagtagtatatatgaccatggaaagattataattgattttaagcgaaaccaattttacaatgccaaggggaactcattttaaactaaatgatgcattatattctcctaagtctcatagaaacttgaaaagtttcaaagatatccaaagtaatggatatcatatatagactatgaataaagatggcattgagtatatttgcataaaacccgagatgcaatatatataagaagaattgccaatgttatccttcggattatattgcagaaaaatatatatactcgcatcaaatgttacagtaaactggagtgagtttactagtacatttaaggcatgacatgaaagatttgatatcctagtttagttatgatacaaaaaattgtgcaaaattctaatgatcatctatttaaaaaccaaaaaatattcaaatttggtgagtttccatgtaacgtatgttcttaaggaaaaatcataacaagacgatcgccaataaaattaggaatgacagccctcaattcttgtctagaattcatggtgatatatgtgggtcgatccacccaccgtgcgggccgtttcgatattttatggtattaattgacgcatctcctaaatggtcacatgtatgtcttttgactacgctatccacggctttcgcaagattcttttctcaaatagtcaggttaaagacccaatttcctgattatgccatacagcaagtctggcttgataatgctggaggatttacttctcaagcctttaatgactattgtgtatcgatgggaatcgnnnnnnnnnnnnnnnnnnnnnnnnnnnnnnnnnnnnnnnncatggccgaatctttaattatgcggttgcaactcattgcaagtccgtgaatattgagaacaaaactcccaatttctctatggggtcatgctatattgcatgttgcggctttggttcagttta

SEQ ID NO: 17046 - DNA, 520 bp, Arabidopsis thaliana landsberg
cataagcagcaacccccactctctgtttctcatttcttctataatcttctctgcttcttcagatcgtttaccaccaaaggcaatcatattataggttgtcacaacaacaccagcatttccacggaatcgttctttactatcagaagtgaaacggcatatttggtcatcttttatagtagaccacaacttaaattggtaggcccattgatccaccgagacagcattcgttgccaaacaaagacaactcttctttatacgagccgctgcagaaacaccaactagagatttaccagcaccacaaggtaacactataatcccagatcttgctcgtcctgcagaatcaggagtctagatcagtcaaaagctttcaagagaaataacaaagatacttatctattaggagttcacaatgaagctagatcagaacagtatatgaaagtacaaatctatatatctaagagaagttcactatcaatttagcagtcgctgtaaacaaagtactaaggaaaaaaaatggggc

SEQ ID NO: 17047 - DNA, 1330 bp, Arabidopsis thaliana landsberg
acctgtatatggctatggtaaaatccgaataagccactattaacttaaatactatcattgtgtgtggtctttctgaatcagggcatatcattggttcattggaattaaaatagtcttgagtttataaacccgagccgcttcctgcgtatacataagaatttgcttccctaacctttctgaaaactgtgaattagtttgtttccctcctagtgcgtgcatgcggcttgaatcttgatagagggcggaagctaaataacggacgagaacacaagatctctaggagaactcggattaacaaacggatcttacttagaacaccgaaacttgacgaataagcaataaggataaggtcagttccaagagatcgatatcgacaaggttttgcaagtcctctttgcagggcttgcacacaagctcttagggttgagagtcctcctctctaggctttagacaaacctctcttaaaactcgaagctgccttccaaaatagactcaagctccttaaataataagaaacataaaacaaaaaccctaatctaatgtaatacgataccgacgtgatatagatttaaagcccacgaacacatggcccattaggccattaacaagactagacgtaaaacaaagagaaatatcgagcaccatgaaagcctttgaagtggtgatcaatgatgtatagatgcgctgcatcaaatcttctttcgtcaacgtcggtctcccttcttgctccctcgtaagcaaccttgttcacacatttgaaatgataggatgcagagccggttcaaactaaacatagccactgtgttacatattcatttggaaagggtaacaatcttcttagttaaaaaagctatgaaaatgtcaaaatggtaagaaaaagagattctacgggaaaagcaacgttaacgtacgaccgacaatatagtcttgctcctgaccaaaaccctaatacctttagttccacgtgcatttgcgcatctcccgaatggatgtgatttttttgtcgtacacaattacttcttttagaaatttagatggccaaggcgtcatatcatcatcgtctttgattattatcaggatgtaaccatataacaaccaccggtttctgatatgcatggtttacatcaaagtgttgtctacgaatcattttacccatcaaagtattttcaaactaagcagtttatttaaccaacacctgaaaatttgatagagattttatatgacattatatggtagatttggtcatgctgaaattaaagagtatgatcacactattgaaatagatctgaaatcactaaccagagtcagagacgcacacctaatgacactc

SEQ ID NO: 17048 - DNA, 545 bp, Arabidopsis thaliana landsberg
tgttgattccatacattccttgcaatgcgggtttcacattttcgcatgcatgaatcccatatcagtcatccaactacagccgttcaggaatcctatgtaattcttgtgttgttggagttttgatataatcacaagcaagtaattcagtagctgtcagaacttcaaaaaactttctcttcactgtttcttgatttcgtccaaaccgtaatccaacatctcgttgaacttcattgtgcctacatatccggagaaatatagcaacactctctttgatgcttacattcaatggttattgtaatccataattggtttgtagaatatgacacaatgttgtgaacgcatcaagtgacatccgtagcaactgtagacaagcagcattatcttcatttagtcgagaccaaatgtttctccatcctagaccgcaatttgtttgaacaggtcctctttgaaaaatatcgtcatagtaattcaatgatggttgaattagcaactcctcaaattgctcatttttcaaattccacaactcgagtctctcttcataactt

SEQ ID NO: 17049 - DNA, 695 bp, Arabidopsis thaliana landsberg
agccgaattttttttttttgtgggaaaaataaatttggtggaaaaatttcagtttccaattacattttcttattagaagagagtaattaggtcattctgttcaaggaaaggggtatttttaaaaatagacaacataaaaaggtattgttacaaaagggtattaaaaaatggtagtttgcaaatccccaaaatcttaattatttttcttagctgtttataaagtagaaatatagtaaattttatcctttttgatgtaccaaaaaaataactattaatatttgattttttattatagttaaatagtatcaaaaggaatatatatacataattacatatataatttttaactaactcacttaagagttcatcttcctgaatatcaagatatatatatacatatatgattactcggtaatgaaacaatgtaacatagcatatatcaagaagagaatgcaaaagtagttacctctttttttcaagctcctttttggaggcttggatcaagaatctttaaccaacggtgttggcattggacatcattcctcctattctcttccgaccgaggaaggcattcagctaaaccaaagacaagagaaaaaaaaactatatagtgtatattggttttaaggcaaatattgatggctaacaaatcaaagtattatttaccaatcctttttcagttccttccttggtac

SEQ ID NO: 17050 - DNA, 2381 bp, Arabidopsis thaliana landsberg
cttgatcaattcgcaaacaaactgaagaaaaactgaaggtatggaaagtttcgcttgagagaatcattattgtacctccaagaaatcaagatcgtcaaggtatcttttaatgtaattgattgcattctttctggtcaagaaaatctggtagatctcattgtgcagtatcaagtcaaggtacgctggcgataacgagtttcctaacacaaaatgaaaaaaaaagaaggtacatatcatatatattaccgcccaaatagaagaaaaagactgatggaattaagtatctaaagaatattgggtaaagtttaatggtacctgatcttaaataatataagtatttggatttctaggctttcctggaacccaagtttcagttttctgcagaggaaatgataaaaaggttagtgtaaatgagacgagtcaaaaaggtttacacattagccacaccgtattctccaaaccttaagagtaaggggagcttcagcagttccacgaggaggcctttccttagtcggtaacatgtggaggcaatgagacaacacagtgaacgatcgtgggaagatacttagctctcccttcttagtttttcctggagaaatttgaaccatgtgttcagataaagatacagaataataatatgccgtaatgagaaaatatataaacaaagaggctttaggaacctggaaatccagtgacaccgacgatatctccacgcttaacattagcatggaacctcgcaaactcagcttcatctaattctgaagtactgaggcatcacaagggaaaaaaaaatctagttaaactacatatataaaaaacaaaaaagaacaactatctctctaattaaaaccaattagtcacctcgcatcagtcataacttggatcttagaaccacgattatgtagatcatagaagaaaagcttgtcagaggaagatctcttgctcattattcgtcctaccaaaattcaaaaaaacattgaacatataaacttttttttcagtacaacaaacttcatggatgggtgtatcataccggctagagaaacttcgtcatcttcaacagactcttctttgcttaacgtagtatacttggcaatggattctgtcccttttacttctgcactgcaagatacctcaatctgttctcaaagtattgctgcaaattgaaatattcagaaaacttgcaatccgtgagatacataggaaattgaatggttatatgtatataccgtttggtccatattttcaacatactaccatcgatttcttgctttgggaactcgtctttggtggcttcaatgtaaaatcgatacgcaagttgttgggctgattttttactaatcccaattgggtttagtataatcaagttgtgtgaataagaaatgggccttaatggttaggtccagttcgtggtggagctccggaaatgtcgggtcaaatagtgaacgtgacaaaacaagtcgttctgtttcaagttcctagagactcgctggtcgcttcttcaaagaccatgagaataggagtcgttgagagtcaagtccactactcctagacttccgattgatgtcggttgagtttgttgaaaaacaaattcaaaacctagtaatctaaatttctataaaaaccaactcttcaagtctttgagagacatagtgaagtatttgatcgttacacacaaacagcaaaagctctaacaatctctctctctcaaaagtaagtctcgagagtatcgtagtaactatgttcgctagagctgcgtttcgagtgatgcgaaataagtttataaaggttatatcctgggatccttgaatcacacagaaaccgtcacactacgggtgattcaaagggttaagaaaagagttcataactcgactcctctcacgttcttaccttaatgtttgtgatttcgatttcaattgcctttatgtagtgtttgctaattttagctcctaccctcttaaccctttgaattcgttttgttctataaacattaacggtttggaattgaaacttcaaaaacgtgggaagcttgggagtatgtacattgactttactggttgcgatcgttaaacgtcaaactcactgtgacagaatttgcgtgtcttggacgtgtttcttttgagaacagagaaaaatcacttgaattctctgtggaggttcgaaatttagtgttacgttggtgctacctcagcttggaattgcgattttaagcttgagtatataacctgcagcttgttatctctacaaaggaatcatcaatccacagcttggttttgaaaatttaagattatcaaaacttgctttttggatttatttgtggcaagtagaagtctctgtctttttattgggaaaaaacccaaaaaaaccgccatttattttta

SEQ ID NO: 17051 - DNA, 1106 bp, Arabidopsis thaliana landsberg
gatgttgtttttttatttgcaagaggtgttgttatttatatgaaatattgtacaaacatccatgatccagagatcatattacacattcacaagacgtctatatagaaagattgaacatgaacttttaaaagactgaatcaaggttcatgtacataacagaaggatcaggatgctagaagatcaactatcaaaggagaaggtagaagccctggcagcagtgttgaaagacaaacatcttgacttctcaataagaacaggaaacgaaaactaagtttcgcatctgaacttatagcttccatcttatgcttatgtcaagagagcttcttacttaccaacgtatcaaccaaccataagtagtagtagaagattgaaaccgtcctataaacccttcaagtttatacccatcaaactgcaacacttaaaactaaaaaggacagtaactcgaaacaatccaagatagattgttcagccaaaagcagtaaacactaaaaggagttatgattcctaagcagctatagacatttcaaataaaacaaaccttaccccaaaaagttgaattcacagagtataagggtagattatactcacatttgtagacacaatttttcgagatcttatcctcacaatgaaaacaaaaaaactcatagcatactctaagtatcatgcaaatattttattagtcggtggcatcaaaccacctaaggctcaaaatatcccctctagtaaccaactttcgttacaaatttttagtattaaggctccaactcggaaagagcatattcgatgttctcttcatctcgcgacacatatatcgattccacctcacaaatcactcaaaccgagctcatctcatgatgcataagttgggtttacttcgcaatcacttgaactaagtccttctcacggcgtatttgtcaggtcacctcgcaactacttaatccaaattcatatccaacagcattacaagaatattagtcttcaagcaaataaccttactcaaagaactcaagcttatgttgataccggatcgcgcacgacaaatccatcttacgcatccaagttccatcactttacagagcaaagaatgtacatcttgcataagaaag

SEQ ID NO: 17052 - DNA, 768 bp, Arabidopsis thaliana landsberg
catattgacagcttctggggcataacatgacagttgtagaaacggtgctgctccccttagttgtcgaggtccatacaacaccttctcaagatcgttgcactgagcagtgtgcaactcacgttctatggtacatagccaatcttcggcgtccatgggatcagcaaaatgggcaaagacatgaggatggcccctcatgaattatgcccgcttgtctctgggcacctgtggcatttggacttgcacctaaggttgaagtggtggtggctgctgctgcacctgctgcattgctgctaaggtctgaccaattgcttgaactgcttgagtctgcattaggaacatctgctcaacggtcatcgagggtggaggtggcaactactgctgctgagctgcctcctcctagggtgcctgctgctccgactgagcacgccttgcacctgtgcaccagttctcatacatctgtagaaagcacacacaaatcagatctgactctgtagtctttcagcataagaaaagatatatggaaatcttcatagcattgaacaactgatcaacttcactggcagcttctcagataaagaggaaagtgaaaataaagggattacctaactaaataactgcctttattaataaccacaccaagttgcagaggatacccacaccttggtgacaatcattacaaagacccaacttcattacatgttcatcacgacaagcatcccaacatatgataagcaaactaactataactaagactaactaagactaaga

SEQ ID NO: 17053 - DNA, 208 bp, Arabidopsis thaliana landsberg
agaaatgctatcagacttttgtatcttatgaagatttgcaatggaaggaggaatctctaccaaactctcgcaaagagccagattcaatacctcaagatttgtagcatctgagagatttgggagtacctttaaattactggaccgtaacaattccatcttcttgagatttgtaaggggctgaatgctatactgcacctataggagttaa

SEQ ID NO: 17054 - DNA, 1441 bp, Arabidopsis thaliana landsberg
tgatttgacattgttgaataatcaaatgtgaagaaaagtaaagagtcagactactagacgttcgaaaaatataaatgcgtcaacttcattatctgtcctttctttcttgtcgtgattttgccaggaaactccgcctcgaaagaatttattgttcatatatgaaagtctcgttatagtgacaatgtagggaataagactcatcatgatcacaacaggctctgttttcttctgctgtcgtaatagtagaaatatgtagtttttgtgtgtgtgtgtgtgtgtgtgaagtttataaatgtcaacaagttttcgaagaatttgaatagttcttgcctcatgtgttatgtcgctgcttactcttcaagaggttatctatgagaaatttccatgcaaatccaccactttgttagaaactgaatctccttctagaaacagaacagagttaagaacagagaaagagaatcagacttttgtatcacaattggtttgatcgtcaacataacaataaagagaagaacttgtctttctattatagagaaagtgaaatacaacaactgttttacaaggtttacaacaattaacttatatacaaaccaacagacatgaaaagtcaagagttatgactcttctttcttgtgacacaacaaacataactactttaacttaacagacacgacacttaagtaatatattataaaccaaactcaattacgaccagcactctttcaccgaaagaaaccagattcattcaaagaaactgagggaaaatcttgagaaaaaactgaaaatacactgtttgatgattaaaataatctttgacagaccagacttagagattttaagggtatagtagaggtagctttctcaatttactaaagatcagagttttaacaaaaaaggaaaatttgatggttacaaaaccacaacaatcttatgcagcaagaatgataatttaatttagaaaacgcagtattaaattatagatgacagtaccaaaacaatatatgagtcaagctgtggatcaaataggatgttttaagcaactgagccctttaaattcgagttattgttttgcaaccacaacagtatatcaatatctctgctagtagattcatgaattcttaatttttctcataccgaatcgtctactggttagcttaccaatcgaatggagttataaaatgaataattgatgatctacaacggatctctcgagcataaatgttcttgaatatcatgttttgatactctgttttttttgaagtgttagcaaacatatagcagtaagcaataaataaggagtttactttttcacaaacaaaagattgataaatatcagcggccagtttcaatgtccaaccttgttacaatctgaaatgctgtcatagccaaatgctactggtatcaccttgcgtcgataagatttgaacaccaagcaaatgct

SEQ ID NO: 17055 - DNA, 795 bp, Arabidopsis thaliana landsberg
  unsure (1)..(795): unsure at all n locations
ccagaagactgtaattagtatctttgatggttattgaggaggaaaaacaacaaagaaacataaaaaatgtccagaaataaagatagctaattgttaaatacaatcctctaggagcatattcatttgatcaaatacttacggctacataaaacttggacaaaacttattttgtttcagtagtagatggtaacaaagggcttccttaaaaagctcaacatttgacttccaatcactcacatagaccacacttccctaagaagctcatatcttgcatttgttaccactgcacttatttgctcagcttcctgcttcacattcctgccatgtgcagaaattggtggcagggatatgtgttcaactttctctgctacactaattgagtgatgatggaggattgtatgaaacagaagaagnnnnnnnnnnnnnnnnnnnnnnnnnnnnnnnnnnnnnnnnnnnnnaacaaacaaaaaaagtatagagtgctacgcagagaacaaatgagtgaaggatttgaattagttgcctcgttatatattaagctcttctaggacatccccagagacatcatcaggacaaaactcatcaggtgtaaagttgcagagtattcttttgatcaacagtagacttatcgatggacatacctatgaatcaatcaagaaaaaagtttctgtgatcaagaaagtttaatcaagaacttaaagcgtgataaagataacaaaatcttactaacgagaggcattgactgggagcattatagtgtcattaagaaagaaaaaaaaacctaanaaagagttt

SEQ ID NO: 17056 - DNA, 707 bp, Arabidopsis thaliana landsberg
gaatgacaaatttgacaagctactccttgtgcacagaagcacattccttttctcggtgatgatgagtttttccaagtccaggatggggagactctgcagtcataaggggtcagctatgtgcaaaaccaaggaggttacaacaaaggtttcaacaacttcaagcagaaccatcccaatctgtcttacagaagtataaatgttgcaaacccgcaggaccaattctacccctctcagcagcagaatcaacccaagccctttgttccatacaaccaaggtcaggggtatgttcctaagcagcaatatcagggcaactatccgcagcaacttccaccacctaggttcacacagcagcaacaacaaccagcttcaacaactccagattcagacttgaagaacaggttacagcaggttctccagggacaagcaacaggagcaatagatctcgtcacgaagatggcagaaatccacaacaaggttgattgcacttttaacgatctgaatatcaaacttgaggcacttacctctaaggttagatacatggaaggacaaacagcgacaacttctgctccaaaagtaacaagacttccaggaaagtccatacagaacacgaaggaatacgccaccgctcacgctatcaccatttgttatgatcgagagctgcctactcgacatgtctccacatcaatcaccgaggacagtgatgttca

SEQ ID NO: 17057 - DNA, 1162 bp, Arabidopsis thaliana landsberg
tatgaacaaattgactatcggtttgattaataaattgtgatgaaggataattaatctattaattatttttaattctattgtaggaacaaatgatctatttcattagaaaggaaattatgtatcaacttatcattttagtttataaaagaaatgacccttgttatcttttaattaagaagatataaataatctattaattagacatatatttatcttctatttttattaagaaacatatggtctacatattcttttaagtttctatttaacacggctatacttaaacatctataactaaccttgttaaatatgatatctattaaaaatgtcattttaaattagaacaagttatctaattctttagaaagaaacctatgtttaccaacataactatcaatttcttcattagaaaagtatgagtgtctagttaagtcatgttaacattattataaattctactatttcaattttctcctttcttttctaaatagagtttatacgtataactagaaattgtttatttaattcttctaacattaatatactaagaattaattgtaaattactaaatgggacttttaataacatattcatggttattatgacatagataaatatcttattaattctaagtacttaagtgccatacttatgaattcatttattatgaatagtaaaatatatatcctcatttgactggaaatacgtggcctagtatttatattttaatttattatatcactactaaccgattatcgctccacacactaaagcgaaattaattataaacaattttagtatgaaaatcactaaagtagtgaatagtgcccatactcatttttagaactataaaatcatacgcatattaaaacgttatcgcggggtttgatttcgactacatgtataaaacaaaatctctaaaatcatacacgtgaatcgcatcgtctcaatattacaacaataattcacaatttaattcaaacatgatttcaaaaatgaattcaaatggttttggttctcttcaaccttgggtgaacggatgacggcgaacggcgtgggcacggttgccggggtgctgcgtgggcgagcttcacggactctgtgacggacggcgaacgacggacagctcgtaggcacgggcggactccgttgaacgacaaac

SEQ ID NO: 17058 - DNA, 1509 bp, Arabidopsis thaliana landsberg
cgtagtaacggcgcgccgttacatgacgtgtggcctggcctccatgctgatgcttgaagccgaggggtgcacccccgtggtcggttgcacgccacctgcatggctatgtgccctttcgaccgctggtttcggcgaggatggaggagtgcttgtaacagcggggcggtataacctccgcgtgcggtggattggcttcttccgtttcgggttagcttgcatgacgtgtgggacccagcccccgtgtcgtagggggaggaccttggagcacgtcgatgaagactttgcccacgacgcttgaggatgcgagtggggagagccgccttttaaaaagggatcgatcccccgggcggtagccatgccttcgcactcccctcatgcatcgcgcccttccaccttccgagcccccggatggggagcgcccgcgttgccttcgttttgttgttggaggagcacaacctcacggaggttggcacccttcagccatcgctcggcttcaaggattttcatcatgcagcccggttgcttccccccactaggtggtcacccaagacggtgaccgccagttcctgggtggggagaagcaagccgggctgcgatcttggtcccaccctcagcttcaaagatgttcatcatcctcgctggggtgggggtcgggctgagccggcgctctacctcccacgcaggttcgcgggtcaccccttcccgcggtgttcgagggagagggcgctcactggccctgcaggcggcgcagacttagacaatgtggggctgatcgacggtgggcgtcgtcacctccagcgtgtcggagtcgtcggcttggctctcggcggccccctgccggagggcggctgtcgcgccgtgtgcacgggaggaccacccacgacgccgcgcgctgctagggcagcgttcgtgttctggggcggcctgcctttgcaccgggatggcgcctccgccggaggtcggtgccccgctcgtctgggaggatccgagtggggatctgccggtgggctgacgacccctgtcgtcggtgccgaggcggaggcggctcgagaagtccccgtcgccgacgtgatcaccgccaccatccgcgcttcgggcccctggctctttgtacttgtcctcgcccctcgagcgtcggcgtgggcgagggcagggttgcagcggcgttcgccctgaggccatcgctgctgcagttcggccacccgtagagggggtcgttgttgctgctgctggagcgggcgacggtgagccgtccgtcggtcttctgttgctccgcaggccccccaatcgtgtggggttgttcgtacccgcggaggtggaaccggagttccgttcgtaatggcaccttgaatgccagtgtttttgttcattgtggctgtcgaggccgaacatgtatgtatttttggcacggagtcgtgtttttcctcattttcgagcactaagactcgcctgttggttgtctgaacgcttcgacaagcgtgagttgccgcgtcaaaggtgacgagtgag

SEQ ID NO: 17059 - DNA, 287 bp, Arabidopsis thaliana landsberg
agtttcaaaccacataagtaacataaatatatacattgtatcaatatatcatatactgttgttgtatgtgcttataataatgaaaaattaggatcataggtctctaaatacttatattatagcaaaagtgatcctacaaattatacatgaatcaaatcatatcatactatatacatcttaaagtgatatgaatgtattacttacacaacaataaacataaaacgaataaataccataactcgtttttgggataatttcaaaaccaaaaacccatgcttagcatgggc

SEQ ID NO: 17060 - DNA, 1973 bp, Arabidopsis thaliana landsberg
gttgatgcatcaggaccaaaaaaaagctgaccagccaggatataagcatggagtttcccaacaggttgaacctaatattgggttaactggaggaagtgacaacttgccggctacgtgtggcataaatgttggagtgtgtgttccagaacgcagcaaccctaatactagaaaggaggtgagaatacagtgaagattatgacgcatttgtgtgtattctgtaaaaatgacagatatttttgatgcctcttaggtaagagaagaagattctattcagaaaggaggaaagaaaaattcttgttctgaaatggatgcacaatctaataggccattgaagcataatgataaggagcatgtgtcgagcacaaaggtagttatatttatttctggttttgagatacagtatacatacttcaagtattgcactagtacgtgctatttgatgtatgtggacagctttacattatacaacaatttgctgttgatgcatcaggaacaaagaagagctgaccagtcaggaaataagctgggagtttcccaacaggttgaacctgatattgggttaactggaggaagtgacagcttgccacctgcgtttgacataaatgttggactgtctgagaaagatagcagcaacactgatactataaaggagatgagaatacattgaagattataacgcatttgtgtgtattctgtaaaaatgacatatatatttgatgtctcttaggtaagagaagaagattctattcagaaaggaggaaagaaaaaatcttgttctcaaatggatgcacaatctaataggccactaaagcgagcgaaagatatggagcatgtgtcgagcacaaaggtagttatatttatttctggttttgagatacaatatacatactttatgttgcagcaaacccacttacttttgctattggttattggcagcttggaaacaaagaggccgtgcatgaacccaaaaaagtaagacttcccatttatgtaaatgtaacgttatatgttgttgctccgctgaactatgtacatgtttatatgccttgcaggatgtttcaccaactgagaaattggatgatgaagtagacattgtggagccgaatttttcgttgggactaacgcaagaaatcaacgataacagaagcaggttgcctccaagagggaagaagaagacattccccagcaaagtttctgtgttgcggtccagcaaccggataagggacagtccaattcagagcaacagtagagagaagatgactagcataccggtccagccgcgtcaaacagctagcagaggggctggtataagtcatgttagtagttctgcaaaagtggagaagcagactccaaatcaatcaccttcttttactgggccttttcaaccgttctctgtgcctagtccagcaactgtgaaaaggtttctcaaacaaatggaacggggagtgtaagtagtcacactaattatactatagtaaccgctcttctttgtggtatcaactaatgcaacctttatatgttaacatgcagctcatatgctctggctgatggcattgtactggagaatatagaatttctgaccatttttgagggccagacactactagatgaatcagtaagttactatagaatacttcattcatctacttttgagataactgtgggagtactgaaagacaatgtaactcatatatagaatttgtgctaacaaacattttcctgccacagggacttgatctgttagtgaggttcatacagtagctgcggttagataaaaataagccgctgcgttttgatttcctaccttcaagtttcttgtcagagctaagacgccagtacaacaagtttgtaggagctgcagctagataagagtgctttttacttcagcactcttacaagagtccctttcatggtgcgtccgaaatggtttgccgagattgacgtcatctactgccccatgcaggtcgagaggc

SEQ ID NO: 17061 - DNA, 837 bp, Arabidopsis thaliana landsberg
actggtagggaggttagacgccgatgctcttacctagctctcgatgtgtcctgagcgtgggtgtgtgtccctggtgagtgtctgctccttcttccttcttgtgtcagattgcctctggttctcatagccgagattttcgtccatttccaggaggtggggtttcacaagccttccctgccacctatcccggagacgcggtggatcgagccgccggagggtcgctgcggagaagaagaaggagaagaaggacgcggaaaaggctcgggctcgcaagcgaatcgaggctcgggatgccttggagaggcttcgtcgtcggcaggagagggacgggctcccgaggccaagtcgactggagacgcctgacgatgacgacgacgacgacgatgacgatgatgaagacgatgacatggctgcccgcctcggcctcagcccgggtttgaggctaggccaggagtcgtcaagccagccctcgagcgacgtggcgccgtcagttcccggagtcgggacgccgaggtcccggcccgaagagcgggggcagaccgagggggtacttgacccctcgaccggggaagttgaggtgaccccggggagtcaggccgaggcgtttgttccccgagagccgtcgcccacgccggaagcgcaggagagcggccctcaggtcgccgtggcagcgcttgggcagtccgtctcccgggcgtccaaggtgcccaaggcgaggacggtaccgaagctggcggcgaggcagacctcggcggtaccttcgggggtcaagatccgagagacctctcctcaggcgcggttgatcatggcccggagcaggtaagtggggatcgtcta

SEQ ID NO: 17062 - DNA, 1960 bp, Arabidopsis thaliana landsberg
  unsure (1)..(1960): unsure at all n locations
atcacaaactaaaatcttcggccttactcttttaaggaagtctctctctcccttttccttctgtttctcttttatcttcttgggggattatataattgtctgtactttagatcgaacttcccttcttttgcctgtttccctgaagtatgcctgttttagacttgtctcgatcccaactcaatttgatttcttttctccgattcttcaaacggtcggtcgttgctggtgtacttccgatggggtttctaactcaaacacaaacatccgattcttacacaagtgatttctcactcatataatggtaggccaccacacaaacaagcaaatacttaacttattatgcattcaaaagtttatacaagttataactatcggattttagacttagtcttacatgtactattcaacaagttctaggccttagcatatttacacacaaattcactatgacttagtcgattttatacttagtctaaaaacgttaactatattctttcctagaagatctcatggaccatcagtcaagggttcctacacttgggacactcacaccttacccataaaaacgaggacatcccttcattcaaacacttctcctctgctgccgcagtcattaatggtcccactcacctcgaggatccttcgcccgcatttggcgcaaggtacgggcagtacatggacacatgtcccattccctcacaacaataacacttagcataatcatccatgtaaggcatagtctgtggtggatacaaacactcttcggtcggatgatctttatggccgcatatctcgcacggacgcttagccggagtggccaacttcttcccaactgacttcctcgtcgttgcatgtattccaggcttaaccttggacttaatcccatatctgatcccaagtggatgtgagtttactacaacaatccgttggtccatagccttctccgattccattcccatttctgccgctatctttccgttccacctctcgttttctcccgccttgtcaaccaactttcctttcgacctttcttcatcaagtcttagacgattaattaatcaaagactcgtggttcagttcctgttcaagtagcatcggatcccaccttccatttccttcatcttcactcggttcatcccccttaaacatttcatcctctcagcatgaatccgccttgctaggattcagtatcgtcaggatagcctgcgaactgtccgatgatatgttgatcgcactcgatctcataggttatggcgttaaagattcaaatgagtccaatgaggaattacccccatcgttcccatttcctcctctttcttctccgttcggaccaaagtcttgggcacactaggctattaacttatcgatcgcctgctctaactcgttctctatctcattctctatgactccactctcatcttcctcgtcatttcccataagcattagcatgtcatactcatcatcgtctccatacttattcatcgctccaaacgcaccattcgcctggatcaatggtacatcgaacatgtctccattcacttcttccagttctagcccatgctcgccaatggttcccatatttggaacactgaaacttccctcctcatccgtcgatggcacatagaaacgtgacagtatattgttcagactgtcacatgcttgttcttcggtggcattctcagttggcaccgcgtataactcaccatcctcggtgatcatccactcaacatggtttgcctcttcactagataacagaccatcatgattatcaacatcttccggacattccgacggatccgattcaatcnnnnnnnnnnnnnnnnnnnnnnnnnnnnnttggccaaaaactaattattcatggccatagacaaactttcatcatctatactgcttggcagaacgaagttctcgaggtagaacacattaagaccgtgcaacggactaacgatgttgctccctt

SEQ ID NO: 17063 - DNA, 765 bp, Arabidopsis thaliana landsberg
atcgacctatacattcaggtaactagtaggacatatatatctcaaatgtctaaaacgcttggtcacataatgaattttgatgaatctttggtaaaataatgtagaggaagcttgaggttaaagatttcaatatcgccaaggaggcaaaagatgttggaaacgttgttattaagacatttccggtcgagataaaagatggaaagttggagatacgattgtattgggccgggagaggaactacagtcattcccaaagaacgtgtttatggtcctctcatatcagctatatcagtggatccaagtaaacaatgtcacttttttttggtatttttcacattagagttgatttattatctcatttctaacgaaaatttaatacgttgatgaaaatagatgttaatccatctcctagaaatggtatgagtactggtactctccatacattggtagtgatcttatccattttcattgtgtttctcgtatttggaactctatggaaaaaaggttgcttgagatcgaaaagccaaatggaaaaaggtactcactaaataagttatgatatttcttagtgtttgtcatttttattttgtgtttcttgatacaattgttagagcttcgttcttctctcagatttcaaaaatttggaactcatgattgcttctttctcgttgaggcaaatcaagatcgctacaaacaactttgattctgcaaatagaattggagaaggcggctctggtcctgtatacaaggtaagaacagaaagaaa

SEQ ID NO: 17064 - DNA, 1045 bp, Arabidopsis thaliana landsberg
agaaacacttttagttgcagtttaccgatggacccccccaacattaatagaaacagattataagttgctaaatgacttttaccattacaggcaatgaggtcacaaacagggcaacatattaagctttaagctacaaatctggaaagaaaaaattcggctatttaccatgtttatagccaccattaaaaataaatcaaatcattaggctatctacatatgttaacctataaaatctgagctatatgaagtaatcgagaattaaatgattcatgggccatgtggtactgcaaatacgaattttccatgtatggttgaaggtaaatgttctaaacaatacccaaagaaacatcaggatattaccaaagttggtaaggatggttatcccatctatcgaaggaggatgacaaaagactatattgaaaagggtggttttaaatgtgataatagatatgttgtcccttataataagaagctgtcacttcgatatcaagctcatatcaacgtggaatggtgtaaccagagtggttctttcaaatacttatttaagtatatcaacaaaggtctggatcgtgttgtatttattattgagccagccaaataggataaaacaacagagactgcgacccctggagaacctccaaattctactgagaaaaaataggatgaaatcaaagattggtttgactgtaggtaattgtttaaaccgtcccccatttcatatattggcattaattttaatgtgatatttacaaataagtttcatatgtttaggtacgtatccgcctcggaagttgtttggaggatttacaaatttccacttcaacaacgatctacaacagttcaaagattatctttccattgtgaagagaaacaacctgcttactttgatccaaacgcggttattgaagatgtcctggaacgtataagcaatgaagattcaatattcatggcttggttgactttgaataggaataatactgttggaaaaatggtaaacgtgctagagaacttctatattcacaaatctctgcctattttacttgga

SEQ ID NO: 17065 - DNA, 983 bp, Arabidopsis thaliana landsberg
gttcggtcttttttcgcgccgtcaatcacttctgctacaccttcgcgcgtcttcgctcctcccatgctcgcctttttcttttccgcaggtaagtctacctctgttgtattgttcaggttgatccaatggagcacgactggtagggaggctccgatccgtagaacatttatgggagcgtcaaggtgaatggagccaacacaattgttaaaaataatctacgactgacagtaatctaaacggattactgtttttgagttattctttgtttcaatcagctttttgttccctaaataatctgtgatgatgtaatgatttttttctaaaaacatcgtgacatattgttgtcacttgttctcaaatgttgtgaatcaagaacaagccaacacaattgttaaaaattaagaatcttcgtccttcgaaacattatttcctttcggatataacgatcttcggacaaaagtcatgaaggacacaccttcatcatcacagcatgtgttaatgaaagaagaagcatatgaaatataagagacttcatgaataattatatgacattattaatatatcttctttatattaacatggataaacagaaacaatattgaattacatttgtacttcggcttgacagaacgtaaaagtccaagcgtgatgcacaaatgaataccaatcagcgtgaacagtacggggggtactgttcatctatttataggcacagggcgcagcctgtgtgaaattacatttataccctttgcaaccgattacaatcaagacacaaattatcatgggtcgatctgtcttttcatctttaagtcggtgcaacccttcgtctcaagacatgttgttatgccgaagttccctggaagatagcttcggcgttatttctatgctgatcttctgaaggtgtttcttcttataggacttcggcgacgatgcagacccccaacagtagccccttcacggtgctagatcgtttttcataacga

SEQ ID NO: 17066 - DNA, 1610 bp, Arabidopsis thaliana landsberg
accacaagaccctaagactagctaataccaggattcgtagagaatatatgcaatgccaattcaccagagatgttacctctctctcatggagtccacgaccatggagtaaaggaagacgactcaagcattgaattgggcttaacataatggttttaaaaactgacctggagatattagccttagaagttttggacaaggtaatgggcttgggctttctttgagagataaggcccaaaattgaaactaggtccaatggggaaaaccctagtttcactttggagagccaagacgggagaggggtgcggcggttgtccgatgctggcgaaaagatatgcggtgaatagatcatctccgatgagagtagaaacagcggaaacaaacgatgaccgtagtccgaatataaggcaaagctccatagatgacaagcctttccggtgcgaaacttcatatacccaaatgaatggtcaccgtgcgccgtcgacgcctccttcaagcaaggtgcaactgacggttcaagctggtgtgaggattcttcaaggttgtaatgaatttccaaataattgaagtccaaaccgatggatttaggaaataaatcttcgattaaaatcggaggtttctgggcatatagatctgtcaaagaagctgagatgcagaggtaatagaaggggtttgtcaaatccctcctctttccttcttcgattaatgggagagagcggcccggatccaaggtgggaagaaacagattgagtaaaagtgttcgagatgggttagataaaggaacaaaagaggggaaaaacttcaaaaggggaaaattaaaacagaaaactaaagatgagaagatttgtcgaagaaagaagaagagaataggatcccgacgccggtgagaacaagctacactggcgtcggaaaaaggttgaaggggagctgcctcgatagttgtaactgagagaaaagacgatggctttgttgaggattgactctcttaattcaatatatatgtcaaataattttaatataattttaaaatatgaaatacacttgttagatttagtattttttttgttaaacacttaattcaataatattgtgttgtgcctttttatgaatttgaaatttttaaatttttttatcaattattatgtcaaaagcagattgcgacttttctctctgagagagacttttggagcgatcttcgaatctttctctttttcttccttttttctccaaatcggagtgtgtttccgacggaaaaccccgttattaggacagttgattcccacggtttctctctgtcacatttactcggtggcattttaccttttccatgtttttcgagggataaccgtatagagaaaccgccatggattgactcttatatatctgtcggaattttatccatttcctgttcttcaatctgtccctacttctattccaaaaacccattgatctctgatatcacaacaatgagtgataacgttcgtaagtcactacaagatatcaatttagggattaatgatacgccagttgcattaccgccggaattgtgtggaagagcggccaccatcaactgtttctccttgattgtcacggtggttaaccctagaaagcgc

SEQ ID NO: 17067 - DNA, 712 bp, Arabidopsis thaliana landsberg
acttgttcatgccctgataacacttttattcagattctatatagtttttttatattgattattgcaaactattttgttcttaactaaaccataagttggtgttttgttttctacaacaagaagatattagtttatgtttaaacaataacaagaaacaatacatttttaaccctcaaagtgtcaacaggtagcatttttaacctcgaaagaatttcaataacactataaaccaccaagataatttaactaacactttaaacttccaaactcttatttgcacttccataaaaatgatggtaaaataatttatgtctgtttgataaaacattatttaatttaattttaattttaattaatttcataatttattattccttctatttcatactatatgatattttaaacttttttgtttcacaatatatgatgttttgaaaacagaatttaagtttaaaagtaatgggttcgttattgattcatttttaaaagtaactaaccttatcgacaaacggacaaatttttggaatatagatctcttacaagagatctttaatccaaaaatatcccgctgataagtttcatgcatgtgggtgcacccaacaaagaggatactttaggtagtcattttacaaaatccggaaaatataatgtcaaatctggatatcatacttctcggatagaacatatggatgcaactttatcttttattggt

SEQ ID NO: 17068 - DNA, 1974 bp, Arabidopsis thaliana landsberg
  unsure (1)..(1974): unsure at all n locations
ctacaaccatatgcaacatctccgccgttaatggtctcaccgcttcgaaccatttagacatttgatgaatccaaaaaggactgagttctaatggtttatgatttgcgagtacaagaagagagtaaagattaccctctatttaaaggcacaattaggatatatgatgtatccttgttgaggagaagaatgatggccgttagattcatctctaacgtctaattttgagtcatttgaaaactctagatttttttctatgttattcaacatatcttttttttgtagggttattcaacatatcttagactagcaatttatgtttaacctaaatgtaaaatatctttactttctctttttaaataatattttctacatatacgtagtttattcaaactatttttatgaagttcaataaatttatatatattacactaaaagtattaagtattatacccaatgattaaattttaaatatgacttcagaaatttgtcaatataaatatatatgaaaattttattattaactttgactacgagttttccagacatacttgaacgggcttcatagcgaattcaatcggttatattaatttgtgataccactacaacatgttatgatacatcatctatgaatgtgaagctcttcttggagttcttttccctatagtcatggacttgtctttattcataaagatcaatttgacttgacatatatgacaaaacaaatttaatggatattcatgtttcctgcatcaaaactaaagaaatgaagatagtaaggtcacacaatattttgaagacaattgggttaagatctttaaactggaatggaattaaaacacataaagtgggataagaagatgttatgaatgtttgtatgaaggataattattattgaatacagagtttgaaatatatacacatacaactattgctaggctatcctaagaagattaattacatgatctaatttacataaatagaagatatgattgatcaaatcatttgatatgattgatccttaatatgccccctcaagatggaggggcttggcgtaannnnnnnnnnnnnnnnnnnnnnnnnnnnnnnnnnnnnnnnnnntggttcggttagtgcatcagccacctgatcttttgtagaaacatgaaccacccatagcgctcccatttgaacttgatttctaagaaagtgatagtccaaagcaatgtgtttcatccttgagtgaaaaactgggtttgcacacaaatatgtttcttcaacattatcacaataaacagttggagcactaggtaagacaattccaagctcctgaagtaacaaacatacccaacgaatctctatggaggcatttgcaacagacctatactcaacctctgttgatgatctcgccacacctctttgctttttggaggaccaagatattggattgtgacctaggtaaacaacataagcatttgtggaaacatagtcatccgtatctccagcctaatccgcgtttgaatatgcatgaagtgagagtggattgttgcgtttgagaagtataccatgagttggcgtaccatggagatagcgaagaagtctcttaacagcttgccaatgttctgaagttggagaatgcatgaattgtgaaaacttatttaccgcataggagatgtcgggtcgggtgaaagctaagtattgaagactacccactacacttcgatactcagtaggatctgatagccgaacaccagaatgaagagagagctttggtgttaatgccgttggtgtgtgatacggttcaccaatcctattaccgcaaaaggccacgtcaggagaacgaagctgagttggaagctgtcgtggaagcgaagggaaaagaaggagagaaagactccaagtgagaaggagggtttcctgagaaaacttgaagtataaataagccattgtggcatttatttccttttatgcttttatctgggtttttcttgagattta

SEQ ID NO: 17069 - DNA, 2346 bp, Arabidopsis thaliana landsberg
gatggaaagatggctatgggtatatatattgtttcagagacctgattttttttgaatttcgttttcgtttgctattattgtttgtggtgatccatttttccatcctgctataatttctctaagaatatttctattactttttcaactttacattttattgaccagaaatttcttaagtttcaaatgtttacaaagggaaaaaaaattctaaccactcgaatatatctaattatataaccttttttaaaaaagaatgtatctaattatataacctttttctaattattaagtcctccttcaatgtattacattattcgtttttttttattagagtatgaaatgaattatttcatttcttattatacttttcaaaattttatgtttgttgcaaacaacagtagttacatatacaagggtattttccgaaacgacatagtttcaggagctgagggaggatgaggatgactcaacctggctccacaaggcctcagcataagcctcttcctcttgcttctcctcttctgcaacaaactctcctcttccttcagcatcagcttcttcttcctcttcttcttctacttcttcctcaacttctgattctccacagaaacttgtagagccttccctaaactcagcaaaagcttccctcatagccaaacctgtagccggcttatcactccatccatattttggagccggtacaacaaaaggcaagacaatatcatcaattttagacccttcgcatgagtcggtttcttcatgaggtggagggaaaacgaacacaatcccgagctcatagttacatacacgaagttttttaactgctctgatggcattgtttgactggtcctggctgtttctggaggatctggatatggtctgtccccaggcagctgcactgaaattatgtgagccgctgtaaacccaaccaaacgaagaagatcgtgaacctctcggggaggtaaagagtctcctagccacctgttcatagtttataaagacattttactacagtggaagagtcgggtttcgccaactcgaaaaatcttttattgtcacagacagagctctcctttgttcttaccttgatatgcattgggtgtccaactctatcttgaggattaggaactgcatcgtgaagcacattgctatgtctccacttttgccaggttttctgcacaagatagtcaaaagacaaagtttgaggttcataatttccagtacattattgaatcagtccaaagcaatccttactttatctttctgaacaaaagctttgggcattatacaagtgtaaaataagcaaatacctcagagaagcaaagcaaacgtcttgaagacaagacaccatgatggccattcttgactctttctatggtagggaagattattttaatggaaggagcttcccgttcttccctgttactccagcatccccactgatcaagaagaacacagaccaaacgtttcatgcaaaaaacttgtagtaacagtttttaagggtgcttcaaaaaaaaatggtacctctggatcagactcctgggagtcaaaatgctgtaacgcttttttacctgcagctgatgaaaaatcagcttgaaatcctgtcgttgctgagcctccaatcgaggatgcacctattataagaaaaagaaaaactataaacttaataccctattaaggtgtttgtttaccattatcataggcaatgaacttactgtagacgaaatcagattcctgagattcgggccacttgtaacggcctaacacctttcagaaacccaatacagaagaacacagttagagacagatatactctcgttataactcaagggtctgaaaggatgattctttagttttattaataatcaaacttacctcttgtagcctccaaatgccagtacatctctgaagtgaagcaatcaacgagcacaatgcaacaacatgataaggttgaatcaactttgacatatctgaaatggacactccctgcaaaattcaagagagatttttagatgtatccatactctatttatgcaaagtatctcataagcatatgaagagtaccctgcctgtaatacatgcagcactagttgcaccttctcgttgctcctacaagaagcagctccaaggacttcatcccgatacacatatcccacaaatttaaagaatccaatatcccataaaggagacacccattttgcaatactccgtggcaaaaagcctagttggacaaaatctgtcaaaaggaaatttggacgagtcacataatgaaaattcatgtctggaacatacagcgatctgtaatacatgaaatgtaactacctaccatctcttgaatcatcatct

SEQ ID NO: 17070 - DNA, 1366 bp, Arabidopsis thaliana landsberg
  unsure (1)..(1366): unsure at all n locations
caccatcttcatcatctcccttactcgaccaccgtggtctcgctccaccatcgccatttaaaagctcactcgattgtcaaagacaagaagagtgaagctcaaccaccgccactcgaccgcgtttccctctacacattcaacactcgaccacggtgctaccatctccacacccgctcttgttcaccatacactcgaccaacaactctcaaagtaaaaaaaaaaaagaaaaaaaaattccaaaccgacagtttcactcaaccggtttactcgaccggtacgctggtttagattgtgtttttggttttgctattactaacatattaacgtttatctttgagtttcgtctgttttcaggtttcatcatgagtaactacagtggaaaatcctctatggaccctgattataatgtggatgaagctaagtcctggtccactagaccggagtgagagcaacatgtttacgagagctatagggatgaatttgaacgctctgcagctcgacgtaatcaaagaagagctgaaatcgctagaggaaagagggcgatgtcgagtagatatgagctgattgatgaggatatcaaaactgagtatgagccagagtcatggcgcagggagacgaagctgctgaacaaacccgacgaggttacagtggaggagtatattagattcttcgagatgaatgatttctggggaacgaggtatccgtgttatgagactttagcccaactggggttactggaggacgtgcagcatctgttcgagaagtgtcatctggagacactcatgtcttactcttaccctgcctataaggaggagacaatagagtttctttccacgctacaagtggagatgtatgaggcactcacagactttgagctggataccatggggttaggcttcttgacgttctcagtgaatgaacagtggtatcaactttcgatcaagaagttagaagaactgtttggtttccctagtggaaagggaaccaaacccagatttgacagagaggagcttaaggatttgtgggccactatagggaacaatcnnnnnnnnnnnnnnnnnnnnnnnnnnnnnnnnnnnnnnnnnnnnnnnnnnnnnnnnnnnnnnnnnnnattagttgccaacgtcttttactccagggagtctacaggcaccgtgtctaacacggacatggagatgatagattatgcgcttatagggattctccgcggacgaaggggaagaatgtcttgagaggcgatctcaacaaggcaccaccagtaatgcctcagttgatccatctgtgtggatcagaaagtgggcgttgacgacgggaagagaaggtagagacgctatcatggtggtgtgtgagcgatctgaacttgtga

SEQ ID NO: 17071 - DNA, 2578 bp, Arabidopsis thaliana landsberg
tgcaggtgcacctggaatctccaggatccctaaaaaagactctgtccaagcaacattatactatatgaatgtgtctttttcccacccaagtgtatttatctcctcttgatcttatgtcttcaaggtcgcgataagaaaccatgtttcggaaatctgtgaaagttcattcttaaagggccacggattttctcagcattggacaatacctcattaaaatcaccaatgaacatctattcttcatttcgattgtctgaaattagctcaagtttttcccatagttgatgacgttcagtttgtacaggatgtccatacaccaagacaaatataatagaagctcttattattatatgttacatgagaatcaatgagtctttcattatgagaaatcaagaacaaagataaattgttcttccacataagagctaagccaccactccttccaatgggggctgagttattatattaggaaatcctaaattacacgctaatttacataatacatcaaactgattaagagtttcaactagaagaagaataacatacttatagatacgagttaaacgggaaagccgtaactgcgtcacgtgcacaccaatgccctgacaattccatgaggctatcctcctattcgatcccttaggggtaccgggcccccatgcctccgtctattccattacgtatcgaacaggagcctgtcgactctgttttcctctcctttttgtaaagtaggctcaaaaccgccatctcctctgcttcttcaacttcttgaaacagttgctcaaactgaactctcttcctcttcatgaagacgaaaggattctgtgcattgtcagaggaatctagaaggagatcgctttcaacgggtgtgtgtgttctgactcttgccaatttcgcatgaaggtagcggagtcgttcaacattgaggtctgtgtcctcgaaggctcttagaaatgctgaagagattggccttttcatgacattactttgagtctcccttggaatcgatgcttgaagtctagggataagggtaacagggtccaccgtttgtagagcatctgtatcactcatgtctttgtccttgttgtcatcttgatgatcttcatcattatcatcatcatcatcctcactgatcacggctggatcttcatcatcaaaagcaagagtgcattctttgacatcatgcttcaatgaaccacatttggaacagaagttccttagcctctcaaaacgaaacttaatcactgtgttttccccatctgcaaattgaaagtttctttggaaacgaagtggatcatctaaattccaattgatcttcaccctaacaaatctcggatgattcgaattttaatcaaagtctacatcaaccacatgtcctaatctacttccaacacatcgtgccatagcattggtgagaaaaagaagagggatacccgtaatctgcacccagaaagggatgatcttcatttcagcctcagtgatatttggataccatcggtggattgagagcatccagtaattgaaactccatggaccgcgcctaagcacaaggttcatcgcttcttctgtctgaaacttaaactggactttgcctctgtccagaatccgaccaacacacgaatcagggaaaccccagaccgttggtatctgccctatcaaagcacgaagattctgtttacgagggttcaccgtcgtcacaacaagggaaaagcggttcacatgagcggcttgtgaacaaaattccggtgtgagagccaccggttcatcatcaattcccagagtcaagtcttgaaccgattttcgaagtttgtcactcatgattacggatgaatttgtttgaggtgaagtggattgagattgtggaactagaagagaagaaaggaagattatatagagtcgttgccatggcggtttaaattggtaggtatcccccaaaagaaggggaaaccgaactgccatggaaaccgaatggcagagtataaccgccaacaaaaaaccgaaaaggaacacggattccggtggtcggaaggaaactccgttgtggagaatcgaaacggtgtgaatggggcgtatcgcccagaaaatcgccctcagaaaagctaaagagagagttatgaaccaaaaaaaatttcttttgataaatattgtaaaaggttgtattaaagttatttttagttatgtatttaaattgtaactatttatcatgttaattttaaaattcaaggagtttataatattaacaacaagtagacatataaaaacatatctttaaaaattttcaataaaaaattttaatcacacaaaaaattcttaagaaattttaaaatagacccacgcgacttttaataaatttttgtgtgatttaaaatatttactgaaaattttgagatatatgttttaatatatctacttgttgttaataatttaaatttcttgagttttaaaattagcatagcaaataattcaatttaaatatgtaattacgaataactctaatacgacttttagggtttcaacaatcatcaaagacattttttggccatatatgttgataaatgtgtaacagtttgaaatttggatg

SEQ ID NO: 17072 - DNA, 1092 bp, Arabidopsis thaliana landsberg
tgccccgcgcacggcgtcccgcagccactcgatcccccgccaccgtagaccggccagcagagcctctcctagccgcgtccgaccctcggagtagactgtgcatgcctcagtgaagctccccgagcaaggaatcgaactctgcctcgccggagaagccagtccacggtcgccggacttcacccgaccgccggtgaacgtagaccgagctccacggtgagttgttcttcaactccttgcacgtgtcgactcatttacacctcgtgaagcttctcgtgcccttggattgacctatgctgtcgtggttaggtcggagcactcgccgccgacgagttcacccgcctgcgcacgtggaccagccgattccgaccaccaccgccgtcgagtcgtacctcgctgtgaccgccaggacctcccggagccaaccccgcccctcgtcggacctctctcgccgccggtaagccgcgccgccctttttccttccgcggttactgtttacataaggggagggacctcgggggtgaagaagaaaaggcgagggggttttgtgcgctgtcagtgactcaagggaatagtggcgcaggggtagaaatgagtggattgatttagaaagaacccagggtcttcggtgcaaagtagttttccaggaaaccttttaaaatattctgatttaaatccaaacagaacttgaaaaattcataacttcagttaggtttacctaaatcgagtcaaacaaattttgccagatcctaaataatgtaaactacttaggaaaaatataagacccctaagtgttacagaaaactttaaagttttgatttaaatgattaactggtcaaaagctaaaagaaataaggaaaaatagctacactatttgactggggtcaagaaaatttagagaggcacttaatcatttcctaacctgtttaaaaataataaacccctctgtacaccccattaagatagaatttgccatttaaaacacgtttttgcttaaagttagagaaaatataaaaggtggtgtaaataaagaccatgggagcaccacctatttgttagtgacattatcagtacagtcactagaaaaatctatat

SEQ ID NO: 17073 - DNA, 1154 bp, Arabidopsis thaliana landsberg
aatgccctatgccacgatgattatatgaccataaaacactaaaagcaatgccagggaacatgaatctttatagacttaaaataaggtacatattcttactttagttttgattggcactgcttaataccgtcctctatcgctgcaaaattcttcttgactacagaccattggttagttgacaaatgagctcctgatagagaagaaacattaaagctttttcagcaccaaagttgcatcatgaagtcgatattagcagaggaaagaaacgttatgcataattccataagagaagcagaaacacttacaattgaaatcaacaggagcatatctaaaacaaaaatgactacttatagcttcatagtcaagaccaagacaccaagttgtgtttcaaattacctctaaaagcctttccatgtccctgagaaccaatcgataggaaaggttggcctctgtatctttgaaccgtcgcattttgcttctccgataactacagttaaagaccaacaatttctacagtgaccactgaaaaactcaaaatcaagatgagcacaatctctactgtatacagtgaatcaaacatagaacaataggcaaagtcgcaaccttacaaataaagcgctcatcttcaccaccaacggtagcagcagcaacagaacctatctcattcttcgccggagccaccgtctccggtacgagtgcttcaccgggagtcgatagcaaaaagacctcaagaacatctctgactagcttcttgtgattggttcccgataagtcgaaaccgagtttagccgaagcgtcaagtcggagcttgaactctgtcatttggtccatatcagattctctgagtatggccttcactgtttcctcgattttttgtgtagtgacaatctccatagtttcaccagaatcaaccaacgaattctccatttcgcccgaaaaaaaaaataaagattaagaaaaagatttcgcagtagcgttgagttttggttgttggccggcgttatatttagggttcataaatcgccgggaaaaaaaaatttggccggagtgtgaaaaaagaggttctacccagaactcaactcgggttactggattcagagtaaaatgtaataaccgctagaccatagaacctttttgctatagctgttgcgttt

SEQ ID NO: 17074 - DNA, 1449 bp, Arabidopsis thaliana landsberg
accatttctttaacattttgacaaatcaaatccgtcacatctaaaactatctcattaactagaagattttacaccaaaatgcaacacgtaactctttaatcatttaaaaacaatatactatagttgaattctaaatgaaatcattttcagttcatttttggcttcatggtgcttaaacattgattttcctagatttactttacgttgaagagctaattatttttgtttttaatatcacgtgggtgacttctcaaagaaaatgtcaaaaatctttgtaagaaataaacaaaatttctttttttaagaaaaatatcatagactttacttttatagaatttccattgttcttaaaatcgattactttgttcttttcttgggtccaaactttaaattgattacactaatagtattaaacttttttttgttggttactaaaaatcaattgaaaccgatagtggcaaaagtccatatatctttctctcatctactcgatttctgaatcgcgaacgcagcgagcgatccggaatcgagagagagagctaccaatttttccaacttgttcggttccttataaagctgtttactttcccttgcgaattctctctctctactataaagcaatacccttttctttcttttttggtaacccccaaaccctactttgtccagcgagaaaggaagaggggtttcgtctgattccgctaaatctctagtctttatctaaagatcatggattccgatgatgatatgcacgatatggactcggtagattatgattattacagcggcggcacctatgatgacaacgatagtgatgaaactgatttcgggtttggtgaggctgacaccgacgatgccgccatcatcgcctcctatcgctctaaggtggcttcgattttagtgtcttgttttgggctgcttttgcagagatggcgaatgttggaagctgttttttgtttgtttgtttggtttggttaatatggcctctttgttcattactctatctggttgttaaagtttgcaactttttgccgttttgagcttactttcttagtctttggtaggttagtttttccattctgttccggctttaatggggtatgctgctgagctttaagaagtttttttttttttggtttaagacttttgctttattcatgcaatgtctagcctcaatagttctctccctgtttattggttttagttcatatctgctcttattttactttgaccatattgactcagtgttgttgtaatgatgtatgcttctagagtaattatgttgttctcaaggaagaagatattcgcaggcatcagaacgatgatgttgggcgagtttccgcggtcctctccataaccgatgtcgaagcaagtactttgcttcttcactatcactggtaaaatcccttttacatttactgtgtgattttgttataaatctttcggttt

SEQ ID NO: 17075 - DNA, 1632 bp, Arabidopsis thaliana landsberg
taaattgtttactacattgcttttcatggttacttaatttaattcatgtgaattagttaaccttttcttatagatattatttcttatcttattactaattataaataagatccacaaagaaataatccaaactattttaagtaatcttgttgtctagttccgtacgttttgtgtttaccaaaacatacattgcttgctttgagggcattattagaggttttaagtaaactcagacaaagacgctgccgacagactcaaccggcttgatatcgacctctcgtagctctagtttcatccctttgcctcctccattcgccaatggatggatcccgagctcaggtccagacatatacgcccgtgagtccctctccccctctaccgataccccaaaccgcttctctgcctctgcatccatcatcaaatccaaatctgatcaactacaaatgatatatactaactacagtgtgccatatcaatgccattgctagctaaagccgtctaggttgtttctctattgataccctaaaccgcttatctgtctctgaatccatacccaaatccaagcataacctaccaatgatctttagtctttactacattatgccataaataaaaggagcattagctaaacatgtctagacgccgttctacataaatataaattgaaaagtcaacgagcaaataattgacaattaaacgataattggttaagagttaaatatagacagcctataattgtttaatgacaaaaacgcttaatttcaatgcctaaaaaataatagtcataactacctagaccgttttttcaacattaaactaaacactgtctattgttttttctaagaaaattaaaatgtaaaaccacaagaaatctcacattaatataagacatgatataactaatatacgaattttcttacgtaccctgaatcatctcgtggaaaagctggccatcgcgtgtaacagccatcatgacattaggtaaaccaatgggaagctcatggcccaaatcaacttgccaaaaatggaaaactttcccataagtcttagcgactttatcaagatctttacgctgaatggcacctggaacaccaggcatgaacaagaaccctcctttcacttcccactcgtgcgagtgccaaagcttcttctcttcgtcaggcaaagtcatgaacagcttctctgacactatgtactccaatccaattagacgagcgtttgcatccggaccgtcgtagatcaaacactgacgcatctcttcgttcacgtgactgcagaaatggtgagcctctacttgtcgtgccatgtcgtcagcatagaaatggaacctgccatcacaagaaattaaataacatgccttctctgtaacattgtaaatacggttaaaccaaatcgaaatagaatttatcacgaataaaaaaattagacgagattgctcattggtgccttgttagttaaaattgattacacataattttttgttggcccaaaatatatatatatatatatatatatatatatatatatatatattcaaaacaagtagctatatgttttttactttcatagtgagaatcacaaatctaagaggcttaaaaagaggtggagttgacaaagatcgggttttacgta

SEQ ID NO: 17076 - DNA, 4834 bp, Arabidopsis thaliana landsberg
atttaaatagtatgtggattagtaataaacatgatttatcttatttgtgtattagtaagtaaacatgtatgtatgtgtattagtaactaaccggatttttctttggtcgtcctcttgttctctttggtggattcagaactgttgcatttttgcacctttgtttgttgtgtccttcttggagacagttggagcatgtcatgattctcccaacccgtgagatcttgttcttatttgaagctgaagcaatctcatttctaccttttctcctagcataattacttggcctaccagaatttcctcttctccatggtggtggcaaaacacctaacctattggttctaggtcacaatggcatcccttggacaggcctgataccatccttgtatgtttctcgccacatgatctttgtgtaatattcgctcacatagtcctcaaccttttcccttcttcctattatcactgatgccccatggatacaagggattcccaccatttgccacttcctgcagccacaagttttattttccatatccacaaagtagctaacaccattaacttcgacttgatgcaaattaattctggccatatatctctcgcaacttgcagcaccagctatcattttctcaatctcaagatgggctctccttgtaaatcttgtcttcaatctatcagcgatgatatacctctttgcagttctcaccatgcactgcctccggatgtcctctagcaattccagcaaaggctttctcctagcctgtctaatagtcctattaaaagactcactcagattattgaggttgtcattgcagcatgttcctatcataaagaaggctcttgaccatgtcatcggacttgtaagctgcaaagaggtatgtgcttgaagattgtacttcttaagctcttccatattattgttaaactcttcaatggtgtagctgcgggcaatcttccaaaagagacgttgcagttcaatgtcatggctgtctctcttccaattgtccatgatatgcttcgaacattgtcgatgctcagctgcagggagtattgtgtggatagctttgactaggccctacgaaaacaatcgcataaaagaatcaaaacaatcgcataaaacagtcaaaaacaatacaatcaatcttaaacacgaatcaaaacaatcaaagcacattcaaagcacattcaaagcacaaaacgtaaaacgcacaaaactgaaaacaatcaaagcacttgctcacaacagaaaacaatcaagacagaatcaaaagcataaagtttcttgataacactaaccgactgtttgtctgaaatgatagcaagatgttccatttcacaaagtcccaaactagcagctagctgtctcaagaaccaatcccaattgtcatcgttttctatttccacaactgcccaagccaaaggaacgatcctattatcaccgtctcttccaactgcagctagaagatgaccttttatatcccatttcaagaaagctctatctattcctatcacaggtctacaagttctaatccaagactccttctgagacttaaaacaaatgtagcaccgataaaacctctgcttgcttccaataaatgtccctgcaactgtttctatctcaaactctgaccctggattctccttaataacctcagcttgataatcccatattcttgagaagtgttcatcatgagtagcatatcttgctttcaacactttcgtcttcgccttagcacactgatccggagtcacttccaatttatattccctcttaatctcagcaaccatctcatttttggttagctttggattcactctcagcctctcctcaaacaaaagtgcaatggaggatcgcttcaacatttttgtatagcctgacctaacacaatgatgctcattcgcataagctcttattatcatcttatgcttcaacttctcataagagcaatacactctccagccacatctaacaccatcagcacctacataactacacctcgcagcaacaatcaaagcttcagacctatacagacaaatatcataccttgtcttcaaggagtacatcaacaaagcaagcttgaagtcctcaggagtgttgaaagttttgtccattgctagcaagacctcaggattctctgcatctcgacgagctctctctcttccaactccgttttcatcttcatcgtcagatgacaaaggatctgggatcttgtcatcctcccatatatcatctccggtgtcggaatcagaaccagcttcttcatctgctccataagcctcaggaaaatcatctgcaatgttgaggttagcatcttcttcaacaacgttatcttcgttgccttcaccagctatagcatcatcaacaacatcaaagtcatcatcaccatacacggcgcaatcatcttccaaatccggctcgggatcaatttcaagctcgggatcaattacaggctcatcatcttctacgactctgactctacttcctgtccgacgacgtccagaaactcttctgttatcaacagcagctgcctctactcctccatctcctccacctgactctgaaatgacttccgccggtggagcaactacaggtacagaactctctaactcgtcgtcttccattggtgacccaatcgtcgatatgatgccgttgagtctaactaatggcatccaccaacactcgtcgataatttagggtttttgatttggggaagaacaaaagcaatttggggaataatgaatttgatttgatttgggaatttcttctcgacaaagccctaattgggtttctattaacctataaacgtcacagtttcttgactaacagagagatactaacgggagaaaacgtcgtttattgggtctgttaatcgacttaacgacgcgtataatgtggcctcgtcaacgcaaagttcatggtttatttgttagtcaactgtaagttgatgttttaaatggcttccatctaagttgatgtattgattggccattttttgaaagttgggggatttaacgacatttttccctttatgaaatgatattgtattgttgtgtttggttaaccaagtgacatcactgcatgggaaaacaagagtttaagtcaacactaaaattttgaaaaaatctaaagtacacgactgttaaatgtttacaaaatacgtagaagagttatttttcatattaatttttttttaatgattaatctgtatttttcgaaatgaagtgtaaaattaaaaaatatagtgactttgaaattcttttttttttgtttcaaaaacctttatggctttatcttaacctcacgtcatatgaaaaaaacctcccttttcacttttctaggaaatctagctcacaaaaaaaatcaattttgtacaggaaactaaacaatgataaattcgttatttatgtacgtttataagatttcggttttaagcgcaccaaaaatatataaaaatcatcattgcattgaaggaactgcttactacacgactacactgctcgcttgtccaacaaagttgatctttcgggaaacttatgatccagtgacgattttttcgattggtcaccggagttttttgaatcgccgaattttcatcatattttgtccaaaaaaaaaatctggatcttagagagatttctaagattgatccaaattcattgatttataaaaagtgtgtaagatagtcctttggaattaccttatcgttcaatggaccataaaaatagctcgttttagtccaaatacattcgttttcgtaaatgtattagcctaaataattgtgtccaccaatttgtatgttggtgtgttttcacgcatggatatcggggttgtttagccaagggacaaaatttgataaataaataacttagagacaattagtttttctgtcttggtaaaaagacaaataaagtaaataaatagatatgaagttgaaaaagttcacaaaaaaccagcctcagcttttgccttgcgtgatagaacgagttcacggacatttaaagctcggcatgtgaaataacacacatacaacaaaaagaacgagttgacatgcatttaataacgaccagactaacttaatcgcacacagatattaacaaattgtctgtaagtataatattgaccttttaactggtgctttatatatgtgttttcacgtgtacacattctagaatcgtataatatctgtttgtatgttaaaacttctccaatctgaaaaaaaaacaataattaatagtctagccgatactaatatgcatgttaactcggtcttttttgtggtatgtgtattatttcacatgacaagctttaacctttaaaatgcactcaactcgttccttgcacaaaaagtcaattgaatatacgtattgctccatacacaaggtaaataagcagagataattatttttttttgtaatattttccaacgtcaaatctatttttttgtcaatataccttaaaaagaaaaaaactaattgtctctaagttaattatttattaaattttgtctcttaacttaacgacgcagatatgaaagcctccttggttcaatggttgatgaagggttcattaatacttatatactaagaggtttggagtttgagtcccagctactgcaatttattaatagatttgcagattaattgaggcaagtgtgcaggagatctacaacgatgtacaattatagccgttcgccaaaattatacacagagaagatatttttgctatccatcaagcgcatggagaagaagaaggaggtgtcgtatatcgtggatctaataagggaaagaaattatgcatagtagaatcgtctatgtaatagctctcgtaatctgtaataga

SEQ ID NO: 17077 - DNA, 560 bp, Arabidopsis thaliana landsberg
gagatcggtccttacttatacgaattgaagattatggctttacttttaattatctttctccacgcaaaagggaaacgggcgctgtggtgaaatagataaaatcagaatggtgaaaaaaggaggtacgaagaggaagattgcgattgagacgatacagaagagcgattaccttagggttacttgcaccaaacgccgtgaaggtctctttagcaaagcctctcagctttgtcttctctccgatgcacaaatcgctatcttagcgactcctcctacttatgaatccaacatctccttctactctttcggtcactcctctgttgatgccgttgtctctgcttttctctccggacaacgtcctgttccgaggataccaaagagatgagggaggacgttggtatctgcttgtctcgcaataatctagggttaggtttttggtggaacaacgagagcctcaacaaatcggagaatcctcaagagattagtgacgctatcgactctatgatgacgctctagagtaatctcaaggattgagtggggagatagctttgggtaacgatcac

SEQ ID NO: 17078 - DNA, 1394 bp, Arabidopsis thaliana landsberg
aaatcaggaaagaaaaaaagaattgtactgttgctttaccactctgtgatccgtgtagtttactactcactaattagtatctgtacaaaaaaatggattgtggcaaaactaatcaacagatgctctctcattataaggagctacaacattataaagggatgattgttactaactacagttttagtcgcttattctgcggtccagtctattagatcacaacgaggaacacatatttttgcatgttgttcttcagcttctgtatcattaacaacacctcgacaccctgggaagccacacgaacatgaaaggcgctccccgattgaaaagaacctgtaaacattacaagagtcagaggcagaaaatgatcatagaatatctcagatgattcaaagggcatcaaagtgaaacctatagtcataggtcagctcttcccatttagggatatgcctctttgcgaatatgataatgtgctcatctccattaacagtgatgactcgagaatagcaattgggctgcattaaagttagacaaaaatgctcagtgtttgcagatgctaactaaattgaattagattaacagatatattcataccacacatgaatgattaatcaggtgagcaatgcttcctgtccttgtagcatctatgactcgctcatcatcgattctaaacatgtaagtccctgcaccctatcacataagaaaattttgttttttctcagatattgaattcgtcgcatccaagatttatactacagagaaagtaaaagataaaaaaaaaaatacaaaaagtttctgttttagatgatgaataggtacagatgaatcgcctgactatttgttccattattgtttatagaatcttctccataacatcaaaatgtagaaagtaagttaagtcagaaatacgtaccaccattgaattgtagatgagttgttctcttttgtcagctattgacggtctaacaagttctccggtatattcaatcatctgcacaagaatcatacaatatttccatgagtgacactttctaaagatgaaatgtcccgttcaagttgagtatgctcaccatatctcccgccctgtgaggaagctttgcaaaaatgccaaaaccatgaattcctgatttccctgaaacaaaaaaagaaccaacttttataagatttttctgagagaagcttaggatgtgactagatcattctgaaaggaatcctacaaattatttttatcctacagaaatcctactatattttttatcttagcagaagttgaaaggacctgtaatatcttttaagatttactgaaagttaaagaataacgaatgcttaccaaatgctaatctctacctgtatgtttccctcatgtatctatatttctcagccagagaaagagtgtt

SEQ ID NO: 17079 - DNA, 1930 bp, Arabidopsis thaliana landsberg
  unsure (1)..(1930): unsure at all n locations
actgcaactcgataacatattgtagaagttcatcactttccttacacgttcaaaaattgtaggggggttaggtttgtatgactnnnnnnnnnnnnnnnnnnnnnnnnnnccttcaaacatggaaaaatcttcaagaaatgcttgatcatctctaactctctaattgttcctcgaaactcatatatctgtaacttcctcactggacaagatgtgagcgaatggtctttgtaatcccgagaaatgcagtcacaaacatccccgcatttatccgtcacatagtgtaagagtccctgaaaacgcacataaaggagacagtaaagtaattgcgagtatgaactgcaactttaacgaatgttttgtccacaaaatttcatggattatacagtagttctacctcaatgatgagagtttctaaatgtggacagttccttagaagaactggcatagcttgccatcccctattcatgtcactccaaatacttaacactttgaggttgttgaacaccggcatcccttcacagcacctagaaagcacctgaaacaagaagcacaacgcagctaaaatcatcttgcaatcaatacattacaagtagaccagaaagaagaaaatggaaaactaacctcgagtgtatcagaatgcaagtgaagttgctgaacattttgtatgcccttcatgagcttcaccacattgccaaatcggcgagcaacatcatcctctgacaaatagttagttggggctcgcattcgggcgatttgatcgtcatctactccaaggatgattcgagccttgaataaacttttcatattaaccaacggatagtcctcagcaactaaatcagagtaggctagggaaagcagatttggagtatcaaaagaaacgctctttggatttttagaggttctggaaccggtggagctaagaagtagctgattagtgagggttgcacacgacacggttacatgagaatcaatccactccatacctaccaaccgtaattcctcaatcacagggaaacaaggaagaagcttctgaagcttatcatcacaaaaaaccatcgcagagcttatatcaagactttgaagccttggtaagaaagtgccttcagctccaggccaccaatgaatacaaccaaattcagattttaacctgagattgacgagtgtctcactgacgaacaactctcgaggcagaagataaccatcttcgaagtcgatgataagttcaaggtccgcaacaccacgctgcagcactttacataaccaacgattcagacgagctggaggaacaccgctttcacacctgagggagaacctacgaatgggaccatttccctgcaaagacaatactctttccacaaaatccaagaagctatccagaatttcttctctttcccacttagtctcttccggatgaagatactcagagtcatccaagtcgagattagggacaagcgtgaacagattccgccacttcttagacagaacagatgtcaaagcagactcctttgtggtaaggaaggacagtatatgacaacgaacatcgtctggtaaactgctcactagatccatcttctcgctaagcaaatcaaaacagttccactggtactatagcggttgattcaaacctaacacttatgacttaacaacaacaacaacaacgcgagtaggaaattgattttgaggctgtgacaccgaaaacaccaacaacattgataatgcaaattttcgcacaactcttaacactgcaaattagggcaactcctcaatgagtcgaagaagagagggacggagtgcgtaatttaggggaatttggagatattttgtcaattaaaatattgacataatttaaagtcttaacgattgatcgcttagataaattaaaaacaccaaaacagagcagcgaaatatacaggttacaccctaaatatat

SEQ ID NO: 17080 - DNA, 658 bp, Arabidopsis thaliana landsberg
gtttctcatgtgcttatacggccacactacgcccttcttctaacgcagccatggattgctcaactctcttctcagctaagagaacttcaagtctatcgaaaaactccacaacccagttctcaatatcacgacagctggttggtatccatcatcgacaagacttcgtctcttaagtcgtcagcgtcatcagcgcataaggaactaatgtgaacaccatcagctaaaccgtgaacaagagctgcttgagcagagagaaggtttctcatagaaagaagttgtccttcaagagctgaaatctccttagatgttctgcatgcacatcatcaacaacaagtaacatgcatgaagaaactaactaacaacaaataacgataattaaaaagataacacacacacacacaccgtataaaggcagcgtagtttgcgtagacgctcttacgcatctcctctgcagaagctttcttcaattcaacgaggtaagaagacaaatgccttgtctcctgtaaacgaaaacacaccaacaacaatatcgagctgattcaacaagatgacacaatgtacaaacacatgataataatgcggagatgaggaggaggaagaaaacaatttcgttcatacgttgacatttggaggtgacataagcgtcgggatcgaaagt

SEQ ID NO: 17081 - DNA, 1467 bp, Arabidopsis thaliana landsberg
  unsure (1)..(1467): unsure at all n locations
tatcagggaaaatatcaatacaataaatgaaatattgggctggttctgttccatcatgtttcattggttggtaatgatttctgtcatgtttcttgagtttaagacgtggaatggatctctgtggtcaaaacgtcttcacaacaaaactatggtcagatggggcctggttctaagttgttaaacaccaagttaatatcacaatctaaccaagaacatatcacatgacaaatgctatatatagatattggaagtttctgtggtccagctaatttggtcccatgtattgattaatttctcatctgtgtcaaaatctgataaagattctgccgacagactatgacagggttagtcagatggattttcttatatatcaatcaacgtagctagagaaacttcttctagggccttaacatgtgatcttgttctcttggtcctatgtgagtacaacttgtaatggttttgcttaaaatgtgagaacataaccatgtgaggaaaattttgttcatgtatgccccacacttttaaacaccattgttttcaattgatttaagtcaagtttgaagtttcaactcactcacagatctatatatacagaagaaacgaagtcttttcacatcatcaacttacaagcaatctagaatctctctcatttgtatccatacatcttcacaagcttcaagaatcaaacttcaaggcaagaaaatggctttggtgagaagtctctttagcgcaaagaagattcttggcggttctttagtaaaaacaagcaaggcaccgccaaaagggtttcttgcagtgtacgtcggtgagagccagaataagaagcagagacattttgtaccagtctcatacttgaaccagcctttgtttcaagatcttctaagcaaatgtgaagaagagtttggttttgatcatccgatggggggcttaacgataccttgtcctgtagatacgttcatcaatgtgacttctcggctccaatgatcatgatccaacattttgtttttccgagttagatatagacttaattcattgtaaatagcttttttctctttcttcttgaaagagtacttgttctaaaagtttagagaatggatgccatttttgtgcaaccgacacgacatgtcaatacattttggaatgatctttgaaaactaaagaccacaccatttgaagaacctttcattatagttaaatcatggttagaaaagtatatgtttccctgtttatcatccggatccatgcctcaatggtagcacgtcgagttcaaaatcccgatcactttccggaaatctcttgttaaccgctatcttcagattaccccaatatctagctaaagatattacataacgaaatgcttacangtgcagtttcaaagacatgcaagataatccttttggtgccattgaggcttacaataatctttnntgctacatataagactttncatcaaatgcaattcttaaa

SEQ ID NO: 17082 - DNA, 345 bp, Arabidopsis thaliana landsberg
ggttggtcacttaaattgttttgccctattttaaacaattgttttacatagaaggaagaaagtgaggaagaggaaaaataataaagaaagcgaggaagaggaagaagaagagtaaaacgaagaagcttagctaacgttgaaagtaacgatgacaatggtcatgaaaaacttataatgtagataacaagaagaaagacaagagtaagaaaatgatgaatgtgaagagaaatatgaagatgtagatgttggcggccaactaaatatgcgaaaaattgattcatgagtttttctacaagatttgattcttaaatattgattttttatttttttttatatcttgaggca

SEQ ID NO: 17083 - DNA, 823 bp, Arabidopsis thaliana landsberg
ctgacctctcactaccccaaaattatgaaagaccacgttgaaatggcggaggatttgcagtggtttctgggagtatccttgggggcgattgtctttcgagatgatgacgacttccattaaggagagggaagttgagcagctcgctacaacttgcatcgccgttcaaggttttctgtacgcattgcaacttgtggtattggaagcagcacctgttatacaagaagggcctcaaattgacgagatcgttggctctgattctgatgtagaccccaccgttgtcgtaggtcctcgtcagggtgtagcactcaagctcggtaatgccaaggatgtgaatgcaaaatgcgaggtaaccctaacttgcagtacaacgttaatagatgtgttaacaccattcaacttttgttatcggcgataataaatctgttaatattttactatatatgcttagtgtttgataacaagtttaattctcggtgacctcgtatcgcgataatgttttgcataccgcgtatgttatttattatttgtgtactcgccataccgatatacttagctgataagcatgtggttaacgcgctgctaattttatttgccgttggttcatcctatttggctgcaggcttatgttgatcctatcatatatcctgattcccggatgaatccatcggaagacttatcttggtcagatgatgaagatgacgttagggtggagaatttggtgaagatggcggaagaagggaaggcattctcgaatgaaatgtttggtggggggtgtattccatctgaggttgttgatgcagtgaaaaaacccaagagaggtggc

SEQ ID NO: 17084 - DNA, 1330 bp, Arabidopsis thaliana landsberg
gattatcgacgggatgttgtgtccaattattttacacatattaaactttaacacttaaaaacaaaaatattttatattttaaaaaataatttttttaatctaaaaatattaaaaattaactttaaataaaaattgcaagaaaataaaaaatccgtgagaaaaaagcctttaattaaaattataaaatatattaatttcttaactaaacaagaaaatgggctgagaattaacctggcaatgggctagtcattgtttgatgggatgaaattgtttctattgggcctctgagagcacatgccatctatacccgttaacggaaaatacgctccgcctcctcaatctccatcgccaatctccgatgatcgctccaccatcatgactcccgaagcctaaaatcctctgatcgctccacctcctcaatctatcgacacctccatcgccggatagaacctccaacatcatgactcacgaagcctaaaatcccggcaacatgtccttcgaatcgtctctctctatgtctctgtttctacggtggatgatagatcttatcatcgcaggcaaacaaattaagacgtgatgcttgtgtgtgtgatctctctcgtcttcttcgttgctttttaagtgaacagagagagccgttgtatatatgagtcgttcttaggccagaccaacgaatcacaccaaagattagggtgaatccaacaagcagatgcaacaacacatgaataatgaaatctcaaaaaggaagaagaagagaacagagaggcaaacgaagcagacagaaatcgaagaagagaattgaaaaaaatgcagagcaattgtgtttttaacttgagaggagacgcgagacgcaggtatataaatttatttgtttgacattcaagtttccttttttccttttcacttagggtttgttatagtccagagcaaacacaaaccttaggttcggtgataatctagccgttatacacggttcgggtcaaatactttccatttattagctgatacgctcctactaatttttggtttagatactgattgtattttgattgtattacacgttgacttttattgttttaaagaacaaggctaagaagaacagataataagaaagtgggttctatccttaaaaaccaacaagaaccctatcttaaaaacctaaggagtgtggtttcatttatttctggattgaatcagttgaataatgaaaacaataatagacataagcagagtggatcctgcaaaacatggtaaacgaaacttttttcttctcttctttcttggattatcttcgatttcttcttcttttttcccctcatgatctcttgtt

SEQ ID NO: 17085 - DNA, 717 bp, Arabidopsis thaliana landsberg
accaaatctatttttataaaacaatattgacactctatcaaaactaaatgcaatcataaccataacaccaaatctattatataaaaaaaaaatccaaaaacatatttccctataaatagagtgtcaatatcatcttcatccacaataatacaaaaatttcacaaatatataatacataaaaatcgttttcaccccacaaaaaatacataaaaatagtactactaatgctctaagagaattattttacaatattatttatcatataaaagataatctataatatcaaaagaagacaaaacatattaatagaatatgaatattatgttccatatttgccaatatattattgatcatataatggatatcacatatagctatataaaacctaaagtcattatagattttggccactacaatagattatatacttaatctaatgttaaatttatttaataattatttattattataaattaacaaacattggtttagaattattggaaaattgtaaatcacaaaaaataatacatttgtaatcaacttgtaatatgttttcttaatatgtgtgtatttgctagaaaataaatcaataaaaagcagagggaatattttacttctttaattttgggtgaatgatttgtttccaaactcattttctaattatttattatattaaattgaatgcttatttgtttctggttttgtaaattttgcttt

SEQ ID NO: 17086 - DNA, 1963 bp, Arabidopsis thaliana landsberg
  unsure (1)..(1963): unsure at all n locations
agacacgttcaaggagatgaacatcgacgatagtaagactgtttctcggaattccaattgaatggctttccaatttggttctctcatctgcagaaccaggaatcttgtccagtagaccagaaatgttcctataagcaagaagttgcaaggctaaaggaaagcgataaatagctatattatgctgttgcatctgatttgtgaattgttggatgggatcttctagattgaatccaggacgtgacctttttctcttcgaatcagccattgacatttatttctaacaggcctcatgatttgaatagtcttcaaaaatgattctctcccccatgggaaagcaaggaatgagtcaatatcctctaacatcttaacatacttgaaagttggacgatgagtctggttattagaaataaggactccgtcaacaatcaaaagaagtgctaggggaagttttcaagggtcctcaatcccttttaaagcttggaacttagaagaaacatcggctagtgttgtattcttatctttccctatcaaaacatcccagtaatcattcgtcccattgacatgtttagggaagaagtcaggttcatactcctccagaaattcaccacacggcaaaccagttacagaaccaaactcaactaaagagaatctaagtggctgtccacaaaaattagtccacagttcgtaattctgttttgtaaccaattgtctacataacaaagcatgaactagtttgcaaaagattggacattcgctaactcttaaactaaacagagacaaaaaacaagagcctacgatggtttccatttccttggtacctttcaaaacgtcacatattacagtgagaatgtcgaatctggagaagatattgagacaagcatcaaggtaacaatccgttgcgaaaagctttgtaaggagacgagtattaaagtcatttatatcatattccactgcgcctgcaatcaaagggacaatttgtaaagaggaaaattaccaatctggaactgagattttagaacaacaatggataaaatagaaaattaccttttctggtaaagaaattntagaacaacaatggataaaacgagaagataactgtaattggtagtagaacaaagaaaaacatagacgattaccttttattttttttgaacagagtgaaaagtaataacgagggatttcaatgtcgggagattaattcgggagtgcaaactaggaagatgaatctattttactgggtggggaattacggattgcgaacccaagatacaaaggttaatttcagcacagtcgccggaataatttcacactaaggtcaaagtgatgaacaattcgtcgggtcgttttactttacgaagactggtaaaattattatttaattcctcaaccacaggaaagtaactatggtaaattgagatttgagggatttatggtaaaacaactttaaaaagtgcctactcccttccaagtgctccattgcctaattgagactcaaaaaagtgccccattgcctaatattctatattatattcttgatgagaacctatttggaatcatccaaactgaaatgaaaaatactaaaggtccaaaactaccacaaagaatatatgtatgaattgaaacatgggattggtgacctatttactcttcatttctgaggcccaagcattaatatatgagaaatggtctctgatattttaatttttggactttatctaaaactttttttttaaatggatgaagtacgaaaattaaaactgaatataatcaactagtgtatgcttaattatacactactgatatgattatgattaatgaacatatatcttacaacgtaaattgatttacatgtaaagaaagaaaatatataaaaaacttattaggcggatgaatgctaaacattttatagagataaatttccttaatttgaaaatttgtaatggtacaagtatagtaaaaaaat

SEQ ID NO: 17087 - DNA, 687 bp, Arabidopsis thaliana landsberg
gtattcttcattatccccatttgaacaactctttgtgcgaaatgtttctttggatcatcagggggagtatcattctgattagatagccatctaccacatattctaacctttaactcaaccatttgataatcagattattatcagtcttcttggtaccacagttgtctgataatatggactgaagatgatgccatgttgatgcaggtgagagtggtgataaagggaagagtacagggagtgtgctacagaaactggactgttgagaacgctgagcagctcgggttaaagggatgggttaggaaccataagaacggttcagtggaagcactcttttatggaccacctaaagctgttgatgagatgcatcagaggtgtcgccgtggtcctcctgcagccatggtaaccggtttggaggcttccccttccactgaagaacctggatcaagttttgaatacagatcaaccgtctgattgattcactattgagagagagggagagagagagaaagagatgattttctaaaagttgcaatgattatagatgtctggaaaagctgtaacaaaggcttttagattaaacaaacattccatgtgtatatgtttgttatctacgggtagttagttgcagcagattctgagacagtgtatttacagaacaatgagcaatgtgatgaaaaagagtgtgtt

SEQ ID NO: 17088 - DNA, 379 bp, Arabidopsis thaliana landsberg
acatcacggttgataaaactaaacacactgatggactctctgtctgatgagacgcctatgaatctgccgctccaagattactaccatgctgatttgagggttcagcaatgcatatggatttccgcttacaaatatgttgcatatcctaatcttggaaaaaaaatcctgaaccgcctcgtacctaatcccgggaacgagatacctaactataaactatcgtattaaataggatgagtgccaaatatgaatgtccatatctggttagtgaaaccggggtcaagcgtgtatctttatgtccgaggtgtgagagtcaataatacattgcagtacataactagatgagaactataatatgcaggtaatgactcgaaaacttgat

SEQ ID NO: 17089 - DNA, 994 bp, Arabidopsis thaliana landsberg
tctaaacaaaatttactttaactatggattaagatttttactttaaaataatcagtgtaatcacattaatcaaagaccttttcatgtgctatcaacattaatcattttcttctaaaaatcccaaattcacattaaaacccaaaaccaaagaaacaaaggcaaatatacatacatggcacacaactgcaatatcaatatgactgcatctgcatggtatataaattatacaaacgggatttgaataagtaagaaactgctacagagatacctctgatctcacctgaatcaatcatagccagtcatagagtgtttctctgcggcaggaggtgggaagcaatagttgaattgttcatctccaagtttgaattcttccacgtaggggctctgtggttcctaagattatccaacaagaaaacagtttacctttcgatttgaacttttttgaagagactcagactgattcagagtgttatttctaaacacacaagtatgaatgttatgtctatctaacacaagtcagataagaagcatgtgtccattgttgaagatggagagagatgagtttagtgaaatggaaagatgaaagataagtaaaaggttcatgtgaaatgacacctgaggaccagaggtggagtgagatgcttcactggattttggtgatgtagaagtatcctcatcgtggttctttccatttccgtttaacttttgaggttcgctattttctaaaggatcactctcactagctgttttggctctctgtatgagttaaatcctttggttagtccttagtcttaatccccaagtcacatttgtacagattcccgtcagtctgtaagaaggaaatgaaaccagattttacctgaaaggtcctccccagagcttttatacctcttgctcttgtacgaagctcctctcttttggcttctaaatcaaaaaggacctagacaaagagaatcataaataagtttacgatccagagagaaagaagaaagag

SEQ ID NO: 17090 - DNA, 537 bp, Arabidopsis thaliana landsberg
gctctcgtttttgaatggcttttttacccacttgttgtagttatctgttcatcactattctactactaaaagatatctctatgagagatctattctcaaggatttttaacgcacgtttgaaatccaagtcaccgtcagcgaacaagcgttccacaagatgaacatactgattgttgaagaagattgcaatatggagaaatagcgttttctcattgtcatctaaactctcataaccaactcttagtacttcctcgatatcacgatcaatattattttctaggctgcagattacttcttcccatccttcttcattcttcccacgtaaagatgaacccaccatacggagacccaatggaagtttaccacaaagctgtgttactcttaatgcaagccattgaaaacccttttgtggatagcttttcctaaaagcatatatacataagatctcgagagcttgttcataggatggaaaacccacctggtatatatcatcgataccatgttgctgcagaagctctttgttttctgtggtaacta

SEQ ID NO: 17091 - DNA, 1983 bp, Arabidopsis thaliana landsberg
  unsure (1)..(1983): unsure at all n locations
tcgtatcattcgccctacatcccagaatatgtgggtaatcatcctgcagtttctgttgcttcggcgagtcagcctcaagcttcctggcaacagcctccgcctccacctccgttgcagcaaggccagcagccagaagggagccagtatactccacaccagatggacttcagagagcagtctgaagctcgtacagtcaatagcactgtgccagagtcaaagcacatctattgacgaatatcctaccttaatagcaatctttttcattcagttttattttctgtaataaaggacattgtttaggtttcgtgaaattagtttcgttgattcctacaacaaaatacgttgttttctccacaggcttaaattgatcgaagttcaaagacttgtgataataagaaggaccttcgaactatcaaaaattctttgaagcaacaaaaagtcgttctaacgaacgcagagtaagtttgacgaagtcacaaaaagccgctccgaagggagcgcagtgtaagttttttttttgctccaaagtcgttccaaaaggaatgcagagcatacagcgaaaagtcaacgctgataccgcctaagtaaaaggtgaagaagctccaaagtcgttcctaaggggatgcagagcttaaatgtcacctaagtaaaaggtgaagagactccaaagtcgttcctaagggaatgcagagcttacagcgaaaagtcaacactgatttcgccgaaagtaaaaggcgaagaagctccaaagtcgttcctaagggaatgcagagctgatgtgtgattgtctctaagaaaataatggctgagagtatggcttcggatatgtgtttgggcattcattctcacattacattacatcataacatttgcattcataaacattcatccaggcatatgtaggataattatcatcatggcataagtggttgcttcggcataagagaagagcttcttcgcgtacaacaaggagagcttcggaagaaagggaaatgttgtattgtatgcttcgttgtgtacgaaaagaagggaaggtgttttttcgccttcggctcaaaaaactggtttcgtccacatcaaagcacctcaatcgaagggtaagaatatattacaaggtatgtacaaagttccttgaagaacagtttaattctgtttacaagagttgttacaaaattatcctgagtttttctaaagcacacttctgctagtcttcattaagcttcagcttcgacgacaacttcggcgacatatcctaggcatcatcttcatcttcgtcatcctacatgagtcaaggaatcataagaatcaagcccaaaggaaaaggtaagcacgaaatgtcatttcttactggttcaagatgacttcgagcttcgtctccagccttctcccgcccgccttttgtccatatcatttttataaatctatttgagatacttcgggcgaggtcaggtatatcgtccaggattgatggagacagggtgaagttgggcctgttgacgatctttccatgctcgcagccagccttcaggaatgctgcagcagtaccccgagaagctacccaggcacagaagtcaccgtgcccagctataacttcgtcaagttcttcaatttcagcttcgatatgatcgaaggcttttggtaaatcttcatccgaaggggtannnnnnnnnnnnnnnnnnnnnnntgagtaaaagatcttctttagttgttggatacaattgttgctaaaattcaaacatttatcctgaaggcttgttaatgatttcttcaaatttgagttgccttggacttcggcttcaagtttagaattaagctctagcttttcttgttcaaactgttttgattgaccgataagcttcgaattcaattctgatattttagcttcggtctctgccagcaagccttcggttgattgaagttcgaagtctttcttttcaatgatgactgattgttcttttattttggcaccaaatttccaattat

SEQ ID NO: 17092 - DNA, 729 bp, Arabidopsis thaliana landsberg
ccatctcctagacaattgaacaacgagccaggccagtaccctataacatcgttgtctttaatttttagccaccagtttcctgtttttgggtcctgatgatcgcaattccaataaattaatgaagagttagaaaacaagattgcctctaatatattaactaaggttattttcactggcctgacttttcctttagtacataacaaaaggatttgtgatctgttttgctaatttaaattggagttagtggaggagctttatttacagttttaattgagcaaaatacagatagaaaatttgaaaattataatagattcataaagtagatataaactatacgataagatcgttggtattgttaaggtggaaaaaagaataacggtattattaccttccatataagtaggttgagaactagttgagctccgtcgtattgtgacgcggtaacgtaggatccacctacagtgtattggttggtcgtctgaacaaaacccccgcagacgagattatagcatcctgtcttttggtatccatcgctctaatataaataagcatgaactttcattagtaacggaggagaatcttaatttacaagataaaacatatttttgaagtgaaaatatgtttgcatggtttcggattctcaacacgtcaaatagaaacaaatatttctattttgaagtatatatatatatatatgggggtggttaaatagggtggaaaaatgggaac

SEQ ID NO: 17093 - DNA, 1634 bp, Arabidopsis thaliana landsberg
gaaaaactagaataatttatgaaaattttgagttggaattgtcttttttttttttgtcaataaactttgttttcatttaatcactcaaacttagtacaaggcttaggagaatatcattctcagagtttagtacaacaaagataaaaacaataaagatagaagtacaatagtccgatgataaaaccatgctagctcggagacaagagttgtagaacacaatgccacatgcgagaagaagctaaatcggagacacaaccacgatcgatccgggaagtggaagattggtcattgtcacaagacataatgacgttgagaaggagtaagggtctgtagtcaaactcaaaaaaatcgctgaaagaataatcaggattcgcaagagatatgtgtgaaactgcaacaaaacaggtggattctctctcgcataatgtccttgactatggagattaagaatgtcacacaaagttagtctttggtttaacacaagtagaaaattaccagacctaagcttcaaggttttcatgaacataaggagtttatcactgaaattgatagatttcacaagagagaactcagtgaacaaaggagacggagattggaaggtgagaaagctgcggtaatcaccgcaccttggtgacgggatcataatgccgcactttctcaacctttgtaaatggcttcgatcaaaggatctagaaacaagagtagaatccctaggtgactctaataaccaggttctcaaagaaggtttgtaccagcagagcaacgatgattgattatggattaattgacatctaacaattattttcatcaatcgacacaaacgttgacagagaaagaataggggaaagtttagccaaaacctaggcctaatagataaaggaggtgggtcgtcacttatgacaatgggccaagagagaaatgggctgaaatgggggaggcccaataacaggaaccctagtgtctttgtggctgcaatgaagagttggtgactgtggcggcaggacttcggtgagttgaagaccagagtggaatgaaacttcaccggaggttgtggcacaaaagtggtccagagactcaagatcgacgagtgacggtaccatttgggttgaggaactgcagatttggaagtgagagatctcgttagcactagggcggggtaataatcgtcgacagttgccactggagtagatcgacgaagtgaagcaacgttgaagggtatggttaagtgatctccgagaattgaagatggatttaatggaaggttgttgtggtggtcgggaagatgaagagaaaagcttaaaaaggttacaaaagtgatgcaaagataatagagattgaagcaatttgggatcttctgacgccggtgagcaagagctccaccgacgtcggaaagtttgattgggaagttgtcctcgaaaatggtacccgagagagaaaacgcatcaagaattgttttctttaattcttatccttgctatccgttttcctatgattatgctatttttagataattgaactccacatttggtttaacccaatagttagaaggataaacacttggtttgtaatcggtgattattacataaatggtatatttgaagattgaaaaaaagaaagacaactaaagtaaattt

SEQ ID NO: 17094 - DNA, 805 bp, Arabidopsis thaliana landsberg
atatctatatatatatatatattcaagctaacaaccaaatatttattttatatttatacgagaaggatcgcaaggattcgttttttggttgtttgggtaaatatttggaaaaattacatcatttgccatatttttcaaaatcgttatgcaatctaccatattttcccgggtcttacaactcatgccacatttggttgggaattgacaattttgtccccacagtttactgaacagttttcgctctcaacaactgcgtcttttgacaatcccttttatctctctttcactgtaaaccgtgcggtaaaacaacaacagataactctctctctttcgtctatctctctcatactttccctttctcttcgccgataatttcatcggaatatatctccggtaaggctatttcgagtttctgcatgttgctatcttcaatcctgtcttcatgttttgttcaatgaagccttttctggaaaaactttagcaaatcccttgttactggtctgttatgaaaaatcgagtttgtctctcattatgattttagatagtttgtcctctcctgtgcgattcatttacccagaaagttcgaaaacctttagcaattaagccggttgattgagtttgttccgattaatcgaaatgtcccccattacagcttttagggtttttcgtcctcctgtgtgtttaattattttatcacatcgaataactgatttgataattgtttgattttaccccaacgcagatgaggtcttccaccagcaaagcgaaacagaggtcagcgcttggcggtgccaggcggtcggtg

SEQ ID NO: 17095 - DNA, 972 bp, Arabidopsis thaliana landsberg
ataatgacacaactaatcaccacaacacaataatgatgtcttctagggtttgtttgctcagctttcctttacggctcgacaaagacggcggtacatgtaagtatatatatacatctcttttataaattaaatgggctgcctcatatttacaaaccaaatagcatattaaacgtgggagttgggtgttacaacaaacctacataaaagagtgtggggccaacttgccacaattaattaaaagaataaatttggataaatgtcttatgcgtttatattggggaaaaaactcgaaaaatctcttatctatttttttttacccgtttaatacttttattattattattagaataaaaatatctcatatatttatagttgataaaaatacctcatctcttaaaaatactccctttgttcctttttgattgattttctaggaaaataaattgtttcaaaaagattgatatcttaggttttcaatgcaatacttattagttataattgataaattgtaaactttaataaatattattgaatataattggtttagagttattgaaaattttaaattaccaaagaataatacatttaaaagcaacatttaatatgttttcttaatatttgtgtttttcctagaaaatcaatcaataaggaacagagggagtagtagattgcaatccacaacataacatctgttaacggacgttacaaaattatttaacggtatgtgttcaattttaaaatctaactccgtcaaataatttcctaacgtcccttgacatatgttaactcctgggttggaacctaccaacaaataaaagatgaggtatttttttattaattgtaaatgaggtatttttattccaaaataataatataggtactaaacagaaacaaatagatgaagggggttataaggttttttcctgttttcatttgaaaaatacaatatcttttttttctcgtaaaaattaa

SEQ ID NO: 17096 - DNA, 1523 bp, Arabidopsis thaliana landsberg
tacttgcaatcgtcttttggccgaaacaagtccaataatccataaaaaacctccaaatctcgtgcaagcacctataacctgtaacatttttcatttgtaaacagttttaataaatgggtgtttgacaaaaaagaatcacctcaaaatttgtacacatatgtttgatattaagacaaaagacagaaaaacaaataaaataattttgttaattcaaatattctttaaattccatttgttttttttataaatgtattggattatagttagacgttaatatttagtggactgaccattagctagtggactgacccgaccgttctttctttttttttttttttcaaacatcaacttttcattaaccaattcaaaggtacaaatcattcgtccacaacatattttaaccaaatacaatgaatcagtctagtatcatcctgaaacactaagatggattcaacgctacccaaccaaaattcactgtatttttccacccacaacgagatgaattacactacgactctaaatgaaatcatctctcaaaccacctaaattcacccattaacacgaaaacaattactaacacaaagaaaatcaaatcctatcctgagatccagtccaattccaagctattagtccctcatgatccgagtgtagaacttgtcctaatagcatctacgccaaaagcacaacatcagattggttttgactcctcagctttcactatttcggtcctaagcctaaaacggacatactaatccgattgagacaaaagtttcttgaaacgagggcattaatggagagctttccttcttcttcttcaatccaaatgcttttcttttctccccaccttctaattaattctccatcaagagtcgttggcggcaacatagttagaaggccttaaatcatgtaaatctgtccgggatcgataggatcttcacagccaagctcgaaaaccacgatccgcccacctctgtaccttcttaacactgagccaccgccatcaaggaggctcataggaggagaggtacctccgcgaagagactaacgaaaaaatccatcagatctgctgccgtcgtccgagagtcatagttccccattgtagatccaccaacgaacctccatctgagagaactacctccgctcgtcgtcgacttaaaactctttgattaaaccacaaagaaggaggagccgccgccggctaaaaaaactaaaaaaagaagagaggaggagaagccctctcacggcgccggccgaagccgaccaccagagagacaaaacggcgattgaagattggttttttggtttgcggggcgaactagagagagaggaactaggactgacccgaccgtttaaaccttaacatttgctttctcaattttttttattttcccgattctattatctgtttttatagattttaaaatcatttgcatgttcataaatcagatactaagcccattttgttataataatttttgcaagcatttacaaaacctaaattttcttgcagaggaaacgaaact

SEQ ID NO: 17097 - DNA, 843 bp, Arabidopsis thaliana landsberg
aacgagcgatctttgtaatgcgacctttgttcaagcaactgagagaatactacagaaaccttcaacttaagttgaatccacccgtaggagcattaccactttggtttccgaattggaaaccggaagactgaacattctcaggagcatccacaccgctaatatcttcctcctcgtcatctgcagcccaatacgactccaggattttgactgctttctcataaatctcattattatcgtgactctgaagattctcaatcttgtccaaaccatctgcgtcttcaatcatctgcgcgtacagattatcgtttcctgtgttgcctagattcttctcggcttcacctactttgagaatgttttctagaccttccaaagtcactgtgacaacccttggatcgggacacggtaggagatcacacaggggtctgatgcagccttggctcacgagaaacctgcaaggatataagaggttctataacaagaatcactgaaaaaaaaactaaaaagagacagaaacaatgagatttgttgtacttgatttggtcatgattgccaccagaagttgcattagagattgcccaaacagcttctttcttaatttcgaattcaccgatctcaagcaggttaatcagaggccgaataatgcctgcctgaaacacttcctgcacaacaaatttatcgatgtttaatccaaatgtatatacgacttctggttttaaattataagaaaagatattggtttttgaacattgttatttgttaataatgtatataactcacttgaatttgacttgtgatcccaactgtaatgttagagatagtccagcaagcttccttcttgatact

SEQ ID NO: 17098 - DNA, 2099 bp, Arabidopsis thaliana landsberg
cgtaatgtaagtcggcttttcgataaatcatatgaaatacatttttcttactaatggtttgtattagtgtggacgtgtcataatttggtttgcatttgaaatatcacataaaaatgccaaattttggttttggtattttttgttttgataaaggtatcatattttgttgtcttacaaaatgatttctaaatttgaattttaatttgttatagaccggtttgaatcttcgaacaactggtaatacaaagagtgatgagtcaatgatcgatgatggagaatcttccgaaatggaagataagcgtgcgaaaaatgaggtaagtttagtttgattttacattagtaatatttaatagatgaataatttgaaccggtttgattaatatttcgatttttttttgtttatcacagttggtgaaattacaagatgagttgaagaaaatgacaatggataatcaaaagcttagagaattgcttacacaagttagcaacagttacacttcacttcagatgcatcttgtttcactaatgcagcaacagcaacaacagaacaataaggtaaataattattagattgatcaaccacaagtaaatggaatttaccctacatgaataggcaattaattttggtgaacctatatgattaggtaatagaagctgctgagaagcctgaggagacgatagtaccaaggcagtttattgatttaggccctacgagagcagtaggtgaggccgaggatgtgtcaaattcttcatccgaagatagaactcgttcggggggttcttctgcagccgagaggcgtagtaacgggaagagacttgggcgtgaagaaagccccgaaactgagtccaacaaaattcagaaggtgaattctactaccccgacgacatttgatcaaaccgctgaagctacgatgaggaaagcccgtgtctccgttcgtgcccgatcggaagctccgatggtaagttgatttattagatactaatacttataagactatataaaaaaataaactatgtgctttagagattaattatctttgtactttatgtttctatagataagcgatggatgtcaatggagaaaatatggccagaagatggccaaagggaatccttgtccgcgggcatattaccgctgcacgatggccacgggctgtcccgttcgcaaacaagtaagatttaaaagatttaaccattggactaaaagattcttgttgtgaaaacattagagatttcaatgtatatatgtttgcgtgattggctaatacgttcggtccgaaatgatatttataggttcaacgttgcgcggaagacagatcaattctgattacaacctacgagggaaaccataaccatccgttgccgccagccgcggtagccatggcttctaccaccacggcggcggctaacatgttgctatccgggtcaatgtcgagtcaagacggtttaatgaaccctacaaacctcctagctcgagctatcttgccttgctcctcaagcatggctacaatctcagcctctgcaccattcccaaccatcacattggacctcaccaattcacccaacgggaacaatccaacgaatggctcgctgatgcaattctctcaacggcctgccttggtggagttgaaccaatcggttttgcctcatatgatgggtcaggctttgtactacaaccaacagtctaagttttcgggtttacatatgccgtctcagccgctaaacgctggtgagagtgttagcgccgctactgccgcaatcgcctccaatcccaactttgccgcggctctagctgcagccataacttctattatcaacggttcgaacaatcagcacaatgggaacaacaataacagtaatgttacaacgagcaacgttgacaataggcaataacatttttttataagctttagttagggactttttatcggtcgactttgcttttttttgggtttcttgcattattctttagttacggctctttttgcttattcttttctttcccgaacaacaagtattgagagcaattttttcccctctttccttgagtatgatcaacaattgtgtcagaatataaattgcttaactttttcaaaagc

SEQ ID NO: 17099 - DNA, 1886 bp, Arabidopsis thaliana landsberg
ctaaatttacagccaatctccatagagtgtaaatttttccataaatggtaaaaaaacatattttaaacaaacaatctcaaaaatggatatacacatgtctttggcaatcttataaggtttttgcatatgatatctaacatataatattgtgttattttttgtaaataaaaacaatttatcttataaattattttagtatctcaattcgaagcaaattcgcgtctcttcaagccaacatgtaaaaacttacaattgcatcttactttgacgatatttatatgtttgtttggttccgtgactttgtaattttgacattgtgcaaaatatatacatatatatactggcaattgtaagataatatcacttataaattttttgtcatattaattctcgtagtaaaaaattatctctttagtcatcatagagaactaaatggaatcaatagttcaaccatatatataattttttgtcgaactttctaacaccaatttttattttagtctaactagtatttacttcgtaaattagtaaacatttaagaaatataatgtaattatccaaaactatttgttcaattgattcttgtggaaaacaatgtaaaagtacaatacttcgaaattgtttactaatatcttacaaacattgaggacttaatcaaaaatattataaaatatataattctcatctttctcaacttcccatatctaagctgcatggaatcggaagcgggtacgcgtaagcgaaagctattacgattgagagagatgagagagtttgttagagattgatggagatattttctcattaactctataaaatgtatttgtacaagtatatatactatgactatacaacccattaacataaccaaaatacatactaaaccacataaataaacaacactctctgatatgccccctgaagatgaggattcaaatatgttgagcatactcatcttggacttaagatgttcaaattggtgagggaacaaaggtttagtcatgatattagctacttgatcttccgtgcgaacctgtagcaactttaactcaccatcatctaccttttctcgcacgatgtggcaatcaatttcaatgtgctttgtcctctcgtggaagacatgattgattgcaatatagatcgcggttgtactgtttgaaaacaagataggaactgaagtagcagccatcaaagaaacgagcaatgtatgtaaccatatcaactcacaagtagcaagtgcaagcactctatattcagcctcagctgatgatcgagaaacaacatgttgcttcttagatctccatgatatgagtgaatcaccaacaaacatagtgaaaccagtagtagagcgacgactatcagcagaagaagcctaatctgaatctgcaaatcctttcagagtaagatcagatgaagtagaatagaataagccttgagcaacaatgcctttaatatattgaagaactctgtgagcagcttgaagatgagtagtcctaggtgtagaagagaattgacatgacatgttcaccgcaaaagtgatatccggcctagttatagtcaaatccatcaactttccaacaatacgacgatattgttctctatcctcaagtaactcaccatcagctttcatcagtttcacatttggaatcattggaactgaaacaagtttgcagttaatcataccagtagatgccaacaactccaaagcatattttctctgacataatgagatgcctacttccgttctagcaatttccaaacccaaaaaatacttcaaatctccaaggtctcttaacttgaaaagattatgtaattcctgattcaattgtactgctgcagcctcattagtactagcaatgacaatatcatcaacatacaccaacaca

SEQ ID NO: 17100 - DNA, 643 bp, Arabidopsis thaliana landsberg
gcctatcttgagctgtggaaccgtgatattgacatagagaggactagatattcaagacttcccctttttcggtacctgataaagagaaatgtagagaaaataggtgttatcgtgtgcggaaacataaggagcgttaactctttgtggcctaaccaaattgcaatagtgcttccactgcttaagattgtacactttgaagtccatgctaagcactcaaattataacctaaggttctgttgtgaaagtcctataaggtttttcagaaggtttcaagtttcagtttgttcttacagaagaattgtgttataagatgggcttaaatctatatatctttggtagaaactaaccttcttgagaggatgactgcttgaagctggggctggtttcataatctcaaaggaacatacaagagactcgtcaacgcttaataacgcaccagcgttgtcaaactccccaccatagtttggagctgagaatatcgtgactaatctccgttttgcgaaaaactcatacccgtcttctactacctgcatcacaaaaccattacacatgtccgatatggtaagaatacaaaaagtctctagctttatggacaaacgctaatcaaaccatcaagaacaatttcacaggtttcgaggaggcg

SEQ ID NO: 17101 - DNA, 761 bp, Arabidopsis thaliana landsberg
aattcaatacaatgaaaatagtactttatacattgttatgattttttttttattgagtgtatttagaaaattcatttgggagtgagattaatagagaatttaatacaacaaaagacttttgattttttcttaattagttgtattaatattttttatttaattaatgtaaaatgacacatgtcattttcttgtgtgatgatgtgtcacccaaatggagagagttggctaactttcatatatatgatttcgttaacttggagaggacacctcaaactgtcgcatttaattttaattaactaggcccacgtaaaaatattctcggcccaaatagttacattgttgaaaagaaaccgatcaaatccaacggctgtaattcattcatcttcaagatcagagagattgattatttcaaagaaactgaagaagaaatctgcaaattcatcttctcttcttcctccgattccatctttctccgtttccggcgataatcttcatcgcttcttcaggttcatgtttttccagattctttgatgccttttatgtatctctgactctccacggtttcttaatatgaattcttcttcgcttcatttctgattcgcgatcgtcaaattctctggtttgtttgaaattcgaatccgtgtttctgatatttcgattcctggatcatttggtatgaataatcagaaaaaatgtttggtgttgcatctgatgcgttgattctgctactatgctatgagaatttgaattgcaatgaatcg

SEQ ID NO: 17102 - DNA, 1257 bp, Arabidopsis thaliana landsberg
cttgcggttttggagataaactcactccggttgtcatataacatggaatctgcacattgtgctggtgcaatattctactctatgatgaaactagcagttagtactccacatagctctattaatgacttgtatagaaacgcatcgagtatcattactcgatggaagggacttcttgggttctatgtaaagaaaagtgatgaacagatagaagtaatatcgagattggaagagatgtgtgaagaatctgctcatgagttgggaactttgtttgctcatattttacgttatatgtatgaggaagagaatgaccttttgcaagaagttgcaatcttgagatggtcggatgagaaagccggagctgatgaatctgacaaagtttatctgaaacaatgcgagccattcataacgtggctcaaggaaacatctgacgatgaagatggctaatgaattggtggtaaacatgtgttcgttggctcccaaaaggaacattctgattgattatttgcatcgaagagattactttgtctttttttccatgtgttattctaatgatgtgctattttatatctcatccattacatgtatgaggtatataaatacaacttttatgtttttgtaaatgtattataggaagcttattacagtatttcccaaaaaaaaacaattatagttatctaacgaattagagaaatttaactaagtgaaaaataataaaggaatgatctaaatattaatttttgggctgattttgaaagaaaagaataaggaaatgaaaacgaaaaagaaggaacatcgtcttctccacagagtcctctttcaccgcctttgattctttacttataaacccttaccttcctcttccttttgtatatacctatttctctagaaacctttttcctcatcgaactcttcttctttcgcctcgccagaaatggcagatgacttggcgaatctctgccgatttctcttcgacgacaccgcctttccctctttgtcgtcttcggcatcttcagatctcttttctcgccgtttacgctccgatgattcgatcaagcgcggtctccgatctttctatctcctgcttcgctggggtgtcgctccgatcggcggagacgatgctgattcctctggcaagctacgctttgagacatggtccgattcgcagcttcaagctcttgtttcgatatctcaggcgatccttctactatctcgatctctattaggtactgacttgacactgaatcaaggtttaggtcg

SEQ ID NO: 17103 - DNA, 961 bp, Arabidopsis thaliana landsberg
tctaagctacattatcttatctgttcgtgatcgtgcaattacaatcacaagcatttgaatttaaaaataaaaaaaaagcaaagaagagatgaaccaacggaatcggtcaaccaggcagtgctgttgcaatggcgcattgcagagatgtttcttggaggtttcccagaggaactgagattcgtcattttgtcatctgcgacttccaatgtgttgatcatcggagaaacttcagtcaccggtgccatttccagattccgatcaaaagctttcttaaatttgtcagagtcatctcttttaaattataaaaatagcttctttcttcttcttcctccttattttactcaccaatcagctctctggatgccacgtgtgcttccaatctccatatttttttttttgtttgaatataaaagagaattaaatcttttattagtttcccattagcgaaagatgaagattgtgtctgggttttactctcaagcaaacccatttctttttggtggtgtcgtcggagtctttgtatcattttacttagagaaccctaatggtacattttttcatttctgctccgatttttgttggtttgtttgttgctatctactttacagaaaatgacaacatttttgtgaatttcggtctctatagtgctacaattagccattaaacaattgcaaaagctcgcatttgtaggggtattagatagcaaaaaaagtgttgacttgagatgtttgtttatgcgcactaactcgattgtgtaaaagctgagttttttttcaagtatctatcatctgagtggtctttttggtatttgaaggagcttctgattttgatgtggaagtaatcatatgagattgatagtaagttggggagatatgaattgatggttccactgagacacaaggatatgagtgagtgagagtttgatctgtgaaacgagtatggactgtatgcttatgacact

SEQ ID NO: 17104 - DNA, 2501 bp, Arabidopsis thaliana landsberg
  unsure (1)..(2501): unsure at all n locations
ggcttttttgagaatctttttttgtttgttaatcgacattacacaaagtctagaaactatacggttgaatttgataatcatactatgcgtttaggtacgttggatgccaattcatgttttataggccccaacatcaaagagctaaaagcatacccatggaatgtgcnnnnnnnnnnnnnnnnnnnnnatttttgtggatttttttttttgcgggttgtgtgtcggtcacaaataatctgcggaaaagaggtttaaaatgtgatacaggatgtgtcaaatattgcgtggtagagaaaactattaatcatacgcttttcttttgtcaccgaacgcgtcagatttgggcactatcatagatacccacggtccccggaaactttctctttgattctgtttaatgcgaaattgaatcatttattttggagaattgatgcgtgttttattttgcctcaggcttttatctgaaagaccacacgactgctgcaagtgcacaatatattggagtagtattttaggatcgaatccataaggagagaagtagttcagagaaattcttaagaagagagtgaagctagggccaaaataaaagagtgggggttgttgtatgcaatgagtaaccaaaataaaagacaagtaactaaactaaacggtaagcaataagagagaagcgttaggtctttgggggtttcgccggatgtcatggttcaataaataaggtatagatctcaatctaggtgataacatggctaggtttgtttacttccaaattctcggacatacaaaactctatcaagaccagctaaccgtaacggttagtaggttaaagccggctattatcactaatatcctgcatactcagttgccctatcggttattaggtgctaacatggtttcaaaatacaagatcaaagcattaagttcaaattcgattctagtccataagtccctatcactcggcgggtgtgcaacggttatagttctttattcagttgagctagttcaagcattcatacgagattttgccaaagaatgaaatacctaaggtcaagtactaggtggcgttccggacatacaagcattaagattaaactcaactagaaagaatagtgtaaacgatcaaaaaagccatagaaaccgccaacctagactttcgatctattaatccccatgaattcccctttgaaaccctctcaaacccaactagagatctactcgctcatggcaaatgagctaatcaaaagttgggttgagtaaaccataacaaaagatgaataaaacttaaaaaaaagtttagagattacttctttggatgtagaatacaagaggcaaagctctactttaaatagtcttacacgaaaacgagaaagagaaagagagagatggtgttcttcaagcttcaagaggtgcggcggcgagtggacagctctaggcgacggctagggttcgcaggtgatgaaggcacatctagggttagggcttagaacaagtatttatacttgaggaaaatacttgagggccaagaattaggtttaggggtaagaacgtcatttcgccggataagtaagtgatcgggccgagtagtgggcttcagggcagcagcctaatgaaggtggcgcaaagagggaaggacttgggcatgacctaatggtcggtggtgagctactcggagctgccagggttcaagtctcctcggccggatgtgttttggacttattatttctaaacggccggttcttgacatgtcttcactctttgggtcatatcttccaaacggtttcatagattgctttgattcgactttggcgtaaatcttgactcttctaactttccatacatatcaaaatatctcgtttccgtgatggggaagatctcggtcggatgctaaacttttgaagtactggaatgattgtcttttgatacttttagtttcaaaactcttaaaaccttcttggcacctagaatacgagtttctcctcttcttagctctagaatggcaccaaattctctctgaaacataagaaaacaacagctaaaactggctaaaaagtcgtgttattaaagaaaaaagacatggagacgatggacttggcgctgaagagcttcctccgatacaccaagaacggagagacaatgagaggagatacaagtgacacaactccgtaaatgtactttctcaaccacctatacagctatagagggtgggcattgtccaaaagcaagaatagagcaaaaggagcggtttgcattggaggagtggttacaccaattctcctatcgtgcgaagtccctccgagatcgactcagaccgaaccaatatggaaggatatcgcccatctcaagcttacccatgtaatcgagcaccaaatgcatgatgagaggtacgccttcaaattcgaccacccgttaacaggagaagcgactgatcgagcaagggacggataatgtcgggccgaagaacacatgaacgtcgtggtccacaacttactgggggtgcgatcgag

SEQ ID NO: 17105 - DNA, 1556 bp, Arabidopsis thaliana landsberg
ttagtatattattaaatatcactagattagtttagttggtttagtgctttatgtatagttttgttatcaactctggttaagagtattagtattttaagtctttctttgtacatcttttacgattaaatttagtgggaaaacagtcgatttccctccaagaagtattgacatcacgtcagatagagcctttttttttttatctcggtctagatgtttaggaaatggaagtttaacacctataagcattttttccttttccaatttagtggaaaaggaaaaagttgagacatataagcataaatcgtggaaaggaagtaccgacttagggttttctccaagatggagcaaagagaagagaagaccgaaaatatccagagaaaaagaagcagaggaaaatcttcatcatcatccttacctctcgatctaacctcggagatattctcaaggctgcctgcgaagtctgtcgtgaggtttcgttgtgtttcaaagctttggtcatcaatcaccaccgctccatatttcaccaactcctttgaaactcggccgaatctcatgttctttttcaaagaaggtgacaagttctttgttttcacgattcctcaacacaatcagaatccgaacgagtcttattcttattcttcttctgagattattgatagttaccatacaacctatccaaaacgttgttgcgtcaccactttaaccgagtcggtccacggcttgatcttctttcgaaaagcagcaacccctataatttggaaccctactatgagaaagttcaaacctttacgcaagctggatgagaggtggaagaatataaaagtctctttagggtacgatccagttgatggtaaacacaaagtagtgtgcatgccgtatggtaatgctttttatgagtgtcgggtgttaacattgggatcagatcaagaatggagaactgttaaaaccaaccacaaaaatagcccttttacattccatggtggagtttgttatagacaatccagatgcatcaacggtgttatatattatcgagctgatactaattctggtcgggtgatattgagtttcgatgtaagatctgaacggttcgatgtgatagaattaccatgggatgagaattttgggcttgtgatgatgatgtcttataaaggaaggttagcttgtcttggtttcaatcatgagaagaatagtcgttcactgtgggttttggaggatgtagagaagcgcgaatggtcgtgtcatacctatttacctatttctcattatgagccgggtttggagaactatttcaatctaacaggtatcactaatgatggtgaactgatttacgtaccaaacactgtgctcgaacgttttcatgttatatattttgatgcaataagagagacgtttagaagagtcatatacaaaggagttgcagataaaggttttcgactacgcaatggacttgaagacaaacctatacgtagactccactttttccccaatcacattgaaactctcatgtctttgtaatggactttgaaatccctttcttggtttcttcttatttttta

SEQ ID NO: 17106 - DNA, 1962 bp, Arabidopsis thaliana landsberg
agaaccaaacagttagattttgattggtaatctcgtatggttgcagtatttttctcgttctaattattactagtgacgaagacgttgcaaaacgagattttttttttaaaagttgtgactattttttttaacaaaaaaaagttgtaactattttggtatcgtttattgttttttttttaacgaaaaattctaaccttgttttttaccagtcgtacttttgacataaataaaaaatagtggtcagaaatagttttcagttctgctgctttcttacccttctatgtttttatgattggtaatttggtatcaatcggaacaaactaaaattgttcattgtagtccttagtcctaataattcggttatccattcggtttcggtttgtatctattcggtttcaactttttcggttctaaagtttagtattcatttggttattttgaaagtttggttccgtttcggttctttcggttttaaaatttaatatacattcagctatttttctttgaatattttcggatatttcatttatttttgatattttcatatgtttttggtattttgagtatttttactattaaataacttttaattatttagtttagaaataactaatatttttaaaaatatataattatatataaaatattttcggttacctaaaatatttcgatttgtatccattcggttttggttctttcggttatagaatttaatatccgtttgattattttcaaattttcagtttggttcagttttttttgcatcggtttcggttcggtacattcggttcggtttatttgcctaggtctaagttttatatttaagaatttaggcccatgtttttatataaattttagttttgaaagtagtttggttgggttaggcctatatcaaattttaattttgttaagttgatgagatgacatggaaaaatagtaagtttttattggttaatgtaaatgaggtgtattaatcgaaatgttttgatttggctgttgttgattttaatgaagtgttatgctgagaatatttgaaaaagttgatgtgtcagcacaggagagacttgttgattgtatattctctcgtgaataataagaaaaagtctttacccaacactatgctagagattatttatttaaccctttacgaattctgtttactctttagtgggtgtgtgacaacattctttacgtgcggattgtacatattcttttcgttgatcaagcttaatatttctaaattgacgacaaaaaacagaaaaagaacagttaaatattgtttttatatattttgaaagtgttttttttcttctcccgatgtacttcaaagagattttagattatttaacaagaaaagatttagtacttaataataggaaagagccaaaaagggaagtgactgtgaggaagtcaagtggaggtgttgcaaacaaacatatagattggctccagctgtttctcagttctctaacattaaatttcgtttttttgctaactagatattgtttactttttttcttattttattgatcccattcaattaactttctgtctctcttttgtcttcttgttgatgtccctatactcaattgcactgcattatatgaactacaggaggactagatatatgtcctaatctcttgcttagtcattttatttttgattttgataattttcgtattggtcgatgttttcttaaatattgattttgattgataactaacttttttagcaatacaattactttcttaatgaattcaaactcctcatgtaattcaacaagcagtcaagcaatgtaatcaatggtaatgatcattaagaactgtttttaaaagtagaagcaatgttcaatgcgatggcttgattgaatagtctaattccccataaatacttcgaaattttgaatagtaaaaaacaatatacaaaagttaaatgtaataaaaaaacatttacagtgttgtg

SEQ ID NO: 17107 - DNA, 1225 bp, Arabidopsis thaliana landsberg
ggtttactaattatagcagcaacacaacacaaaacaaactcataagatcttctcaaatatgagagggaaaatatatggaattataagaatttctgccagcaaaaacgccataatggtgtaattaatacaatacggtatagcaaacagatggaatcaccaacgtttaggggcaaaaaactaacgaacaatatctcaaatcaatcacccgaaaagacttataaacatatattttcctaagccttagacataaacgcaccatcacacatagccaaatgtcaacacaagaaaaccaaaaccagaagagaaaatgaataagaagacactaaactcacacaaacgagaaaaaaaagtaggaattaagaaaaacagagaagctgttgttattgctcctcctgcacttccacttcgtcttcttcatactcatacccttcttcctcatcagccgttgcgtcttggtactgttgatactctgacaccaaatcattcatgttgctctctgcctctgtgaactccatctcgtccattccttcacctgtgtaccaatgcaagaaagcttttcttctgaacatcgctgtgaactgttcgctcacacgcctaaacatctcctggattgaagtcgagttcccgatgaaagtcgaagccattttcagacccgttggtggaatgtcacacacggttgatttcacgttgtttgggatccattccacaaagtatgatgagttcttgttctgaacgttgatcatctgttcgtcaacttctttcgtgctcattttgcctctaaacatggctgaggctgtcaagtacctgccgtggcgcggatcagctgcacacatcatgttcttggcatcccacatctgttgagtgagctcagggacggttaaggctctgtattgctgtgatccacgagatgtgagtggagcaaacccaaccatgaagaagtggagacgagggaatgggattaagttcactgcaagcttgcgcaggtcagagtttagctgacccgggaaacgaagacagcaagtgacaccgctcatggttgcagagatgaggtgattcaagtctccaactgaacaaaacacaaacaaacaagcccattagtatagcttgatcatactaatcagctagatatataaagaaacaggatcttacagcttggagtagtgagcttaagagttctgaagcaaatatcatagagagcttcattgtcgagaaccatacactcatc

SEQ ID NO: 17108 - DNA, 745 bp, Arabidopsis thaliana landsberg
caaccaaccactatagagatcaaaccactctgaattaaatcgtctcatttttttttctgttagtgttttaggaaaatcatgcccatgaggttgataaggacctttaatcagatatttgcgtcttacctcatctctttcattaggatgataatccaaaatatgttttctatcgccaggatccaaaggcaaatcttctggaatagcttccggaatattttctggaatatcttgtgacgttgattcatgctttcttttgaaaaatctatgaattgttccctaataagaatagttatatgaacatattagaaaccaaatttaaattaaaaatttgttaacgaacgaattatcaaactacaaaaaaatatgtcttgcataaataatcataacgaataatttgataaaactaacagttttgtttcattcggtctactactagttttaatattagttaatcacaaaagagaataagagatacttacgttagacatggtggctggaaatttgaggagaaaccaaaaaggttaacaattagaaaacaatttagttgacaaaagaaatctaggtcaattgtttgtttccacgtttattcatttagactgaaacaattttttaatggactattgttttcaattgttatgggttggaaaacattaaaagagtagggcactttcctttttttccaataaactaacagatgattaaagttttgaatcaaatacaattaaatatttttttttaaaaaaac

SEQ ID NO: 17109 - DNA, 669 bp, Arabidopsis thaliana landsberg
ggaagatcgtatgtcgaactagaacgtcgggactaacacggcatgtatcttttgcggtgatttaatggaggcaagacaccgtctatacttctcttgtggatatgcaactgaggtatagggaaatttagcacaagaattactcaagaatcatctcaccactagttggaacaaccttctccaactactccccaacagcacctttgaaaagaacacatttgttcttgctctattgcgttttccaagcttcgttccactgcatatggagagagcggaatgctcgttcccatggagacactcccacatcgcaagttcgcaaacatatctcctccatcagtgaccttcatgggcgcaaatatgaaggatctcttcaattattcatggtttgcgtaaagaaatacatatacatcatttttctctaatccttcaaaaactcaaatagatgaaacacctattgtaaaaacagttttttatttttatcttttcaacagattttacattcaattaaaaaaaagaagttaattatgagcgaaagcgattaaataaaaaaaatcatttctaatgtattatatatgacacctttaaaaaatggattaggttaaccatagctaattagaattaattaaacctttcaaaaaagagggaaaaaaaaaatcagggttatggtttaat

SEQ ID NO: 17110 - DNA, 990 bp, Arabidopsis thaliana landsberg
gaatggtatagaactaagcattctacttaggtatgaaaaacttatcgatgataaaaaattaaatggtaaatctaaattgttaagttaagctgacgtatcatagattaatcataagggtttttctaatttatacagagaatattattttttaaattaaatctaaaagagttctacaacaaaatttgtccatttatttctttttatcgtagattaatcataagggtttttctaaaaaaatttaatcttatttaccatcactttaatttataatttaaataaaattagaatttcctaatctatttacaaaataaaaaatagaaatagaaaaaaaatacaaatactctaaatgaattagagtctttcatacaaccctatttttcttggattttatcgacttattctttctctatacaactaaaaaaaaaaacacagagctcaaatttccggcgacccaacacttattttcgccggtgaatcttttgccgtctctgggattgtcgccgacgagtttcttcgtcgtccctgtgttgacgccgcaacttttccactttatgctttggaaaccttatggtgaaataaaatggcatgttttgacagtatttgttcatgttgagttctgtccaagtagagatattagaactcaaagtatttatctccctctccacgcagcttcttctcacgtcttcttcatcactatcacttccttatctctcatctcaatctcagccatcatcatcatcgttgtgacaccggagttgacgtcaagttgtggtcgtgattgttctatgtggttggtttcgtcacagttcatcaccggattgtttggtaaagaaaacctatcatggttataaactatactactgaaattgtttcactcagcaattggattaagggattataacttcaactattcgatttttaggtgaatatacaaaggattttaagtacgtttcgaccagaacttaaaatcgtcaagggaaaaaatcgagt

SEQ ID NO: 17111 - DNA, 806 bp, Arabidopsis thaliana landsberg
aatcaaaaaaggggcctcttgcgttctcccagctacgttctcccggctatgtcagaagccgggtctcgaggagcgaacgcgcgtacatgaaaatggcaaggccgattgagccgaggaactcccgtacctccgggttagggatacctcactcatcacctgccacgaagaatggcccaactcgagaagcccaccctattattgacgagctaggacgaacatgcagatggaaagaaaggagagtacgactccatgcaagaaagacaaaagtgttcaggcctcagcggtcgtggtgagacacacattcaacaagaaactgttcaaacgagaatcaggcaccgccttgggaaggagccgcgccttcagctccatccccgccatcggtggggtccatctcggcctccggtgacgtcgcaggaggaaggacctccgcctcaaaggtggtcgccaacaccgcgccctgacccgcggtgaccgcgtcgagccgttggacctccgctagggcagcatcgtcttcgttaggaagacagtacccctcactaacccgctccaggtccacaacgtagtgggaagcaagcacggcgaaggcccgcctgacgccgtggtgtagcgttgcggactctgccgcgcgcgtgatcacccaaggctcgaaggcggctctgaggggagcttcctgaagggacgtcgccggagccgaggacacgataaaagtccgagacgacctcggacatggccgcaaggtccgtatccctctgctcggcagctccggcaagcgcctcagcaagcgccttggcggactcgtcaagggc

SEQ ID NO: 17112 - DNA, 2141 bp, Arabidopsis thaliana landsberg
ttttatcgttttcatcatctgaccatgttagatcttgggcgggggtcaatcgagcattggggaagatgattggttctacatgagcctgcaggaaaattaagtaacgtattatatagcaccgtaatagtatatttataacagtaaaagagttatcgaagaaacaaaattattatgggataaaagagattgaattaaaaaaaccatccatctatccaattaatagtagggtccttaacagtatcgttagcatgtaaaacaaagagtttgatagacaataataatggtaacgttatcatggtaacatagttattttcaatgaaatattactagttgataacgaaaaagttggagtaaagaaatcaagaaattcgccacttaagacactaacaaagaagttaatgtgtatcaaacatattatcgtatatgtatcattagcacgtaaacaaaaagtttgatagacaacaataatggtaacagagttattttcgaagaaaatttactagttgataacgaaaaaattggagtaaagaaatcaagaaattcgccacttaagacactaacaaagaagttaatgtgtacaaacatcttatcgtatatgtattgggagaaaatcattacctcgcatttggcatcaacattttttgcatcccaagcttgagggcaaccctggccgagtagccacatcagcggctgcttccagcatcagaatcagacaaaacaacctcatcaatttggggaccctcctctatggctgggactgcttccaaaacaacaagctgcaaagcgtatagaagaccttgtaccgcaacacacgttgtggcgagttgttcaacttccctctcttttattgaggtcatcatcatctcgaaagacaatcgaccccaagggtaagacaaaaaaccctgtagatcctcggccatttccgcgtgatctttaattattttagggtaatgcgatgtgggcagcaaaaacctatcaacaagagccaaacaagcataacgcgcagccttatttcgcgatcggtaacaacccttttcttaagcatcgtaataaccctttcaactgtgacatcttcttctagaccgaacagggtactgtaataggggatttgcttccccccgtccctctcttcttcttcttctgaactttaggatatttgccacacggaagcccggtaacaatcttaaactcccttaacgaaaatcttaccggagtcccagcgaacactacccaaatctcgtgggggttaaaatttccaattgcctactcagtaataggagtccgaaactcgctgagaacaccggtttattcggaaaatctaaaagcccacccaatgaattgttgaggatgaaggattgctcttattcgtcgatagcgttaataatcctagacagtgtttttattttgtggtacacgtttaccctttcgccaagcggctcctctccaaatgcaatcaaccggttgggtaattcgacagactccatctagaacaaaaaaaaattgattaaactagaaccgccatgtgaaagaaccctaaccggagctgaattagaattcaaacattaccttagaaatagaaacgcagcgccgaagagtttactccggaggagactaattatcacgggctccgccgaggatgatgtttggatatcggaccaaaaaagatgcaactcaatgagactttaaacgaacgctctcaagagttgtgatgactctcagatttttgggagaataaaaacactagtaaatataagatccattgagacgcgactcttcaattttagcagataaagttcctcgcaagcctttattaaatgaacagtgttcaacaaacgaaatctctcgaaagattacgttgccgtctgacacaatactagtctagcggtaatgttcattttcgaaatgatttataggggtataggggtcattatacacatcaacaatcattgggaacagttgaaaaatggacgacctaattaccgagtcttccatgtacatataatggtaatacccttctaataatgtctatgacattagatgtttgtgatgtggtggagttgtaaatgtgtcaaaagttcaacaaatgccattttttgtctaatagctttgaagtacatcttcgtaactagtttttatttagg

SEQ ID NO: 17113 - DNA, 3932 bp, Arabidopsis thaliana landsberg
ataatgataagattaacttttgagacttgattattggctttttaaggttgttattgcttagattgcctatataaaccttctgtgttttcactgactttcattcatttgttgtatgtctgctaggcggcaatgggttagagaagaagacttggcaaaagatttgcagttgcacgccaagcaacttcgaaaaataataagactctttgaagaagaaaagttgattatgcgtgaccaccggaaagaggtcggtgcagatactatgctctttcagattgttgtatagcagttattgcgcaatatccctcttgctaagctttcaactcaaccactcttttagtctaatgataaatagcatactgtcataaaatatctagagtatgacaatgattgaagaacatgagtgtgagagaatgatatattttccaggttttgcgttcattggttgatgctcattcattcctctaagtttcttttttcctttgtgaaccttgtggttgcaatttttcaccacatgttctacattttttggttcaagtgtttgcttatctctaatcctttaccaattaccacttctttactttgttgctttattgatttctcaaatcttttcaatagactgcaaagggtgcaaagatgtatagtgctgcagtggctgctacaactgatggccgagcagaggacaaagttaagcttcacacccactcgtattgctgtctcgattatgcacaggcacgcttcatgtccctacttttttttcttcagtttgcgtttttttgccttttttttctatcaaactaccttatactttgttaaacttgcagttcttcttttttacagatatgtgacgttgttcgttttagactgcatcggatgaaaaaaaggctcaaagatgagctagaagataagaatactgttcaggagtatggctgtcctaactgcaaaagaaagtaaagtccactattctttatgtttttaaatctttacatggtgagttgtattattttcactaaacctgtatagattctcatttctggtatagatataatgcactggatgccctgcgattaatttctatggaagacgattcttttcattgtgaaaattgcaatggtgaacttgttatggaatgtaacaagctaatttccgaagaagtagtagatagaggtgacaatgcaaggagacggcagcgggagaaagtaaaagtttggcttcaggatttggaggtctgtgtttactgttttaacggctatttcaatgaaagtatgagaaaaacacaaattgatttgccttcactgaagcttgtgcatcgttccaaattcatgatgaaatcagaacgatatatgattaagtttcctaggagattcgttcttaaatatccaatgcttgagatttgcaataccaaaaaaagactgtggttgtagtgtgtgcgttgacacaattggaaataaaatgtagggtgaattgaaacccctgatggaactaataaatagagtaaaagacctaccgttccctgcctttgaaccttttccggcatgggaagctcgtgcagctaaggctgctcgtgaaaatggtgattttaaccctgatgatccttcaaggtctttgggcggatatggttcaacaccaatgccatttctgggagagacaaaggtgatctttcgttacagttctcaatgtatataatattacaatgttattatggaagataagttttccatgtatttttcccttagttgatttctttgatctttacatggttaggttgaggttaaccttggtgaaggaaatgaagatgtcacatctacaggtggagattctagtctgaaaatgttgcctccatggatgatcaagcaaggcatgaagctgaccgaggaacaaagaggagagatgagacaggaagcaaatgttgatggagaagcagcaaaactttcagatgacaagaaatcagtcatggaaaatggcgatgataataaagatttgaaggcatgcttttggagaaaaattatttgagtttagttagattcccacaatagcatcttgtggattgtgtttccagaatgttgatacatcttatttccattttgcttcaggatgagtatctcaaagcttactacgccgctataatggagcagcaaaagcttgctgcaaagctgaatcagcaagaatccgcaggcgaatcaacaaccactgacattgaatcggctactacatcctcagatcgtcaagttggtatgaagtcgaaacgtgaagatgaagaagaagatgaagatgttgattgggcagaagaagcttctgttgcaggtcagttttagtttattactacttcatttccagtttgttaactagttgatcatattaaacaagacattagttagttagagggaaacttgtttaggttttttcaaagtagaaaaccggaatagagcgttttatttataaagcagggcgtgaacaagatatatgttaagacagctggtagttaaactataatagtgggccagtttaggtctcatgataatgtgatgctcatcttggttacttttcatgtgacttaatttgcagcaaatggaaactacaaggtggatttgaatgtggaagcagaagagacagaagaaaaagaagatggagacgaagatgacgacatcgactgggaagaaggctgattgtcatgtgcactaatagtctcttaggaaccttattgagaatcttatcatctgcaccaatttttcaaaagtgttacattgaaaattttgcttgtcgaagctgacaaaagattgaaacaaaaatggttccatttctaagcgttaaacaggttgttgttacaagggagtagggacaattgaggcgagtaggcaaatatgattctgtaaaattaccaaatatatgatttgaaggcccaatagagaagatttttgggtcttataaaagcccattagagagatgtaacattttttaattaagcgggagaaacctggtttttattcctccttctccatccgccattgatctgagtattttcagattcttcctctcaagtgaaagcaacgattctgtctcttctcttctagggtttatcgatagctttgtttcctaattgaatttctggttagtttcatttaccctttttgccattattttgaatattttctcatttcaacaatttgagatagtaaaacggattaagtagaagacagacgaatcgttgcgagtaattagcttaatagactacgatcatagttctgattcaataagaagtgttctaatttttgttttaaaatccaaacccaagtttggttttttgacagccatggagttagagagcttcagggtaggtcttactccaacagtattctacatccccggtttcataactgaagaagagcaaactcagctcctaaatcatgtaaaaatctcctctccaattgttttggcatttgacatcttgagattttgttcctcttttaacatatgtactactcttttcctatcttgtaagatatatggagcatctggttccaagtggaagacattaaagaacagaagattacagaactggggtacacttttgttttcattagattgtttttttggttgttgaagagacataataaagtcttgagcttttggtttgtttcttcaggtggtatggtccatgaaaagggtcttgttccacaagagtgtaagtaagaatgagaaatagtccaatccaatcattcttgatttccaaaagttctagataatcaagagtatttatatatgtatattttctctttgtttcagtgcctccctggcttacaaagattaaagcgaaaattcatgaaagctcgggtctattcccttctgctataaatcatgtcctcatcaatgaataccatcctgaccaagggataatggtctgttatctgtcctctgactgcttatttacttatttg

SEQ ID NO: 17114 - DNA, 1261 bp, Arabidopsis thaliana landsberg
aatcactcaagtcattatgtatcaaaccaaataacacgttttactttttcacatatttgttagagtgttatgaatattcttatttcacccaaacttcacatttgcttctaagattgttctttggtaacaatctttttttttttttgtcaaatcggttggtttttattaaatgtgaaccagtacatggtgaattgaaagcaaagcagccttagctaatgcatcggctttaatgttgttatctctcttaacaaaggcataagaaattgcatcgaagtttagagagatcatagcgaggtcgaataaaatcccatggagctccaatggatggggctcaccattaagtgctttgactagctgttgcgagtcttaagtgtgttgggtggccaagagaagaactgatgttcttcgctgcagatctgtgggaagattcagtatggtttgaataatcaacaaatatccacccaaatccagcctctagggaatcctcacgctaagctgcgtcggtgaagcaaatcaatgtgtcatgatttgaggtttcggttcttggatctgagctcctaaccattctttggcttgagaaatagattgggagatgagatccaaggttgtgatatgtttctactcaaaaatcaatttgtttctacaggtccataaattccacaaagtccacgggaagagcagaccgtgtccgattccagttggcgggacattgacaagcaatcgagatacttccaaacccatcttcatgcttgtgattcgagaagctgagagtgacgtcttgaatggtgctttttcccagacccgaagagcaaaggggcaaatgaagaacatgtgtaggcacgattcatcctcaccacaacgagggcagttagcaacagggttaatgtcatggatcctcagattttcgccaacaggtaaagcatttttcatagctttccataggaaaatttatacttttggagggcagtgcttattccaaatctctttattccagtcaaaaccaagaggaggatctaaggattgaggtgcttgtttctgtagatcaaccgctgcgtgatacccatatttgtctgagtattcacctaatttagtgggaagccaagcaattcggtccctagctccaacactgctaggtcttacggagagaatctccaattcatagcttggcagaagtgttctgagtttctcattatcccaagtcttcataatcgggcagataagttgattcacattcatgagttgagattgttcagttggtgga

SEQ ID NO: 17115 - DNA, 1265 bp, Arabidopsis thaliana landsberg
  unsure (1)..(1265): unsure at all n locations
gcgcaacaccacgcctgcggccctgggccacctcggcaacgagcaccatcatcgcgaccgtcgggcccacctcgacgagagggtgcgccgaggctaccaccccaggcgtgggggacgctacgacagcggggaggatcggagtccctcgcccgagccgcccagtccgcaggccttcagccgggccatccgacgggcaccgttcccgacccggttccgaccctcgactactatcacaaagtactcaggggagacgagaccggaactatggctcgcggactaccgtctggcctgccaactgggtggaacggacgacgacaaccttatcatccgcaacctccccctgttcctctccgacaccgctcgcgcctggttggaacacctgcctccggngcagatctccaactgggacgacctggtcaaagccttcgccggcaacttccaggacacgtacgtgcgccctgggaactcctgggatctccgaagctgccgccagcagccaggggagtccctgcgggactacatccggcgattttcgaagcagcgcaccgagctgcccaacatcaccgactcagatgtcatcggcgcgttcctcgccggcaccacttgccgcgacctggtgagcaagctgggtcgcaagacccccaccagggcgagcgagctgatggacatcgccaccaagttcgcctctggccaggaggcggtcgaggccatcttccggaaggacaagcaacctcagaggcactcgcaggaagacatccccgagttgtccgctcagcgtggcgcaaggaagaaaggcaagaagaagtcgcaagcgaaacgcgacgccgtcgacgcggaccttgtcaccgctgccgagcacaggaaccctcggaagcctcccgggggcgccaacttgttcgacaagatgctcaaggagtcgtgcccctatcatcagggtcccatcaagcacacccttgaggagtgcatcatgcttcggcgctacttccacagggccaggccaccggtggaaggtggcgagcccacaacaacgacaacaaggaggatcacaaggcagaggagttcccgaggtccacgactgcttcatgatctatggtgggcaagtggcgaacgcatcggctcggcacctcaagtaagagcccgggaggtctgctcggtaaaggtgacggcgccagtctacctagactggtccgacaagcccatcaccttcgatcagggcgaccacccgaccgcgtgccaagcccagggaagtacctgctcgttgtcga

SEQ ID NO: 17116 - DNA, 2516 bp, Arabidopsis thaliana landsberg
tcagcgctactcggcgctcatccacactgattcgtccatcatggctgcatcccctgagagacaaaatgcaactgcaatggagaggggtaaacgcaagcgagaggacgacttagtccaatccgaggtggaggaaacaacaggaatggtgactaaagaggcgggtgaaggtagcggttcctccagcaggaacaccaagtgtagaggcgcggtgggcccagtaccaccacttccaccatgattacaacctgctggaactgtcaaggtctcggcatagaccttacagttcgacgcctcaaggagatacaacggaggtatctcccggatatggtatgcctattggaaacaaagcaaagggatgagaaaatcaaggaagtagcttcagatcttggttattctaactttgtaacagttccaccacaaggtatgggtggtgggattgctgttctttggaaagattctgtttcagtttcagttctttcgctttcatcaaatcttgtagatacgcaagtgaattcaatggaatcagtttctatttgtcggtggtttatggtcatcctgatcccagtatgcgaaatgaagtatgggaatctatagaaagaatctcgtcatccagagatggcccttggttaacgttgggtgatttcaatgagataaaaaacaatgatgagaagaatggcggaccacgacgaccagaacgaacgtttgtagacttcaatcgtatgattaacacttgcgactttcaaaatatatagttcattggcaacaagttctcctggactggcaaaagatattcacacaacatatggtgttgtcttgatcgctccatggctaactcagaatggttgacatcatttccgtcggcacaaacagaatttctggaattcgaaggctcagatcatagaccattggttaccaatttctgcaacacgattgaacaacgaagaaatcagtttcgttatgatagtcgattgtttcacaaagtaggattccgtaacatgatcgtagaaagttgggatgcggaaaatagtgacctgtcgttgggcaccagaatcaatcaaagccaaaagaagatggcggaatggaaacgtcggaatcgaatcaatgcctcgattcgaatagccacgttcaacgatgcttatacatatggtaatcgctctacagaggaaattcatgagatcactttgacctgaatcaagcttacaaggatgaagaacaattctggaaactcaaaagtcgaaagaattgggtcaagcttggcgatagaaacactaaatatttctacgctgcgaccaagcaacgacttgctcgaaacatagttctagcagtgacagatgaagctggaaatgtataccgaggtgatgatgaaattggagaagctgcagaaggctactttacaaacctctttaagtctacaagagataactccagagataacacaagtatttttcatggtctacaggggaaagtgacaccccaaatgaatatggacctccaaagaatggtgaatgaagaagaaatacaaaaggctgtgtttgatattgggccggatagagcgcctggaccagatggaatcgctgcagcattttaccaacaattttggccagatgtgaaagatgcagtcattgttgaaatccaacgttttttccgagagggtaacatgcgcgaatcaatgagccacaccaacatctgcctcattccaaagaaagatgtctctacattgatggcagattttaggccaattgctttatgcaatgtgagctataaaatcatttccaagatcctagtagaccgattgaagcaacatctaccattcatagtttcggaaaatcaagcagcttttattggagggagaaacattatggacaatgtgatcatcgcacatgagatgcttcattcattgaaaaaaagaaagctttgggccacctcgtatatgacggtaaaaacggacatcacaaaggcatatgacagattggagtgggctttcttacgagaaacgatgcagtctatgggatttgattcagtttggataaattgggtaatgcagtgtgtggaatcagtcagcttctcagtcttagtgaatgcgtcccctagaggaatgataaagccagagcgaggaatccgccaaggtgatccgttatcaccatacctctttatactgtgtgcagaagttctgagtaacctactcaccaaggcagaagatttgaatagattgaaagggatgaaaataagtactacaggacctgtcattaatcatttgctgttcgcagatgatgctctattcttttgtcatgcacaccaaaagtcatgcaatactattatgagtattcttcacgagtacgagcaggtctcaggtcaagcggtgaatctgaacaaatcggcaatcacttttgaatcgagagtaaagcaacatgtgaaaacaagattgcgtcgtatacttaatatccataatgatggtggaggtgggaagtatctcggactgcctgacctatataaaagcccccaaaaggagatcttca

SEQ ID NO: 17117 - DNA, 1155 bp, Arabidopsis thaliana landsberg
aaggtccatcctcaactctccagtcaaaccgtttcacaagattggccaaagtcacacttgccatcaccgacccaagtccaatgccgggacataaccttctccctgctccaaatggaatgtatttgaaatttcgtccaacaaaatcccaagttgaatcaaaatgtctttctggcctaaattcttctgcatctgatccccatgtcgcagtgtctcgttggatcgcccaagcattaacgatcacctatatgtcacatttaaaactttttatctaaaatgttttttgatatcagttataataagaaaaaatacgtaaatatatttgacctgtgtgcccgcagcaatgtcgtatccttttaattttacatcttcgcttaataatcgcggaactaatagcgggagtgggggatgcagccgaagtacctcctttatcacagcttttaagtagttcatattttcaacttcttttcctgatacatatgaattcatcttcgaaactgaacgaatctcatcttgaagtttcttcaaacattctggatttctcataaggcgtgtcatcgcccactctattaccgcggaagttgttgtcgtgctccctaaaaacatttcctataaatggaaaagaacttcatatgattatcaaagtattgtatcattaatatatatactaatgatgatgatagatgcttaatcttacaaatatgatgacttttaagtcgcttttatccaattggcattgtgcagtctcatctctttgaattgttagcaacatatcaacaaaatctggtgtttctttgtcggcagttgtatcctcatgttcttgcaacactttttctataaaatcaccaaactgcttggttattttctctagcttaccatctgaacccgtaatcttacctatccatgccaaactcggaatgtattccccgaccggggaaagccccacggcgtccaagaaactctttgttatggtcttgacatcgattgtgccttcctcgccgctgtattttttacccaatacaactttacccattatgtcgcttaccatattagtaatgagtttgcttagattcaccgatgaagaagataaacttgcttcttccagcgtctccatcaatagaagtatctcttcttctcttcttttctcagaggattgaa

SEQ ID NO: 17118 - DNA, 3207 bp, Arabidopsis thaliana landsberg
ctcatggtatttaatatgacgattaaagagagaggggcaagtctatttatcctttgaattgttaatgaccctttttaatttatttttcaaacttataaaactatgaataatagcatcagaaatcataaaaaaaaaaaccatgtaactttattgcttatgagtcaatcaaagtatacatttattcatgttgtagcttttcaatattattaatcatgtttgttttcatttttttatttttacataagtaacatattttcatgccattaaaattttacaacataagataattttattttataatattcaaatttccaatttccaatttcctctttagtcttaagtcttaacatgtcaatttttgtattaaaaaaaaaacatgtcaattttttgtacaaaaaaaaaaccatgtcaatttaggaggaaaaaaaactggaaaagcctgacaaagaaaaaaaagctggaaatatcaaaaataaaatgataacgtcgcctgagagattcgaactctcgcggggaaaccccatgtacttagcaggcacacgccttaaccactcggccaaagcgactttattgatcattaatcaatctaaaatatatatatataaacctatcgttttgaatttttttttttggcaaacagcttttgatactattatatatatatatatatatatatattatccccacatatctttagctatgtctttttcgaaggaaattttgaagtattaaattaagtgacgatttacacacatatggagtaattaaatcgttttagcatatcttgtaatgttgtctctcttatccaactattctaaagaaagtggtgactagaaaatatagattatatactatgtgaccaactttttagtatatctttataaaaacgcataagatatgtcatatgtgtttcctctaaaacttgttaaagaaatgaaaaatctgttggtagatgtgaatagttatggactagtttggctttaaaaagaaaattgggcccatgtatttctattcatgcattggacatgtacaatgtacaaatatattcatgattgcaaacatgtagtatatatgctgactatacgattgttatttattcaaaagttaagaaaatgcacaagatacacatggacgaaatcgaaactaattgtacaataaaataataattattagtattacgaagggaaaagggaaatggtccgtactagttgtccgaacccgaagaagccccaatcgctgcagcaactgtctaggagccgccacgctgcgaagaagctctagggtttgttcgtcttcttcctcggtttcatcaggttttcatcttctcgattctgatttcggcttctgttttagctttattcggcttattgtgatttaatttgagctgatttggcattattgctgtgtagttaggggtcagggttttaatctgatcgcgtctaggttatgattcttttgatgatttcgatctttagaaagtcaattgatttgtttcttcgtatgtagctcgtttagctgacagatctgcatagtgtcttatcagttactagatctttgtgctatctctcactctgatttctggattttgattccttttttttttgttagctgacatacaagtgtgagtgatgtgtgtctttgctttgtttccattttagtttagtttctcaaaatggaaatgatgaatattgggggttttcagaacctaagttgtagaaatggtctttttttgttatcacagaactcaaaaggtacttggtaggagcgagaagaaagtttctggagaattgctgaattgtttctttcaatggttttgtttctaaggtactatccgagtccaatgtttctgagagttctggtagcttgttaatttgttatactgaatactaggattgatttggcaaagcatgtgatgtttgttgcaagttcaagcagatgtgtttctttttataaatttagaagaagtttacttccgcagccatctatgattctcaaagttcttagctttgcgtttgattcttttttctagaaactattggttagctttggataatgagtccttttctgcccatgatgtatttttctcagatggtaatcaagattgttgacggtgctctgaagatctgttgacctgctcagagtttgcttaaaaagtttgagaaaaaatggacgatgataatgggctcgagctcagcttgggtctttcttgtggaggatcaacaggaaaagctaagggtaacaataataataatgctggaagctcctcagagaactacagggcagaaggaggcgatagaagtgctaaagtgattgatgactttaagaacttcctgcatccaacttctcaaagacctgcagagccgagttctggttctcagagaagtgattcgggtcaacagcctccacaaaatttcttcaatgacctctcaaaagctcctacaactgaggctgaagcttctacgaaacctttgtgggtggaggatgagtcacggaaagaagcagggaacaaaagaaagttcgggttcccggggatgaatgatgataagaaaaaagagaaggactcgtctcatgttgatatgcatgagaagaagacaaaagcatcccatgtttcaactgcgacagatgaaggatcaacagctgaaaacgaagatgtagcagagtctgaagtaggtggtggttcttcttccaaccacgcaaaggaggtggttcgtcctcctactgatacaaacattgtggacaacttaactggtcaaaggaggagcaaccatggtggatctggcactgaagagtttacaatgcgcaacatgagttacaccgtacctttcacagttcatccgcaaaatgtcgtcactagtatgccttactctttaccgacaaaagagtctggacaacacgcagcagctacaagtctattgcagcttaatgctaatgctggaaatctcccgattatgttcggatactcaccagtccagctccttatgctagataaggacggttcaggagggattgtcgcactttctcaatctccatttgctggaagagttccatcaaactcaggtaagcaaaaccttcccttaaaactcgatttagtactcttacagcaaaaatagtaacttttccttccaaaaagatacagcaaaaggcgaaggcaaacaacctgttgcagaagaaggttcatccgaggatgcatcagaacgaccaacggga

SEQ ID NO: 17119 - DNA, 3572 bp, Arabidopsis thaliana landsberg
catggccaagaaagtgtatcaacggtctccaatagaagtaagactccaagcctaatcaaacctctttttgacaaacgagattgctagtaacctcatgtattcttcttttgattgttacctttaattaggatcttgaactggcgaaaatgttggtaagggtaaacccgttggttacgaataatctggcaggggcaagaagctttactggggaaggatatggatcggttacacgtatttatatcataagtggagaggataatatattacctgaggactaccagcgttggatgatccgcaacttcccggtgaaagaagtaatggagatcaaagatgcagatcatatggcaatgttctccaagcctaaggaactatgtgctcttctcttggagattgcagataaatacgcctaaataaaccttagatggtcactacaaattagtaatgaacttcagcttccacctcaacaataagccatatgagaaataatattcataagaacggtattacatagagaagcagttataagagtggttatataaataaaattcgtgttacaattaagtatattgtatcacaaaaatctatatggccgtaagcatataacaaccaccattcttcccattggtaaatcctgcagccatagaagttacatgatacctagataaagtactaggaacatgtggcagcttatgaaccaaacaaaaatttatttggattcttaagatttatttaatatcagttattatatagtagctaaatcaaaattcatcattttttatactttgtaaataaagatttggtttatttcatttggacaccgaaaaatagtttttactatattttctagtaattctctgctaaaacgcttgtttagatatctaaataaacatcttttgtgaaatatatcctaacaatagtattgttgtatcgtgtgcttgtatcctattgcaattgatttttttctaaacatatagaaccttaagttcaatatatttccccccggcagtgtttaatttctcttattatacagaaatcaaattgatggttttatacctatttttagacgtctagcttttgtttgcccaaggaagcaaatagcatgagcaccgtgtatacacagaaaaaaatgttagcatgttttagcttttaagacgacaataatgctaatcaatctcatataacaaaaatgataaaataatattctcactatgtttttagtgcatctttgttgattttactagtattcgtaatatttgttgctctcttcttgcatctctctattttgattctaacttagactttgactaaaaaaaaacgttttaaaattttttgagaaaaggaagacataagaaaagctaatgcatttttttctcacacattctttacagcattacacacactcacacacaaataaagtctctaactactactacataaccactcccactaggcttacttaactctaactattaaaaaaaaatataattgacaaaaaaaaaaaaaactataatcatgcatcaaaatcattacctttattttcactttaatgaacttttatttcactaaagtccaaatgtgttaatagtcgttttcttattcgatacgttcttttcctacaactggcattataccattctttaacataagaaaaacatttgatacacaacaaaaatgtatgtatttagatttaataatacaggtacattgatctttcctaagattcgaattttattgcattctattcatatggttgaattaataaaactaatagcccaaatgcagaaagtatttctatttctatatataagtgctgaacataaatactgacagtaaacaagggaatggataagaataaccagaagaagtttgtgcttgtacatggaatctgccatggagcttggtgttggtacaaggtgaaagcccagctggaggctgctggacattctgtgaccgcagttgatctagctgcatctggtgtaaacatgactagcctggatgagattcagactttgaaggattactgcaaacctttgcttgagttactgaactcacttggctcggatgacgataaggtgattcttgttgcgcatagtatgggaggaatacctgctgctctcgcttctgacatattccctagtaagattgctactattgttttcttgacagcttttatgcccgacacaagaaacctacctgcttatgtttaccaaaaggtacatcatcatacattctaatatggttttgaggtatgacttcttccaagtggttctaatattttactaaaatccgcagctaatcagaagcgttccacaagaaggatggttggacaccgtgtttggaacgtatgggaaacatgaatgtcctctagagtttgctctttttggaccaaagttcatggccaagaatttgtatcaactctctccggtccaagtaagactccacgcctaataaaaacaaaaatgggattgcttgtaatcaatcctttattgattgttgttgtgacgggttaggatcttgaattggcgaaaatgttggtgagagtaaaccccatcattacaaataatctggcagggacaagaagctttagtgaggaagggtacggtaccgttacacgtatatatattgtatgtggagaggacatggcggtacccgaggattaccagtggtggatgatcaagaactttccgccaaaagaagtaatggagatcaaatgtgcagatcatatggcaatgttctccaagcctcacgaactatgtgctcttctcgtagagattgcatgtaaatatgcctaaatagtcttaagatcttcactacagtaacaaagtttagcttcaactacaattataagtaaatgatcatactcattaaaaattatttcattattatgtcttataaacactattttcagaaaagagcaagaaatcaaaaatgtgagagaaaaaattgtaactcctaaacttctttgaaaaatggataaaactctcacgttgaagatgaaaccaataaaatcaagagcatacgaatggaaagtaaaaaaaaaattattctggaacagtacaagatatagaaattttcatttttgctgtctttgctatttttggtaaaaaaaaatactttgcgtgttaggcccataaaacgtagatcatacgttgacaatctaacatgtatgtgattacaattagtttcctcacatctaatgtaataaaagtccaaagttagtgtcactttcgcggtggttagtttcattacatctatatcaatccaagaattcgattttgtacttgtagatattttttgtctttacctcaaaagaaatataaatccaaattagcgctttgatcacgtaaaagtttgcacgcgacataccaccagaagcatggtagtgacactaagcatgaagtaccgtacgacatataatatatatgtgttgaagcaaaatgctaaaggtaaaagaaggcaatggagaaaaagcggtttgtgcttgtacatgcggtttgccacggggcgtggagttggtacaaggtaaaatcaaagttggaggctgcaggtcactgtgtgcaccgcagtggatc

SEQ ID NO: 17120 - DNA, 931 bp, Arabidopsis thaliana landsberg
tacactaatagtctaaaacattggatttgaatatgatatatattttttccctaccaagacgagtgcttttatgcttaaccggtcaatatcgaaccctttactcttgtctctctgagctgcgagcaatacatccacaatatcagccttgtcgccgtctccatctttatgatcctgcacaattctctccaatagcttatcaaaaccattagcggtcttttccagtcgagcctccaaaccggtgacccaatcagtccacgcaagccacggtacataactcccgatagtaaacgtaccaagttgcctcatgagcctgtctattaactctttaaaatctgttccaacaccatatttccgtcccaaagctactctacatataacatcgttagttaaactcgacaagatcttgctaagatttaccggtttagaactcgatttacggatcttttccatcatcagagtgatctcttcttgtctcacgtcttgaaaggatcgtaccattttgttgctgaggagatggagaacactaacactcttcatttgtctccaatactctccataaggagctgaggccatattacggctcttgtaaaggagcttttcgaagatttttgaccgtggacggctagcaaaaacgcgatcatgcgtctttaaaacgtctcgagctgcttctgctgtagaggctacaataacggggacacttccgaagtgaaggagcatgagtggaccgtaacggtgactgagatagcatagtgatcggtgagcatgttgaccaagctgatgaaggtttccgatcatcggaagtctcggtggggatggacagttgatgcttatgctccctgtcttatgtttcttgaagccgagaatggtatgatgaccaatattaagcctaagaaaagtatcatgctcatattttgtaaactggattcctccg

SEQ ID NO: 17121 - DNA, 1022 bp, Arabidopsis thaliana landsberg
cagcaagcaatggtaacttcatcacacaatatccggctgatgcaaccgccctaatagagaacctagcttgcagtaacaccaagaatgttgactttcagaggaagaagattgctggagctgtttcaggcaatcaaatggcagaggttcatgccaagttagattcagttaatatattgcttacagggaagaagcatgtccactttgcaactgaggatgaaaccatttagcctaagactgagtcagaggagggcgtcttctacatagatggtcggggctacatgaagtttggacagccacacgacaacttcagtgtcaaaaggtttacagggaaccagagttcctcaaactacactccaaagctagccttccagaagacatttccttagagcaacttctagaggacttatggtaattcagcttaccaagctcccttccgcccctcattagagagcataatgaaatccatgctcgagcagattttttagagccaaacaaagctcgttgttgagtttaatggcaagttcgatgctgtctacacagatcttaataggaagattgacaatctgagctctcacatgaagaagctagatgtacatgtagctcaaactacacaatccattaagagacaagagggctttcttcctggaaaccctaatgctaacttgaggaagagctgtaatgccatcatgatcagagacggagatgaggtgtgggaagaagttgatactgaacaagagctagaaccgtatggaacactgttttcttaaacggttccttaggagggtgtcgatcgacacacatctagtgtcgatcgacactaggtccggacagcacattatgaagtgagaatcccattgctgcccaaatctgcctacactccgcatgttccttttccaaggaagcgtcgtcctaagcaggagattcatctactaagtgcacagccataataaaaaagatcctcacctcacctcctaaggatacttctaagacatcctctaccccactcaacagagtatgtcaag

SEQ ID NO: 17122 - DNA, 2944 bp, Arabidopsis thaliana landsberg
ctgtaccaatcaggcccaggagataaatggacttcgtctgtcccaaagatatacaagtacctttgtttctttctagaggcttctcaaattagctttcagaatctcccatttgctataatgacaataataccctcacaggctcgccgaatcaaagcgatcattttagcctcagcccgctcgtgcagcggtaaggctatttacgtaaattactaaaaaccccgaaagagagaattgtgaattctactatccatccaccaagcactctgtgtgcctctgcaaattaacaatttcctcagaacaattacatttcgattcgattcgattctcttatcttcttgatctctgtttgttcatctgtggtggatctccagatgttggtttcgagaattttgtcgcgagtaacccgcagcgcgggcatacgctcatctctatccgccgtcactcttccggcgaggaatctgactcctgttttctcgagccggtttcactccctagctcacgatttctcgcataaggttcgattttcactcaaattaatcactattcatgccgaaattgcaattcagggttttgttagggtttaaggctttccctcatttgagtttctagaaatgattgctatcttctgatactgtttccttgatctcttatgtttgaatcttcagatatatgaataagcaatagaagaatggtttagattctctataggtttttgctctgtatcatttcactgagtttaacccattttacttttttttttgggggcagcttgttccagctcagatgtctatgatggattcgtttgcactgcaaaggttcaatttttcttcctctacctcgcctgaatcagatgagaagaagacccacactgaggcctcaaagacaagtgaagagaaacctacagctgaggcaaaccaaccaggtcttgactctgaatctaaagattctgtgacagattctgcgaaaagaaagcggaaaggtgctaaaggagctgcatcttcatcttctgaatcagattctgagagtgatgatgatgaattgtcagccgatgatttggtgaagctcgtagctgagaaggaagagctactgtctgagaaggaagaagagattaagcagttgaaagacaaagttcttcgcacttatgctgagatggagaatgtcatggacagaacaagacgtgatgctgaaaacaccaaaaagtatgccgtacaggttagtctttaagaacttagtttgcagcttttgtttcatataatagttttctgaaatatatatgttcactatatatgtatgcagaattttgcaaagagcctattggatgtggcggataatcttggaagagcttcttcggttgtcaaagaaagcttctcaaagcttgacacctcagaagattctgctggagcagctccactattaaagacccttttagaaggagtggagatgactgagaaacagcttgctgaggtaaatatcgagaaatgtaattataagaccttaagtaagcaatgcagatgagaccggttaaacatgtgtgccgctgcaggtatttaagaaatttggtatggagaagtatgatcctataaacgagccatttgatccaaacagacataacgcagtgttccaagtccctgatgcttctaagccagaaggcacagttgctcatgtcttgaaggtaaatatataaagcttgctcaattctttgtctctttatttcatattgtatagtcttaaataccaattagtaatgatgggtgtcaatatgtgcagtctggatacacgctgtatgaccgagttataagaccagctgaggttggtgttacccagggaggagagaaccaagaagaaaagaaagagtctgatgcttaagaagaagtcagctggttttcataaattttgttacggttctatgtttccattaacatcttctcgagtcttcgagtcatagttttcttttgtggtttggttattcattagatgaacaagatctcccataagttgctggacatggcatttgcaggggaaatcctgcttctgtgtctgttttctctatctccatgctataattgaacgaggaaaatatcattttacatctcttctactcgcacactattaccaagtctctgtttgattagttaaatcagatacaaatcaaggttttacatggtctgatacaaccagaaactaaccatagagaaagaagctgaaaacagagtcacaaaacttgcactcactatttaaaacctcccttgcaacttatgttgaagaatgtctccgagcttttcataaagcattttctgctcctcgtgtcccaggctcctcgatatctgcaggtataatacaatcaattatttacaatgcctccgtattcttggcttatatgatgattcttacctggtctaggatcatctcgacactgtagtcccgattaacaatgaaagattggatgtagatgtatgcgaaaaccgccataaccatctgcatttaggcaacaagattcgtttaaaacgatgcaaagatcatattgcacttttcgacgttagtgactcttacttggcaatccattctgtcagtaaatcctccatgtcctggtatgctgtctccgaaatcctgtcaaagcgacataaactagtaaatatttgttcttggatctgtagatacaaaaccttttaatgtttgaaaaatgtgttaaccttgatcttgaaagctcttttgaaaccgcttgcgaagaagccaccaaaaggcgccataatggatgcgaatagaccgagagaaaaagcatgccattggacaggcagggtcgagatccctttccatggagactgttaagcaaagttcacaacggagctcagtttcaaaacaagacaacatcatcggctggttttcacgagaggacagttaattgcttacacatggagctatccaagagggaaatgggtcatactct

SEQ ID NO: 17123 - DNA, 1014 bp, Arabidopsis thaliana landsberg
agactcgatatgtttgtctccagccatgagatttgcacctgcaagtatgaatcttttatatattaaacaataccaaatgaaactaatccaatcatgaactacgctactatttaatactcactccgtcccaccaagatgaataagatgactcaacagaagatggtaatggaggttttaaggttactattgaaagtcacaggattccagagatgcatagtgaaacaggggaagctctagaggataaagaaatttcaggtgaatctggtgatgatggagaatcaaaatcaacgacgcacgagaatcatgatcacaacgacaaacatgagacttcaaaaatcagtgttaatgtctctctggttcttgtgttaagcataacacaaagacaggttggtagaccaaaatatcttggggattacgttttacttgctgaagaagaatgagagtttatgcttttgtgcttaaactatgaaccaagaaatttctagggacttcagaagtttagagccgggtctagtagaggacgttgtggatggcttcaaaattcatcaaggttcagcatttcttcctttgcggtgtctatggcagaagttggtgacgttgtagtgactttatcttcttggcatgcatggatttttatcttcaaaggccaccaacctctgtataccggtccggtgaagtctccatgcgttgtcattcagagagatctggaatggcaagggatgggatataccatagcgggtcagattactaggttaggatccgattacggtagaaccgtttgtcgaggtgatgagctttcagagcgcaaagtgactttagtcggaaactgaactcttccggcggtggttgttaactttcaaggcagcagagaagttgggacgctgagtcgctggcagcctgtttcagtccagtcactttccgttttggtttttttgtaatggatatgattgtaggcaaagctatttgcccattggggagatttatacaatatcttgtaaattcataagatatgaa

SEQ ID NO: 17124 - DNA, 1123 bp, Arabidopsis thaliana landsberg
aaaagcatgtcttttcaataatatggaagtcgcaaccatcaagtcgttggtggcagatagtaaatttggtgttaatgttgggttgcaaaacctgattgataagtccatcatttatgtcagatggggtcatgtggagatgcaccgtttgttacaagaaatgggcagaaaaattgttcgcattcagtccattggccatcctggagaacgagaatttctggtggatccaaatgatatacgttatgtactcaatgcatgcactgtaagtttttttagaaatatatttgatcctttcataactcaagatatgaggtttaagagatgtcatctgataaacgatgaattgtatgggtttgtcactttctcattaatatcatatttttcagggtactcaaaaggttttaggtatatcactggatacaaggaatattggtgaattggatgtacatgagagtgccttcaaagggatgtctaatctccgtttcttagaaattaagagttggaatgaagacggattgcatttcccaatctatcccttgcaagtttcgactatttgcctcatacactcaaactattgtgctggtccaaatttccaatgaggtgtatgccttatgattttcgtcctgaaaaccttgtcaagatcgaaatgcgggagagcaagctatataagctgtgggaaggagttgtggtaagttttgagaataatttcttatgttattattttggtttggggatgacaatagtgcacaagatgtataatttctgttgagctctatgtttgatttttgttggatacagccacttacatgtctaaagaaaatggatctgcacggatcatcaaacttgaaagcaattccagatctttccatggctactaatctcgagatacttaatcttgagttgtgccagagtttggtgaagctcccgtcctctatacgaaatctcaataaactgttgaacttggacatgctgggctgcgaaagtctggcaattcttccaacgggattcaacctcaaatctcttgaccgcctcaatttcaagcagtgctcaaagttgaagacttttcccaaattctcaaccaacatctcagttctcaatctctttggaacaaacattgaagaatacc

SEQ ID NO: 17125 - DNA, 1040 bp, Arabidopsis thaliana landsberg
tgagtaaaatacactgttatcaactcccccaagcttatttgttgcttgccctcaagcaaacaaaaaatcttaagttgaaggaaaagtttgaaggtgaggattcaaaaaccaaagcatgcatatagaacggggaagctcaatatctaggtagctaattctatgttgcaagatgatagacccttacttaaaaactttagccatgctcgtcacaatgcaacctaacaacctgccttaatatattcaagcattcacattgatatgtctataatttgcatgttttacacatccttttatcaccattttgagtctagtttcatccatctttcatagcattcgccatcatttttgtacattttgcatctttagtcgagtttaggactagtcttgcatacattctgcattttggagttgtttcaggtgttttggagctattggtgctcagaaagaggaaaaacagaacaggaagtcacacttcggccaacctactcgatcaccagtagcagagagggaagcagtcagctcagcagtccatctagacacttctactcgatcacagaggagacctggcagtccattctgcagttctactctatcgcagaggcgaccatgcagtccactttgccagtccaccagttatactcgatcgctgaggagaaaaaccagtccatcctgacagctgacacacttactcgatcacaaaggccaagaagcagcccagaccattctgtcaagcaacctaatcgaccaccacctcgaccctctgatcaatccgcactcaaccagataacctgagcatcagaaagagaagagaagagaaggcccattcgaagcccattcgaagcccattcgaagcccatcaggaagaccactttgaagccggcactcttgatcacgtcgtccatggaccgttaagtgggctcgaagcccgctttcttatcttagtataaataagtctctaagggtttcgccctgagacaagcactaaaagagacacgaattttgcactattattcagcaaccgcgtttcatgcctccaactt

SEQ ID NO: 17126 - DNA, 1708 bp, Arabidopsis thaliana landsberg
  unsure (1)..(1708): unsure at all n locations
tttgctctcttatttcattgtgtgcttgtttgcttccttatttttctatatctttagtgttcattatttgttacattgagcgtctgtcaagaaaaattgcattgtaacttacagaacctatcatatctataattgcattgtaacttctcttgtgctcttggagattcatcaaattggaatctgagttctttacactctactctgacttttggcgttgtttnnnnnnnnnnnnnnnnnnnnnnnnnnnnnnnnnnnnnnnnnnnntccgcaaacttgaagagagggctcaagggagaactaaagaagcagcaaaatgttgttggaaacgtgtgaactaataatttatttttttcatgaaaacccaataaagagagactactattggacactgcaaaataaaaaaaatttaacagaatctctcatctcatcaatttgaaaaatttattcttaaaaaaatggtgagagcccatgagtggctatcacattgggcgacgcttcatggagaactgcctccgagcctaaacgccttgaccacgatggaggatgaagatttgggagtgtgtgattttttttcctctggggaaataaagctggtccgcaaactccctgaatatgccaagcttttggccctggcgtccctggagtactgataggggataccaactgagaacagaggccaaacgtgggacaatagtcaagctgaggcctgaggtgcaagtaagaaggtcaacttgtccaaggtatcaaaacaagaagttttggattagtgcagtcaacactttgtaaattcatctttggtttcctaacatcatcagtgttttgagtttagtcatttgtgcgaaaattagtaacattaacattttataactcataaccttgtattggatcatgatgtgatgactactgacagaaaaaaatttagcagataaaatgtgagggaacaaaaagtcgggtaaaattctaatttgttttcgtcagcttcagtaaaattagaatagcacacccggtgggactcgaacccacaatcgcttgattagaagtcaaacgccttatccattaggccacgggtgctttttgtttactgaatcaaacacaaactatttctcaaagataatacagtcatagtgggcacgtcattattacccgtccgatgagatgggttaaactaggccgtcgtgttataatgtcaagggcgttgtcttcccgcttaaacttggagctcggcaataagctgaagggtttggtgtcggaccaattctacgatgaagcattgagactgtacaagctaaagattcattctttagggaccaatggcttcacagctattcttccttctgtcatcaaagcttgcgcttttcaacaagagcctttcttacttggcgcacagcttcattgcctttgtctcaaagcaggtgcagattgtgatacagttgtttccaattctctcatctctatgtatgcgaaattctcgagaaaatatgctgtacgtaaggtattcgatgaaatgcttcacagagatacagttagctattgttccatcatcaatagttgttgccaggatgggttgttgtatgaagcgatgaagttgattaaggagatgtatttttatggttttattcccaagtccgagctggatgagtctctaaaggctctctgcactcgcatgggaagcagcagtaaggtagcaagaatgtttcatgctcttgtt

SEQ ID NO: 17127 - DNA, 1799 bp, Arabidopsis thaliana landsberg
tgtttcactttccataatcgccacatgatccataagggcaactgtctcatatgagatgttcgtgctgaggtgttgatattaaagatggcgcgaattttatcgtcccatggagcagtttggtcaagaaagatgggatttgggattcccgagcctctccatatgacttgagcgtaatggcagcggaagaagagatgattgaccgtttcgtcctctctgcaacatctcacacatttagcatcattataatatgtcgatacctcaaagttgcactagtaggaagagaagtagatagaagccgcgagaagaagtgtttgatttttggagcagtttttaattttcttagtctttgtttcaagagaacgtttccaggtggtggagtcacttgttcttcagcatgagtatgagttgctaaccaatagcccgacttaacagtgtagaaaccttgtcttgtgtaatgccagcctaaaaggtcttcagttgccgttgaacagagcttgatttggagaatcgaatcaatatcttgtggagcgatccagttgtttaacttgtcaatatcccagcccgagcgagtgtgattcatcaagtctctcaccatcacctgctgaggagcattgaccgttttaatcggaggtctagggggatgcattggtaaccatgggtccagccaagcgtcgacgattgtgccatcacctatacagaatcgaagctctttcctgactaaatctctaccatgtaggatggatttccaaataaaagaggccttcttcccttggactgcatttaggatatttgaatcatggaaatatcgccctttaagaagttttgccattagactctctggatattgaagcattcgccacgtttgcttgtcaagtaatactaaattaaaactttcaagatccctaaaaccaagaccaccctcctgttttggcaaagcaagacgatcccaagcaaaccagtgcataccgtgattttcagcgtctgaaccccactagaattttgctagtactccactaatctcattgcaaatctcttttgttagcttgtacacattcatggagtagattggcatagctaaagccactgctttgagtagtacctcttttccagcttgtgacagatatttcttgctccaaccttgagttttttttttactttctcaacaatataccgaaacatctcagatttcttcttatcaaactgttctggtagccccaagtattttccgccacctccctcattgtgtattcccaggagatttctcattcttcgctttgtgtcattgctaacatttttgccaaaggtaatagctgattttcgcaaattgactgcttgacccgaagcttcctcgtaactacgtagaactgttttaattgcatggcatgacctatgatttgccatagtaaaaaatagagaatcatcagcaaagagaagatgagagatagatggacctcttgtggatagttttatccctttaagctgcttgttgatctcggcttggttcatcatgtgagagagaacttcagcacaaagtatgaatatatagggagataatggaccgccttgccggattccacgagtggtgttgatgtgaccatgcggagaaccatttattagtaccgaaaagctgactcgtggagatacactccattatccaagcgatccatgttgagttgaaacccatatgtgtcatagctgttttgcataagctacaatccaaacggtcgtaggcttttgtgatgactgcttttagagccatgtaagaatttgcttgacgctttcttgattttcgggagtcg

SEQ ID NO: 17128 - DNA, 976 bp, Arabidopsis thaliana landsberg
aaccacacccttttattagatatacaaactgtatttataggtttacatgacacactttgactaagggacacgtctctagaagacaacctaatgtagagacacatacactcatgtaactgttttgtagttaacaattatattcgtatctcttcgatgtgtgatacgaatatacataaactagttacttaactatataatatatctcttctaaaataagatgatgacttgatcacttccaacaagtttctgactctccgccacccaatttggtcgagtccccgaccttccaaaatgaccactcatttccaagcctctgacctccaaaaccgtagatctgaaaatcttttagaaacaaacaatcgttaatccggtttgatggatacaaaaaaaaggcggctagtgaagggtgatagctcagacaacccctcagcaaccggattccgcataagccatcacagatccaaaacaggatatgctgttaacatctaacacccactggaaacacaccaatccacagcgtcttctgccgcagctacagcgtctttcgagcagtgttagtttataattgagtttgatcatgtatttaattagatatgcgtaagtagagcaaaacatgagatgttataaccgttactttaatacagcaaacttctgattctttgtaaatcctcttttattaactcaaaaacctctgattacaaagatgatcgaatcgatgttcataaaacacccaaacgatccactagatctcgatgtgagatttctagccacaaaatgttctcagagattttaaggaattacagatattcgataaaagtaaaggaatgagctaaaacagtgctcatatagtcggctaacggcatctttcagtccctcactctgcagatgacacgtgctcgcctcttattctttcccaattcccacttgatgtcgaacgtgactactcacacgtgtggttttgtatcatacttgttag

SEQ ID NO: 17129 - DNA, 2959 bp, Arabidopsis thaliana landsberg
cataatccgttagattcctttaagagtattagtttaccttttctaaatttatccctttcagatttgtactagttggcgccgacactgtgcgtaggaatggaatttttatcaaataaactagttaagataaaatatattttttcattatattcttaagaaagaatttgaaccacttacaaaaaaaaagctataaataaacacgaatcatttaaaaaaaaaaaataattaattaaaaatatcctcattaagtttttaattgattataactaataactaagtttttatttcatctgaaatgtattaaaaatcgttaacaatttttaaatgtttatcctgaattttaaataatttttaaaataacttctttaattgttttgatttttaaccaaaagatgtgcctttgatcaaatggttaagttcatttaactctgcaattttcgttggagttcaactccattaaatcgtatgtgtagtaggaataaattttgcatcaaactttgttgatttggccgaatgcataaattgaatctatacatgtatttaattgttaataatattgatcatcataaatgttattatagaaagagtgttttcataattatttatgcgtaaaatattgtttacgatgcaaaaatatcttttgtagtgagaggtactttagattgactatatcaactttcattttgagagattactgtatatcaacttttatatcaaaactgactttccaattgaaattaaatataaatatatatatatatatatatatatatatttatatttatatattttttgagccgtgggtttatttttaacccctcttagtcttcaaaaactgaattggcgaccgattgttttatttttggcacaaatgcacaatctaatatgggattaagacttaaaacatacaagtgttatgttaacaatcccctctcttcttctaggaagataattttctgtctgaacattctctgaaaaaggataatgagtaataatatttttgagaaaacatattaaattattatagcggtatgtgttagtgtcggatcccgcaccggtggtccaggaccaatcaaagattaccacgtagatatgaaagaaacccataaaggacaaggcccatgagaacctcgggttgagagggaggatatgggcgaggtggctatgctgcgaggtgaaggcaaaggcgaagttaaggacaattcggtttgaacctttttgggccgaaaggcgaagcccacgaaatccagagttaattcaaattcgaacgtttaaacattaaacccgaagactgaaacgaatacatttaagaaagaattattgtgtataattaagattaaatataatattcgagtataagtaataggggccgagagttatgtaggacacacgcaattttctagcaaacttactatagtcatccaaatatcaatttacagctttttacacttagatttttgtcctcaaaaataatctttcttgttagataaataaatatttgattgtgtgaatccaacatctactgtacgtaatagtcttaaagtaacagggcagttaaaataaaattatttatcctatgaaatatctaattgcattgtacaacggtttgtttgtttatttgttttttttttttttgttttttttttaatttagtgtacaacgtttacaatatccttcctaatgatgatcttatattcaccaagaaaaactctaatctcctgcaaattttggaaattcatcgaacagattcgtaaatgactgcacaaaggacaaatacattcgtatcacaaaatctacaactgattgttttcgctatagcacgtctttttttttttgacacaacgctatagcacgtctaccgtgataagttttactcttaagacatggaaccactatgcatatgaaaagataactacgaagaacctacgaatagacttataatacatttattataaagtatagacactcgtaatcatttttatttatgtttgaaataaatggatagtatatagatcgtccccagtcaaattcgtctatgctataggaataaatttcttctacaaaactgagatctgacattttttgtctacgggaggagggttgacttgtctatttcaacttttcattcttgagaaaactaaaaccagagagagagagagagagcttccgatggggagcgtctccgggttcaaatcagacggtaagccatcccaagagcaagttttcataaacttccggggagtggaactgcgctacaactttgttagtcatctcgagaaggaattaaaaaggaatgggatcaatgccttcatagacacagatgaagatatgggccaagagttgaatgttctgctcaagagaatcgaaggatcaaagatcgcgctagcaatattctccccgaggtatacagagtcagactggtgtctgaaggagctggctaaaatgatggaatgcaaggagcaaggcaagctcgtggtgattccaatcttttacaaggttgagccttccactgttaaaagacaggaaggccagttcggtgacgaattcagggatctggtaaagtacattgataaggagacgaagaacaaatggaaaaaagctttagagtccactcccctcttaataggactcttggtaaacgagaataggtaatacttataattcatatacttgagatctcaaaaagtagacctagctcgaaccatctaacttttctttgttggcagcaatgagagtgaaatcatctccagaatcgtcgacgaggttaagaaagccctgagaaaaatttcaagggcatctctcaacaatccaccagaagtgaccgcactttccccgacaatacaacagaaaaaacttgaaagctcttgcggaattgatatacgtctaaagcagctagaagaaatgttaggctttgaggaaaaaactcgtacagttggtgttgttgggatgctgggatggt

SEQ ID NO: 17130 - DNA, 2416 bp, Arabidopsis thaliana landsberg
ataattttttttctccaaagaatctaatacagaatctacccaaaagaaattaaaagaaaatttatgattttgagtgtctaatggaaaaagaaacagcaaaataaagaaaaattaactggaaattgaattatctaaaaaaagaaaaatcaagcaaagaagaagaagagaatcaaagagaagtaaaaatgaaaagaaaagaaacgtacaaggagaaaaaaggtttccattattgttgactgcttgagaaaaaaaggttaaacgtttctctcgcgtcatttcaattccattttctctacttttgttcttctgttagggagcgagagattagatagtcaaaatcaaatcgacatggattaagcacttagcagcttcttcaaggtccgattcatctcgaaacggtccccgattctactcgatcggaggagtagttgttgttgtggtagggtttacccattttggagcgcaatggagaatccacctacggaggagctgctgaagaagatacttgagctagaggagagtcaggagcatctcaagcaggagatgtctaggcttaaggtatctacggagcttagacagcgatcgcattcggtgtctcctcatcgtccggcgaggagaaacatcggagagggagctccgtcttggaggaaaagcggtgccgcctcgtttcgtaacgcgtcgccgttgcggaaggagagccgtatccagaattcgatgagattgaggtctgaagttggtggcgggggaccatctgctgggaaattcactgataaacagtatttgaatattttgcagtcgatggcacaagctgttcatgccttcgatcttaatatgcggattatcttttggttagtagttccatcttgtgaatgcagtttatgctagattctaattagggagtaagatgtgatgtcattgatttgcattctagttttgcattttttgaatttgttattccttcagattccaattcgattacttaattgtttcaggaatgctatggcggaaaaggtttatgggtactctgcagcagaagcacttggggagaaccctattaatgttattgcagatgatcgggacgctgcctttgcaatgaatattgctcgacgttgtgtccgtggagagagctggactggtgagtttcctgttaagagcaaatcaggggatagattttcagctgtcactacctgttcccctttctatgatgatgatggtgctcttatggggatcatttgtatcaccagtaacacggcaccgtatctgaacccaagaatctctttggctaaattgaaggcgcaagaagaaggtgaaacgagctctatccctgcaaggaatagttttgcctctaaacttggcttggattccagaggagctgttatatcgaaacttggccttgactctgatcagcctatacaagttgctatagcatcaaagatctcagatttggttagttcaattgtaggttgcatatcctcaccttttatcttactgttacacattgtgaccagtgttaaaattgcaggcatccaaggtcagcaacaaggtcaggtcgaaaatgcgagcaggtgataatagtgccacactctcggagggtggcagtggggatagtcatcagtctgatcataatgtcttcgatgctgctttctctgaccagagggaagatgcagcatcaagtggtgccagcacaccaagaggggattttatccagtctccttttggtgtattcacatgtaacgatgataagtcttcttcaaaagcctccggagaatccaatgatgaaaatgatagaaactctgttgtccctaagaaacttacctcaaagactgaagagtggatggtaaagaaaggactgtcatggccatggaaaggaaatgagcgggaaggtttggaaagaagaaatgctcattctgtgtggccttgggtgcataatgaacaacaaaaagaagaggctcatcatagtaattcctataacagtgttaagtctgaaagcctggcaagtgaaagtaataaacctgccaataatgagaatatgggttctgttaatgtgaatagcgcaagcagtgctagcagctgtggaagtaccagcagcagtgttatgaacaaggttgacatggatagcgactgcttagactatgaaatcttatgggaggatttgacaattggagaacaaatcgggcaaggtgatgtactcctttgagaaagatgaaccattttgcgaaaaaatccatccttgaagatatcttacgtatttatgtggttttcttatctctgttctgctaagattttaagacagtttcccttttctgtacatacaggttcatgtggaactgtctatcacggtctatggtttggatccgtacgtttttgccttctattgatcttgtagaatatgcatcatcgatttttacaagcctct

SEQ ID NO: 17131 - DNA, 1000 bp, Arabidopsis thaliana landsberg
  unsure (1)..(1000): unsure at all n locations
tcatggaaactagaggaacatttgattccattccagatgatctcgttgtggagatagcattgagattgtcttcaaagtcaatcgctcggtgtcgttgcgtgtcgaagctatgggcgtccatactttaccgtcaagatttcaccgagttgttcataacgaagtcatccgctcgtccacgtcttttatttgcggtcttaaaagcaagtggtttgatattctactcttcgcctcagtctcagaatccgtcccttgaagtagattttcataatcatatgaagttccatgaagacatgaacctatacatgtgtagctatgtctctggtttgttccatatccctgtccataatatttggacctcaaaggcttcagtttgtgtgatatttaaccctatcacaggacgctatgttagcttacctgaacaaatggctacaaaacgtcaagaagctttttagggtttgatccgattggcaagcaacataaggttttgtgcatgaacaagagactcaataaagaatgggttcattatattctgacattaggaactgaaaatttgaagtggaggaagatgatatgtcccttaacccatgaaccttattatggtagagccttatccatcaatggggttttgtattactttgctaggacatcgtgttttctagtagtttcctttaatgttaggtctgagaaattcaagtttcttgatnnnnnnnnnnnnnnnnnnnnnnnnnnnnnnnnnnnnnnnnnnnngggtaaattaggtgtgactaaattggagtgtgatgctggttatggacatccccgcgagttgtgtgtgtgggttctagaggatgttgagaaccaggaatggtcacagtatatctactccttgccgaagattaaggtcaatcggattagaaacgataatatcttcgttgttgggatgattgctacaggtgaaattgttttctcggggtactatacatcaacatctgaaccgtttatgttttctacttcaatcccg

SEQ ID NO: 17132 - DNA, 1008 bp, Arabidopsis thaliana landsberg
gtccatgtattttcacctcggtcctgtagtcctctctcataagctcaggatactgttaagagccaaaaaaatggatagacaaatgaggtcaaatatcccaaataaccaaaaaactgcaaccaagctcacggtctaacagagaacacacaagacctaccgtccaattaagacaataagcattaacttcatcagattgaaacaaaggcttatgtagttggactctagcaacatcaggtcaacaagcaaacaagaaacaccgatgtgtccaattatacagattcatatgatttaatgattttgcaataaccactaaccttgtaatcttgattggttttttactcgagatggcagtaatttgttctatctacagaataacatggctgctgcccggcataaaagttaggtaatgaaccaactagcaagccttgggaaaaactgatacaaaaaggtttgaggagcttacggtcgaggaagatgaatctctgttaggagcaacgatctagctttgttaacgttagtgaaccaaaggcaaatatgatcctcaagatccttgagttgatgggtgagggggaggtggctcttgcgaagcagtttcagaatctcttgaattgaatgcacgtccctccccctctctaatccaagtcgaattaaaaacttgtcgtattcaattccagtgtgcaaacgggagacaagacggtcaatggtatcaagatctttgttgagcacaaaagtacccttggaagcagcattgagctgacaaatgttagttaactcctttctcttgaaactgtgagggaggtaaggactgcacaagggacctgcaacaacaagaaggatgggaagtgcatgagaggcaataacaactgcagaagcagcaaccgcaacaacagcagcaacaagacataaggaagaaccagctgtggcatggtggatgaggcggacccgtgacctagacttgcgaagacgtctgtccagattatgcttcagctgggagaagcatatggggtg

SEQ ID NO: 17133 - DNA, 2301 bp, Arabidopsis thaliana landsberg
attattcataagtctattatattaatatacttatcggatgctgttttgtcttgttttgcagattcctattgcttcaatcatatgtcctgattatgtgttggatctggcggattatttgtcttggtctgatgatgaggaggatgagagggttgaagatcttctcatgttggtaaacgagggtttgattttcaagaacgacatatttgagagtggatgtttcccatcgcagttgcaattgacatctaaaaagcaaaagcgtggtgctaaatctaatgtttctcggaataggaaagcaaccaaactatctaagaaccatagtggggttctgtaaaaaactcaaagacacatccctgaggaggttgggagttctagggctgtttctatggacgctattcctcgtttgttggatgcgaagcttgaaactcatgggaaaacaatcatttccgcggtgacagattgatttaccaaaaacactataatagaaggtgaccactcgaaggatcctgatagtgggttaatcgtccgaaagagactgttcctactggtaatgtcagtgcatcaaatcctggtgatttggggtctaatgcaactaaggttgaatttggttttaatcctctccgaaccaattcacgttctcattgccctgaaagaacttctaatgttgaggcaagtgtggatgaaattttatctttctataattataaggtctcaagtagtgctggttacaaggaggcggaggtaatatctcgttctctaatctgttaaggttcctgctggttgattaattttttccttatttccttcttttctgtcgcggtgtagcctgaagaagttattcctatggatgaagatattcgatctttgggcgacggtgtccatgattcccaagtgagatatttccgaaaaatacggctcatcgtagctaaccatcatagtattcttattcctgtaagttagttgtcaaggactacatgttttgtttcaggttaacaaataatttggtaatggatttggtagggtgataacaatgtagcgtccgatgctattccaccaccacaggctgtttccgaagataacacctaggttagcagatatttttattatgggttaacaattatcatattgattcaacattgtatctgattagtttagtttaaactcgtatacatgtgtcactagtataccttttttgcgtttttttcgtgttaacaaataatttctgtaattgggttgttagggtgataacaatttatcgatgggttgttagggtgataacaatttatcgattggtgctagtccatcaccaaaggttgtttctgaagttaacgcacaggttagcagatagtttgattatgggttaataaatatcataatgtgtcacattttttctccatttgtcacgattttttgtaattgctgtaattgtcggtaggtctctaacggcgacgccgtcgaggatgacctctcccccggacgggatgttaatgtggaagcggatgttaacgaggttagattattaatcaaatattggtttctatttttttctcctccagatctggtgagttttgtcatcgttgtgttagcgttgtttgtaactttatttttttattttttttatttaaagcggcatgatattagccctgtaactggagcagtcacttctcccaaactttcgggcgataatgtggaggttagctgttatccatattatcgaaatcattatacttttatcgtattaagttagttgtgttaccgttacatgtttttagtataattttaagtgcccttcaaaatggtaattccaggtccagtcctctcagctgacaacaaccaatgtggataccttggcaaatgaagtagaggttagcaaggtattatatctatttttttcaagccagattctccatattggtagtttcaaataatcttttttcttttttaatttaagcggcctgagaatacaccagccaatctagcagtttcatctcctaatcatttggttgataatgaagaggttagcagttattcgttagcggaataattgtcatcttattgatataatttagttattaactgtttcttgttctagtttcagtgctcccagcaggcagcacacgatgtggaccctttgggtaatgaatgcgaagaaagccaggtattagatccttttatattatcctagtcgggttgactagttttcaaatttttttgtatatttgacctcattctatcgaattttcgttctgtagggtgtcaaagtggaaagcgtcgattcggttagcaacgagacgtctgcggagt

SEQ ID NO: 17134 - DNA, 2806 bp, Arabidopsis thaliana landsberg
gaaacgacgagccaggagagacattaatcttgaccttattgataataactcgccaaagcgccatttcggaatcaaatgtcttatccttaagcatatgcctcaaatccatcaaaacgaataaacccgcgttgcttctcaagcaagaaatccccatctcttcaagcccttccgtgaacatatggtgtctcttcgctactcttttcgaaacctcaacaagaaagttatcgacaaaactctgatcagacaacatagcagctagaaaactttgtgtctgcgacgagaccaatccaaaactcgacatcctccttgcgcaggacacaacaacatcgttgtaagagtaaaccactccaacccggaaaccgggaagacccatgtcctttgaaagactgtagacgatatgaatcagatcacggttaacataatacatctcttggatgatctctgcaacactgatgaatcccggttccgcaaaaaccgttgctgcgtatatttcgtcgcatactaagtgaatttgcttgtcgttgatgaagctgacaaggctttcaagagtttctcgatcgagagatgttccaagagggtttgatgggtttgagatgatcaggcctttgatcttgataccggtttcttgggccttaaggtacgctgattctagggcttgttttgtaacctggaaattgtttgagctgctacactccaagggattattctaactccagttctccaccttaagtctctatcgaatctggaatttttagtaaacccagtataattagtactgaagagagcaagtcaagcaagtgttaattaatggtttgacttttgtgaagagtcaatcgacaatttgatcatagttgtaacttgtgtggacggggttgcttaccaaattaaaatattgaatcaatcaaatgaggtatatttcacaaataattctgaaaagtgaaaacccattatcaaaagagtcttttgttttttgacctatgtaattatgaaatcattagaacttttgcccttttcgattacttttattttaatatagtataatgtttacttattctatttcataacatcaaaatccctaattaatgtgtctttttaattattaatgaccaaaataatatttatttgaatactagtaaagtgtgtatatatacgtacgcagcataataaggagtagggacgagaaaagcgtcgccgggatcagcaagacagaacatgatcgtctcatttgctccggtggctcctccgctcatcaccaccctctccgcctcaaacctcacccgcccgcctctcgctctctccataaacgtcgcaatcgcctgtttattttccgtccccaaacaaaacattatttgaaagcaaattatagttctagaaatatacaaatctcaaattcctaagattataatatactcaattcataatcttacataaatgtaaggtgtataattactaccaaacaagagtacgtgaatgagcataaaaatacttgatactgtaacatatataagtatataataatttaatagatactgtataataataaaaaaaccttataagaaatgagataaatacctgtctaaattgtttgagaccgtgataatcttgaaaaacagcaatgtcggagaaagagtcaattccctccgccgtacaaatagatgcctgtggattttcctttatccattctttgatcaaatctgaacaaagctgaaagcaaatcacaataaaataaactaaattaaaaaacttattagaagaagaaaaagtataacgaactcattaggatgtaactaataagaagacgaacttgattttcggcgagacccatttgaataactccttgtggattatgagttggatgaaaaggattattgtcgtaagctttccagccatgggaagtacggcgaagcttctccatgtttgtcactcaaagctaatttgataggaagttgattctcacatgcaccctgagacatttatccgttccagtaattgaacaatgtgtgtgatttttgtgaatttaaaggattaatttacttgtgagttgtatatgtaatgatgggagcattcgaggattatttatagtgggatattgagagcgagcatatgaaagaaacttgtttccgttatgaggaaacttaactgaaattttctgttttctataaaactagtagtattaattttgcgtgaagtcaaacctacggccaaagcccaaaatgtttgtagtctttttttttcttcatctatgccaattataacattttttttttacaacggaactgttatatggccaaaaaaaagtcttattaatatttatgagtatctataatcaacaaatgaacaaacatttaatttctgtaactaaaaattatagttttgatataaaaataaataagaattaatgatgataaacaactgtagatttttttagacacacctgtaccatgcagatggtacatttgaaaatttaagaactttatatactatgaaaaacattgtaagacaaagtatactttgtgttaaaaatacagtcgcgacttggtatcacggtaataactaagtactaattacattaaaaagactttgtgtttcattaattttagttaaacaattagatcaagcaagaggttttacagacaaaaacaaattaaaagtcgagagtgttttaaagattcaacggagtaacaaattaacaagttcaagtcttacgaactctattattagacccacgttgatataagattcggggggagatgtttaccatgacttggtgttttacctttttcaaatcatatgttttaagttttaa

SEQ ID NO: 17135 - DNA, 1156 bp, Arabidopsis thaliana landsberg
  unsure (1)..(1156): unsure at all n locations
gcccggcctccctggcggcgccgtccctgccccggcccctgcgcgtggcactccgccgctccgccccatcggctcgaccggtcgtggtggcccggcgaccgcccgcagacgcgtagccccgttccctgccagcccccgcccccctggccggttcaacagcacccctggcaggttcaactgccccggccccggctcggccgcccgttcccccgtcccggcctcgcccgaccgtatcttcgctcgcccgcgctcgcggtgattatttgttaattagcgtgttgcgtcgcgcgcttcgccgcgcggnagtgttctctaaattcagattctatcttgtgttgcgtcgcgcgcttcgtcgcgcgacgaatttgtttaatttcaggttctattaatgcgctgtatcgcgcgcttcgtcgcgcgacgatnctcnnagtttatattcattaaagtgttgtgtcgcgcgcttcgacgcacgacgatctattttaacttcaggttgtttaaggtgcgatgtcgtgcgtccagacgcgcgacgttccactctaaactcagctctgttggcatatgtcgtcgtgcgcttcgtcgcgcgatgcttaacgtctctttataattaacgcaagtgtctcgttgtgcgtctgtcgcgcgacgagtcgttgatttcttaattcaatctaaatgttatgtcgtacgtctcgccgtgcgaccactccctttcattcatcttcaattgtttataatgattaaatgtggaacttgactttactttatgctaaaatgtagtgtccaaattaattcccttctattaagcgagtggtttaatctataataatgtaatgtgatcgtttctcgactgtctttttttctctttctctcttaaccttaattgcgagcccgcgtggaacgtctgtttatttactgcattctattgtatggtgtactattcttttgtattaaatgtgtggatgtatatatgtttgcgtctgcatagagaacgatccggttgaagagcccgaagaactcgcaggtgaagcccctgagcagcagtcggttggtggaggcaagtgtcccttgacctatctctgtcctatacattctttaattcacctcccgcatttcacagttatacctaaggattgactagcttttgttatctatgtcc

SEQ ID NO: 17136 - DNA, 2516 bp, Arabidopsis thaliana landsberg
  unsure (1)..(2516): unsure at all n locations
tgttcagattctgtattgtgggactaaatttgtgagcagtggagaaactgaatggatcaaaacagtccctgagcttcttaagagcaattgttctgctaaagcagatgattcaaagtttaactatgggatatacggtcaggctatatcttcaggcattgtatcatcaacaacatttttctccaagttctgttattgtctatggtggggtcttcaaaatctcaggtaaggcgggggcaactcattgtcattggttcaaccgatagcttgtgcagagtactcttgacatctttggtgttttcatgaacagcacgttaggtcaagggctgcagacaagtacatttccaggagaggttttgttttccattgcgattgctatagctgggcttcttcttttcgcgcttctcatcgggaatatgcagacttatcttcagtcacttactgttcgtctcgaggaaatgaggatcaaaagacgtgactcagaacagtggatgcatcacaggtcacttccacaaaatttgagggaaagagtcagacgctatgatcaatacaaatggttagagacaagaggtgtagacgaagaaaacatagttcagagtttacctaaggatctcagaagagacatcaaacgccatctctgtctgaatttagttaggagggtaagttttcacaatcagaatgctaaaattgcttgagatactaactaactatgtgttttgtttctacaggttcctctgtttgctaatatggatgaaagattacttgacgcaatctgtgagagattaaagccgagtctttacacggaaagcacttacattgtgcgtgaaggagaccccgttaacgaaatgatgttcataatccgaggccggttagaaagtgtaacaacagatgggggaagaagcggtttcttcaacagagggttgttaaaagaaggagacttttgtggtgaagagcttctgacatgggctcttgaccctaaagcaggctcaaacttaccttcttccacaagaacagtgaaggctctgactgaagtagaggctttcgctcttgaagctgaagagctgaagtttgtagcaagtcagtttaggagacttcatagtcgacaggttcaacaaacatttaggttttactctcagcaatggagaacttgggcttcttgcttcatccaagctgcttggcgtcgctattcaagaaggaaaaacgctgaattgagacggattgaagaaaaagaagaagaattgggttatgaagatgaatatgatgatgagagtgacaagaggcctatggttatcacaagaagtgagtcttcttctagactgcgttcaacgatatttgcatcaagatttgctgctaatgcattgaaagggcacagacttaggagctcagagagttcaaagaccttgatttatctgcaaaagcctccggaacgggattttggtgctgaataatccaattcttgatgagaggccaacatcagaacagagactacataactgatttatacacataaatgctctatatatagaacttgtttcagaaactgtaaagttatctacacgagagccaatgatccttcaaagacctgcattgcatttttaacagttccaatgtcgatatctgctagttttccagtcttcgaagcaataattacacagttactcttctcttctgcatacggtacaaagagcttccctttctcttctgaagagaacaacccaatactggaagaaaaagaagcacacacatgttagttcttgaaaacattgaatcagtactctttatattactcaggtattcaccatggtttgtctcgcgcattagctagttgaatcgcagctgtgtttgttgcgatgactccagcagaatcgtttatcagagcagccaactaagtaagctcaagaaaaggaatcaaagtaagatcagtgaattcaactttgttcataacaaatacagacagataagcatgcatacctgtcctggtgttgtgatgaacactatagatgtatcatcacccacaaaatcttcaacgttttctctttctttctcatgtggaatcacaaagaccggcttgaatcccctggcattgttcacaatcatatctcagagaatttcaaactaagcaaaaaattcacattttgaaggtgtgtaataattaccttacaccctttataatcttagcccatttttcaagtgaaagtaaactatcatcatctccttttgattgcattgatgccttagaatctgattcaataccatgaatcactataaacttccccgtcactgctccagcattcctatactttgcagccacaacctctttcactttccgtgaaatcgataccctaagtggcaacagaggagtccttggaacactcctaaacggtcttcctaaccaatcttccatctgagtatacctgaaaccatcaacagtcaatttagacaggcgataaaaaaacctgcagtttcttcggnttcaaggaactcacatgctataacctaattctgaaaagttggtattt

SEQ ID NO: 17137 - DNA, 3210 bp, Arabidopsis thaliana landsberg
  unsure (1)..(3210): unsure at all n locations
tgtatttccttcatcacttctagccacttgtctgagaacatgtgtaacaagataccacgaccagtgttctcccatacatcctagagaaagggcattggaagaataaatgttcccgcgtttctacagggtgtttcaaaacacacagcttgtatctacattcagtttccaattcaccattcgttcccctgtcgccactctatttttcataacccatgagataaatgtgtaccttggggtagccccagaaaaccaaatcactttgtgtccattcctctcagctttaggtaagcgaatttgcgaccatgtctctctagagctaaactgtttcctgtagcagtcatttttccctttccataatgctgcatccggttctgtttccaaacggtgttgtctnnnnnnnnnnnnnnnnnnnnnnnnnnnnnncagaaaatctcgtcgatggtggctgcttctggttctgttcatcacttcacaaagctttctctctagcggaatctccatgtcaatgcagcccctatctcctagtttctcatgatggcgacacggaatactttagattccttgatgtataatttgaattgaagtatgaaatgtcaaaatacagaataagcatctcggtaccattagagcatctcgatctcatctatctcaggatgttaaaacgaattaattaatcattcttccaagccatttaatttgaacagctttaaacaaataagtttagttatgtgatttgagtagttgtacaagagaatgtttataattcaatgaaagagtttccgaaacaatgaaatgagtaatgagaagcgaacttagtgcaagagcacgaaagagttaactcacgacaatttaacaagacaatagtcaaagagttcataagattattttaggcaagacttaatttcaggagctagtgtggtatatttaaggcacttaagaaaacaagtataagttcagagagaatggggtgtaaaaaaaaagaagaatttagttcgagactatagaatatgtggtgctctaaactacattattcagatgggttttagcattttattttctgatgagcacatggattgcttcattggctctaccggaaaaaccataagcagggatgacatatacctgataggtgtatcaaagacttcaacgtttaattaagaacagatacgacgttctcagtctgaaaggtttcggctaatagattctgaagcccacgattggcttgaggtgtaggctcgtagttaatagattcggaagcccaagattggcccagcttagttcgtttagggtttttcctttgtatcttcaattgattatatatctttttttccttagatcgtaagaaatcagaggaaaaggaaaatagggttntgaaggtgaaaacaaaaacccaacaatggcgacgatgatctctaatcttccaagggatttgatggaagagattttgtctagggttcccttgaaatctatgcgagcggtgcgattaacttgcaaaaattggcacactttatccataaccataagtgagagtttagcgaagatgtacattagtaaaacaacaagagaatcaagagaaggggagtctacgataatcacgttgatgaattacaaactttgtttaacgagtctcgtcgtcgacgttgacccatatatagagcacaaaggtaaactaacttgctttaatcttgagcatcaagtcaagatatctcaagtcttttactatgagggtttattttttatgcgtattgaaagacgatacaattactactaggcttgtggtttggaatccgtattgggggcaaacaaggcagatcaaaacccgatattctcaccacgcattctccggaagggatagtacgtacatgttcaattactctctcggatacgagaataagaattcatgtcgcagccacaaattattgaggtttatagattatcattggaattatcgcggcctacaccaatttttttggtatgaaatttacgattttgactcggatttatggacaactcttgatgtcactccacactggtttatagctatttctcaaagtggtgtttccctcaagggaaacacatactggtgtgctaggaagaggagcggcggttatagcgatcacattatttgttttgattttactagagagagatttggaccgcttttgcctttgccgtttagctttattgatcgtcatcattcatgtgtgattttatcttgtgttagtgaagagaagcttgcagttttatttcagtacaaggaccactactataaaaatgtagttgaaatatggattacagctaagcttgaggccgaaatggtgtcgtggagcaagttcttgagaataaatacggggccaattatacacacgagtttcttcattaacgaggaaaagaaagtcgccatcgggtttaatgacaatcgcaaaacaatcaacatcattggcgaggcggggtactttagagaattggatcttggagaacatgcagaaccatatcgtaggagacatgttttctcttatgttccaagttcggtccaaatcaaggaaactgcaccagggaacataaaaaaacatcaaagcagtatagaaacacgtctatttgatcgaaacatgttgagacttgtcgcatttgagaagaaagtatccgagtaaccaatatgaggtagattagcctaatttgttaacaaaacagaatataataaagtctatatttctttttctcaaatttgcaaagcctaaattagtgcaaaaggttgtattatatcatctaatgacgatagaaatagttttgctgcggtttctctaaatcatgcagagctaaacgatctatagttttagtagtttgatgttccattcttgatcaaccttagcttatttggactacaaaaaaaaaagcatgatataaaatggacatgttgtcgaagcctacggagcctaattaagatcttgttatatacgtggacttgggtattgggtgtagaatatctaaaagataagaaatatgaaaaattttacagagcaattaagcattgctttgttgagcggcttatgatgctgaaacatgtcatagggggtcttggtttcttcggaaaagcagtgaaaacaatcttgattgcacttttgattattgactattgactcgtgcatggtttacctcatttggtgtttttgagcatgaagaagttctcaagtttcaacctttggctacaca

SEQ ID NO: 17138 - DNA, 688 bp, Arabidopsis thaliana landsberg
aataaaggattcggaggattcggagatggcatcactcattaatcaaatccccgacctcgttgacgcagaggagggacgaaagccagagtcaaggctcatatcaagcatcactcaactaatgtctcacatcaactcttggagtttttattcaggaatggaccccaagatcatatctctcattattcgaatcatctatctggtcagatcaatggatttggattcgcagacaaagcccaagtcggagctaatgtcactcgttactcaaactatcgctgtctacaactctatggatttggattctcagccgcggccgctaaggaagctcgtatcagttttttctcagtatggttttgacgtaaattctacagtttcggattcagaatcggattcaagtgagaattacgtgtcacacattaaagattcattaaaacttgagccggagcccgagcttatttccttcatccatcgaataggctccctcgtcatctctatgaatccaaactgggagaagcttatttccttttgccctcaatttgaagtaatactgagcgatgatggaaagcttcaagtggaagaaggacgtctaagcaaaaatcagttatccgacgatatcccaatgaagcggaattgtctccaggtaaactggaatttagggaagtttcatgcaggagaaaacgactttactcat

SEQ ID NO: 17139 - DNA, 3956 bp, Arabidopsis thaliana landsberg
ctttgattatcttctgacatttcacacacatcatccaatgcttcgttttggtaaaatcaacagggttataaatgcattttgatttgctatcttctgatattcacatcacaacagtttaaacatttttgatcaatttgatttatatgctaacgcatactcttctcttcctacaactttagcaatctaagtgaaacaatgttccatatacaaagaatggattcaaccccataactggtgctggtaatcttaaccatgttaacatataacagatcttgcataatagatggaaaacttacataagatcaacaagcatcactatatgtttcaacgataaaccgtaagccttagattgcttgtatggaattgacagatagcggatcattcaaggcaaaaccaccacaagtataaaccatttcaatgctaagaccaaacaaatatagacacctgataaaagtgtggcagattagttcgaagattgttctgctaatacgatatatgatttcaagatttggtgaagattcctccaatgtgtagaaaacaacaaacttttgcaggacaagggaacttacaaggatgttgagcttgccaaataaaggcaaaagaagcttcctgaatcaacttctccctctgatctctaaccaaaccagacaccactaaaccattggatttccaatcatttaagcatgcttttagctcttcctgtccggtgatgtaggaggctgcaggaaggcaaagaaaagtaacctacaaatcagaacctgcataaaaatcaacatgttaagaaggatggcgaaatagacgaaaccaaaaacatcattagtacatacctcgtgatctttggttctcccttctcgcttaaaaaatccaccactgtaccacaagaaggtccatttagatcatcatttaggcaatgacatggtcttcttacagcaagagactccaaaattgaaaaacgcttacctagttcgacctacagctgagaatcgctcctgatagtgaacataaaggggaagaaaatctgatggctcactcggaacatcagctagacaaacggatgtgaagacaatctacaatgacaagtagacagattagataatgaaacaaagccgattaagagataagcatgtaacagaagctaaactgaagaatacaaactcgaggaactaagaaaaaaagttgaaagttttggaaattgaatgaaacagcacacttacagtttctccatctgtcaccgtgactgcagaacttgcttgtctccccatgagaccagtctcaactaaaatctacacagtagacaaaaagaaagaaaaagatgaaaaacttaagaagaagctaaaacaagttcaacacatacatctaaagcagcgagctttgcttctctactatagagcgaaaggtctcaaatcctaccaatcatctccgaattcaaatttgaccagatgaaacaaccaatgaaatcaaaagggtacagctttatgaagaaattacctctctatttccgaatggaattttgacagatacgtggttaggaacaagcccagagacccatcgccgacggagtcagcgtcatcggtatcatcaggcctaactagagctctgacactgaatttactggcgccacttccggagagaagagagagcgagcacaattttcctcctccgccgctgctgcgttcgccggagtgaaaacgagggaaattccgggaacggcaaagtctgctccggcgaactggccagaactgtggagtactactgtgaagtgcgttactgggactcgtcagcatcttcttcttcattgagagagagtgagaaagagagagactttatccgttccttgcagacgcgggagcttctcctgtgactctgagtgaggagttccaggcgtaactagtcttggttccggtttcaaattgaaccgggttttaatttcccaattgatattttcagaaccaatcatttattccggacaattaggtctgattcgttagaaatttgaaatagaaaacattaacttatgattaattaatataaatttactgcttaatttgatgaccaaatgagattttttatacgaacctgtgggtagactaagccagttgaaccgattggttcggatcaatgtcaaaggctgaaacgatcgaaatagaaacgacagcgttttgtagaaaagctaaataataacaagagctagcaacatgtctactattgctatttttttttagagttttttagccaatcaggagactctatttcagaaccactctcacaaagtgcgcgtagagagcgtgagagcaattctgtaggggtttaccttctgaaatcatgcctttttttatcaacgcacttgtctccaaaatcaccatcgcgtgaatatttttttcttttcctctctaaaccagtctaaaccaaacccaaaatcgattttaatttcaataccaatataaactttttgttccggttcgagatctctcctccgaaacttttgtctgatttcttcaatcaaaggctctctccgatgaactgcaaattcttctccagaatctgcggcggattcccctatcggctattcgattccaaatgtacagtagcttctcttccttctattgcttcagattattgttttttcgttaatcattagaatgtacttgtgcttaatgttgataatgattgtgattatgatcactagtatacttctgtcacatatggaacaaatttagttattttttgctgtaaattggtagtatgctaaaaactcaagatttctaagtgttgaaaatttcagtaatcttaagtcccactgtataatgggacatattgctaagttgagagaaaaagtatgtgcattctttctttagttggagttttggcatacatataaacacattgaagctaagatttttgcctatcaatagaagaatctataagtttgaagaaataaagtagtaatccttgtttttctttacatgtatgtagcgagactccttcaagactcaacaattgttgtcaactgtcttcttctctgtctctacccacctcaagctccctgttatctacattcttatgaatgtgtctcctcgccttccacctcctgatattgtgtttcttatttcgatagtttactctctcttctatctaattaatttttattcttttctttatcataccaatcaaccatttgtaatttaacattttcgaaaatgtctttagatgtaataattcttactagtcataaatataatgtgcaacattttctcaatttctctaattggcttgacaagatagtgcggtgtctgagtacaagtagagagattttagagatcagaaataatttaagaactgaaaacattgcggaaatcaccggaaaaaggcaaatacatacacatgaaattgcgagtcagtatgcaccgagtagagagattttagagatcagaggctttcaactttctcggacgcttatgagctggtgaaggagtatctgcttgtcttccaggaccctgcaggattcccaaacatattttaattaagattcaagttttacatgtagatgcaaaggattttcggaggaattggtacgaaaaataaagaagagcaaactctgatgtgcaccaccttgcgtttttgttccttcttgattggtctttcagctgaaataaacacacaaaatgaacttagagatggttaagtagtgcatacaatgctgaaaccaacaagataaggaaataatgtacctccaaaactgaatgggtccggtgcgaaaacacgatcctgatcaaatatatatagaaattaaagagatcaacaggaagatgaaactgtagcgagaaccaataaacaaagtttgttgctcacctttggagtgtctggcattgcggcatacgacccttcacgatgtgatgaaccttctgattccttatattgcagctgaagttacgaccccaccaggtttggcaacaagt

SEQ ID NO: 17140 - DNA, 435 bp, Arabidopsis thaliana landsberg
tgctctcagacactatggaagaacggcagattaaattttaatgcatccaattgtggtcaaggtttatggtctaaattttggtcagaatactcttgttagatacctctcactttgcttagggtcaacaagcatcaatgtttctgagatcacatattttgtaatcaaacagaagcaacagattttgtctatcttgcaagcaaacagaagatcacatgcatattttgtcttcaacatgaacaatttcccggaaacgtgtagaagcaacaagactcttctgctccttcctcaatgacgatgtttctctctggaaatcactggttttctcaagaccagacaatagaacatcgtatgtcccaagcgaaggcattatctctcgctctctcatctctcctaatatcttcattgctttctctggactccctgctgagatataaa

SEQ ID NO: 17141 - DNA, 482 bp, Arabidopsis thaliana landsberg
taacttatcgttttgttaaacaaagttacaaatctattctcattgattagacataattcataacttctactttatttagagtgtttcaaaaaccaaatagggatagatttatatccaaaattataaatcgtatcaaaattttcactttggaagtaaaaggattttctagtgttgtacgaagtggtccaagacataatcttctgctagttcgttgctcctctttacaatcttattgatattgatatgatatcttatataaatgtacacaaacaaatggaccaaaagtcctcctatactcatgaagtagaggtccaagtactagtaaatggagttagtggccgccaaaagagcagcaccgagcccagacacgtctttggtatgtttgatcgcaacgtgacttgcaagcttatggccaagaagctcgactagtgcgtcttgcatatactgtcgatattgtgggtacttctcatacagtgcaccgt

SEQ ID NO: 17142 - DNA, 651 bp, Arabidopsis thaliana landsberg
tggctcgctaccaagcattgatccggggacattgagtaccaggtcttcagaaccattcgactacaggaccaagacaggaataagactcagactttgttccatctgaaatggcaagtacttttgaagatacagatttaactactgatagactaaggtacctgcatgccaaatatgtatgtgaatctctgatggatcaaagagaagcagggctgctagaggagttttcagacaatgtaatgaacgagtatgcatttgttaagagaaagagactcagctttgaaaggctttacaatcaagcggaagcaacagaagaatcagcagtactaagacacatacgcaagaaagacaagaagcttgggtttgctacatctggttcatccccaatgacattgatcggaggtgcagggggcccggtacccccacatcccccatgaggattggctcctggaactatcaaggccatggtgcgccactgactcaatctcgacttagtaaactatgtacattacttaagtttaatgttgcttttcttattgaaactctaaataagtgtgattatgtaaatatgtattaggattcccaatgtaataactcaaccctacaaggtcatagtggtggcttagccttgttgtggaaggataatgtgcattt

SEQ ID NO: 17143 - DNA, 768 bp, Arabidopsis thaliana landsberg
aaataataaaaagtactcacatgtatcgggttcggttcggataatacccgatacccacatttatttgaaaacagaatatgatcgggtaattagccgaaaccgaagtataacaagtttggatatttcaggtcgggttcagttcggttctacggatttgggtattacgcccagacctaccctggaacatattaaatgtaatattttttcctttttttagtttttaacataatagctcttttattcatgcttaatcttggagctattttgtactatttttgacatttgcttcgttatcacaatcatcaaattttattttcataagtaagaagctttttcgagactttaaactcttaagtttttgatcgaagtgcttcaatcatctttgctaacacttcatgaagaaaaccactttttcgcgaatagaactcgaattctataacctgcaaagctttccaactgctcctcgaatatcttcttatcctctaagtcaaggctactcaatccttgttgaggagtaagttcatcaacaccaaaacgctctagtgatctaacaagagaagaattgggaaaagtatctttgtttttaccaagctcaaggttcatagacataactttcttcgatttcacaggtgattcttcaatatctccccaaacaaacttagacaattgaaaagccctgagatcatgaagtctgatatgttcatcaccattcttggctttcacaagattgttctcatactttctctttaaactcgcaagcattttcat

SEQ ID NO: 17144 - DNA, 2670 bp, Arabidopsis thaliana landsberg
taagtattaaattgaaaaatgacaatgagttcgagtaatttgttattgttaaaatataaatttattcttatttaaaagcaattctaaagttcttctctttagaagatgggataaatttatcttatcaacaaaaaaaggtacttatataaaaatttaaatttgccactctgaaaaattaagctacatccgataacatcattgaaaatttaaacgttgtgaaagtaaaaaacatagaagctttttaattatatatcaatccatgtatcatcgaagctttcttataaaaagtaacaagtcaacttaatctagtagcctcaaaagtagaaaggaacgttggcgtcaatgtcatagatgcacacaatcctctgatgagagctctaaatgtgaaataataaagggatagcatagaggatcttattggattacgacacaaattgcaacttaattaagggttttcactttggacattataagattcaggagttgtaggttgcatctctatcctatgagcctcgctcgtggattcgcctctgttcctcgtatcttctaaccaaccttccagtgtggactgtactacattgtcgaatatccctttcttgaatttgctacccatcttttaaaaaccgagcaaaacaacaacaacaattgattcaaatttgttgtgaattggtgtaaacatgtgaatatatatgtgtcacttacttgtgtaacaagggcatatagtggtaatgtgctgtaactgcaaagcacttggactaacactctgtatgaacaaagatcgaaccaaaaatattaattagaccttttgaaggttgatatttagatttaaaagagttcatatattaccccatgacgagtcttgggataaggtagcctagtttctccatgatacatgaatgtattccgtatgtgaactgatgatacgatggataactcgtaaataagaatgcgatggttcaaaaattgtggaagataaagaaagtgaagctgagggttgaaagaaaacgtaccaaaatccagaagaagaaagcaatctcaaatgaattctgaaagagaatgaaatggatgagttggttgtagaaataaggttttggtcgtatgtatttttaaaaaagaattattattagtaaattgtatttatgttatattatattattcacaaatatcaatttaatatatattttaaaaataatgtgagttatatatatatgtcataaagtagatattacctattatttatattcataaaactaaattaaatatatatatatatgaaaactataataatgtttttaaagaaaatgaaaaaaataaagtaaaaagaaaaagaaaaaaatgtagatcttctaaagattagaaagttgtgttttagaaaaacttgtacttatagccaaaataattaaaaattatattttttaggctgtgagaaaaaataagaaaagtacaacatgattgtagttttttagtggctttataaatctcctacacccccaaccaatcatattcggtatcttgaagaaaacataaaaaatatttataggaagacatgtaactgaagatgtgtgttttaagtcataatttttttttttctgaaagacacccaacaattcactaatggaggttgtctaaaaagaataaccaagaaaatggtctctgaacccatctctaaaactattttataatgtgtatatgtaacagtaagaagcgaaaaaaaaatccatatatcaatcaaggtgttaaaaaagaaagtccatatatcaatcacttttctaacatcgtcgatcattgtgacgaaaatcgcttacgtctgtaccgcattaacgtaatgccatcaaaccaaaaagcttgctcactcactccggtttagatctttgttaacataagcaaacttttcagagagtgaactaatagattcacgaaacgacaccgtaattagtatcgaaaacttgactgacatcagcctaagaaaaatatcgcaaattgttataaaatattaaacttaagaagaaaaatgaaaatataatagagtttacttaacaaaaaaataatagaattaacaagaaagtaagagacttaaggaaaaagtaatagataaaaataagcatcatccatattttataaatagaaataagcgatggattaccaccacgcttatacgattgcgataatcaaatccatacttatctagttttaaggaaaaaataatagataaagataagcattatccatatttaatagatagaaatgagcgatggattaccaccacgtttatacgattgcgataatcacatccatacttatctagttttaaggaaaaaataatagataaagataaacattatccatattttataaataaaaatgagcgataaattaccactacgcttatacgattgattgcgataatcacatccatacttatctagttttaaggaaaaaataatagataaagataaacattattcatattttataaataaaaatgagcgatgaattaccaccacgcttatacgattgcgataatcacatccatacttatcttgttttaaggaaaaaataatagataaaaataagcattatccatattttatagataaaatagaacgatagattaccaccacttatacaattgcgataattacattcatacttatctagttttgagaaaaa

SEQ ID NO: 17145 - DNA, 1496 bp, Arabidopsis thaliana landsberg
  unsure (1)..(1496): unsure at all n locations
tgctaacatatgttgatgatatcatagtaaaaagcacgaagcaagaaaatcacattgctgatctgcaggagacattcgctaattttaggcaagctggtctgaagctgaatccagaaaaatgtgtcttcggagtaaagaaggggaaattccttggttgtttggtttcaacaaaagggatcgaagctaatccaaataaaatcaaagctatccttcggatggagccgccaagcacaaagaaaggggctcaacggctaacaggaagactggcatctttgaatcgatttatatccagatcagcagagagaaatttaccattctttgaagtgctgaagtcagctgaagtttttcaatggggatcagctcagcaaaaagccttcgaagaactgaagcagtatctgatagatttaacaaccctaactccaccagcgccaggggtcctctgctgctgtatgtggcagcttcgactctgcagtaagtgtggcgcttgtccaggagaagcttgaaggacaattgaaaaagcaggctccagtatacttcgtctccgaagttcttagtatatcaaagaaaaactatacagaattggagaaggtgttatatgctgttttgatgacatccaggaagcttcggcattactttcaagcatacaatattgttgttccttcttcgcagccgttgaaggatattatgagaaatagagaagctactgggcggattggaaaatgggctgcagagctcaatgaattttgcattgattatgtgcatagatcttcgatccagtctcaagcgttggcagattttatcgccgattggacgccaggggctcaggatgaagaaacaaataaagacgccgaagtatggacagtgttttgcgatgggtcttggggaacttcggagcaggagcagccgctgtgttggtctcaccatccaaagttaaaacttgttatgcggcaagactcgattttagttgtacaaacaatattactgagtacgaagccctgctcttgggtcttcggaagttaaaggcaatggggatcagaagggccattctaaaaactgattcccaagttatttctggtcatgttgacaagagctataaagcaagagatccgaagcttgaaaaatatctagatacagtccgaaggatcgaggcttcctttgaaggattctctgttaaaaatattcctcgtggagaaaatgaatatgctgatctactggccaagtcagcagcacaggggctgcctttnacttcggaagtatttttcgaaacaataaaagacacttcggtcgagcttcttgaaagagcggtcctcaatatatcccctgtctatagtgaagattggagaactgaaatcatctctttccttcagggtaattttctttcagacgacgaagcttacaacaaaataatagaagcaagagctcgaccatatgtcataatagaaggggagctgtacaagcgtagggtctgttccccgttgctcaagtgtttatccaga

SEQ ID NO: 17146 - DNA, 2370 bp, Arabidopsis thaliana landsberg
tgatctgtttggctttctgatgcaaatgggtcaatatttgttgcaggacgaagacatctatacattcttcgaatcagaaatcttgtcgcccaagttatctcatgaaacaagatcgaagtcttcttcaagtaaccactccctagagaagaaggtttcattgaacgttcttgacctcaagcaagagaattacttctctacagccataggacaagctcgcacaaaagctcgctatgtcgttgactcatctcacaatgttgtgaatttactccacaagcttgcagtagcaaatacaacaacaacaagtgtcaagaagccaaacgtttaagtatgttgactaagttgctttgaccaagtctttcgtttaattttgtttattttttttgttcataataagaaaagagtccactgctctgaaatgcatgttatatgtaaaccttattaggtcttgaatttctaatattatcagcaaataatacaaaaatctaggttttatctatcaaatgtggaacaaatgttatatgtaatattatcagctagcaaataatatttaatgaaacaaatattgatttgatgcgtattttgtagattttagggtaaaaaaatagttgtaagaaagaaagaaaatgatacaaaaaaaaactgtaagaatgaatatagatcactaaaatacaactcaaaaatgaaaattagcacatgaagacaaacatgggagcgatgactgggtctcaacgtggtgacagagtttattaccgcgttgcggtgtttagaaccattagttatgtggctggctcactctcacgcaccgcctaggggcttttccatcattctctctaatcatttcactttggtaatcttaatctatctatgcgactccaaatggtaaccacaagaaaaattaatatgatgaaagctagagatgaatcaggctctttagtctaattaatggattcagcagccaaattactttagaataaaatccaactttatgtctgtgtaatgaataattaatggttgagtgtacaaaataatgaaaattgttgtgatctccaaaaaaaaataatgaaaatatgagttctcctgataccatttatatagagtctaaaatcacaagtatatatttagaagtaaatttcaaattaatctaacaatgaaacaaaaattcatttgcgtgaaccgctttctctacttctttagactgaactttataggtgagtgtgagcagtaattgtagttctatccattatatgcacaaataataggttagatttggcttttagctttgcctacatctcttttttttcttgtttcatccaaggagaagaaagcccccatggaagccaaagaagaaaccccgtggagctctattttagttccttctgttcaggagatggtgaaggataagatgatcacgaccgttcctcccagatatgttcggtatgatcaagacaaaactgaagtcgtcgtccatgattctggcctcatatccgagatccccatcatcgacatgaatcggttgtgttcttctaccgccgtggactctgaggttgagaaactcgactttgcttgcaaagaatatggatttttccaggcaaaatctcaaacttcactttttttacaaaattatctatgttagacctaacgtggagcttattacccttgtttccatgcaagtatcagaattaaatagattacgtttgatgaaattattcagaaaaaatcgtttcttacaactatgttaaagccaaaatggagcctaaaactttccgtttcaaatttatttatttggttatgtctttgtatggtccttaacagcttggtaaccatggaatagactcaagtttcttggacaaaataaagtcagagattcaagatttcttcaaccttcccatggaagaaaagaagaagttctggcagcgaccagatgagatagaaggtttcggacaagcttttgtggtttcaggagatcagaaactagattgggcagacttgttcttccataccgtgcaaccagttgaattacgcaagcctcacttgttccccaagctacctcttccctttaggttttgttctaattcaacattttatcaactagctccacaaagtattgctctgtataatattggttttatgtttctgtagagatacactggagatgtattcttctgaagtgcagagcgtagctaagatcttaatagcgaaaatggcaagagccctagagatcaaaccagaggaactggaaaagttgtttgatgatgttgattcggttcaaagtatgaggatgaattactacccaccatgcccacaaccagatcaggttattggtctaacaccgcaaactgattcggtcggactcactgtactgatgcaagt

SEQ ID NO: 17147 - DNA, 4705 bp, Arabidopsis thaliana landsberg
attatttacagagagagagagaatgatttgaagagagtgattgaatttcaacagagatagaacattattgtttggttttgaggggaatttggttttgacgcaacttttgtttgcatttgaggcaaaatgaaattggacaaaaagttgatttttgaaagtaaaggtgatttccacgtgggcacagtaatttagacatgtacgccgtttttttacagttagttgcaccctagatattggttgtccaaaataaccacgtagttgtatttttcgtgttttccagtttagacaatattacatatccttcaaaatgatttatctagttgttctgttgagagaaatctatcactattaaattctaaaggtttagcgcactcacatgttaacaatatataaaattgcaaaatttcaatcctaagttggagtttatatcaaaagttagctttaaagtataaggaatatgtaggatagagtctattaacttgtattttgaccaaatattttttctccttatttaattcgtttaaattaatttttaagagttcttcatctcttcatagtctatttaatatttgatgtttcaaacaaacataaattcgaattttaatatccttcaatagttatacttgtattcccagtattatcgtcaaagtcatagtgttacctgtattctcagtattatcgtcaaatcatagttttctcatgtattcgcagtattatcgttaaacttgaatttccagtgaaataaaatatagttgtacagaaagaaagtctagtgttacatagttgcacaacgcgaataagatttacaatgattaaaatcaaatactatgggtgccaaataacaaccattgcagcggctgcctcaacctccttttgttttcagtcctttgacgtttgggacgtctttctccggtggatggaaacctaagcacttttgttctacccttcttcattttctgagacagaggtaataccttcaacgctttgatgtcatccgggatatcccactgtgatctatccgggactaaataaatagtcctataatacgtcaatgcccacaattccgcccaataatactttgaaaccaattcatgtaatttcatacctcgagtccttgttgtatcactttcgaatgcaatgaaagcggctaacgcatgaatacatggatacttttggatatcaaacaccttgcaactacaagttttcaagtgcaagttgaccaaaatattcgttcccttctactccccggacattgtactcgagccggaatgtgtttagctctgtcacttttagtttctcagcataaacccataaatcatgcaagtagttctccactaaaggcacaaacttattatcattagatcctgaagcggcatctttgcgatgttcattaaaccaaacagaaattttggccatgatcgcatctagcatgggtagtaaagaatagttccttgcattgagaaaaacagaattcaacgattccacacagttgctagtgtccaaattgtatcgttcccccgggaaacaacacctagcccatttttctttcacggttgtatcctccaaataataagccgcggtaggatatctcaccttaaatactctatactccatttcaaattctgacatggtattaatccgacttaactccatgaatttccaagcaagtacgtctctattgatgttagtggcaagacctttgacattttgggataaatgccaaacacaatacccgtgttgagtcgcagaatacacattacgtatgcccttgatgaggctttaatttctgtcactcataaataccaattctggagtatcgggtacaacacttagcagcttctcaaagaaccatccccaactagcatcattctcaccgtcgagtacgccaaccgctatgatataatgatgacgatttggatcttgagctgaggcaaagactagaacaccaccatatccgttcttcaaatgtgttgcatccacaattatcactttcctcatcgcttgaaagccttcaatgctagctcccaaagctatgaataggtattggaatttcccgctctcatccaacttcatatatgttactgtaccatcatttaccttcttcaacatgtacaaatagcaattgatatccttgtagctatcttccgcgctaccttttaaatcacaaacggcttgtcttttccctctcaatgcggtggagtatgatatcttcacacctaattttgtctgaacaagctccatgataaccttaggagctggagtttccaacagtccacgaaaagtatcatgaagaagagctgctactaattcaggggtacatttactcttcctcatccttgtactactcttactaatccgggtacaactatgcatcttgttgtaccttctaatagagtaaatacttgtatcttgaatacatgaagcccgtatacactagtcacaatttacttttgaacactttaggacataccgctccttatcagactttttaataacataaccaaaattgttagcaaatgcacctttgtccaccacttcttgcaatgctgccctgcttggaaattcttgtcgcaaagtcaaaccgataccgtcttcccattctttcttaaactaactagattcaacaacaggcggtggctcaacgtattcatcacccctatcatcatcatccctatcttcacgtgatccaatctcatgatcttagtatcatcaacctccactattgcctcattttcttttgttccatgtccctccaattcgcctattgataataggtttttagtcaattaatcctaaaacaccaatcatgtcgttgtagtattttaggtgtcaatgcaaatgggtgtgatgcaaacagatgagatttgatcagaagtcactaagtcaagccaagcaataacagtattggggtttctaacagtcctaagtgaacatgcagaaaacagaaacaataacataattactaaaatcactcgaccacaacaggctgatgcccgaattaggatgtgatcgagtaacaggcaggatatgaaacagatatactcgactgcacagtctgttgccagacactgggtgtggtcgagtatactggtcgagtaacaagaaagaattgcagaaattaaacaacagatgataagctgaagtaaacaacagtagagtaaacaaagaattcaatcagataaagaattcccgaggtttgggtaattgagtagtttcgattcctcaatttacaggtgattgacatgctcaataaattatccctagacaacgagttcattaaccaaatctaagtgccaccgcaacagagaccctcaagttaacctagtcccagactcaatcaccattgacgagagctaacctaacaggctttcgaatcaacaaattaaagccaaaatgctccgtgtaaccaataccttggtacatggacacgaatctcttgaattagtggttcagacatttcatcgaacaccatttgggtgcagaaatgtctgggctcaaattccagttgatcagaaagcaataggcattaagaacaactaatccagaagggatctatcaatcaatactcaatcacctagcatactgagaaggctacaccactctaacccatcctcagaaacctattcactactcagacatcataacagaaagcataaacgttgaacaagttgaaaacatgataacaacagtgtaacagcaggatgataaaagaatgaacaacagtaaacgaaatcaagaacaaaagctgaatactgaatactgaatagataaagagaaatccggattacaaaaagtctagaacacaaggtttgcggaataaaactagataaaaacttcttgtgcaaaaatgtgaagtacatgctacttatagccaaatatcccgaaaccctaatactcaaaacgacgaagtattaggacgggttaagaactgtactcgacccatgtggtcgagtgggagatcgagtgaatagttggagtcttcttttcttccttgtgtttgagtgcagaatgaagaagactctgaagctcgcaatcaagtatgtagtcgagtggtggtaatggtgatactcgacttcaaggtagagtggtgagatcgagtagtggtctggtaatggaggtgaagacactcgaccccggggtcgagtgatgtgatcgagtgatggtcaggtgatggagatgaagacactcgacctcggggtcgagtggtgaggtgaagtggtgatgtcctctactcgaccagggggtcgagtggtctgctgaggctgtgaagtgctactcgacctgggggtcgagaggttttgtatgatcaggtccgcttcttataattagctcgtcagcagctccaaatcgcctgaaatcaactcaacatatgcaatatgcatgcaaagctatcttagacatgtaaagtgatgacaaataataagaaatgatataaagcagtggttatatgatgctaaagtgatgacaaagggatactcaaaacgagtaaaatgcacacttatcaataacctatgtcacttcatttacttctgcaaaatcatcatctaaaatttttgaaatccttataaaattttgtagtcccattgtagccattaccactctcttctacacatgagtattgagaaaatgtctcaaaaaccctaaaaacaaactgtaatcccatatctctccaaacaaatcatgagtgaattttaaattaatttta

SEQ ID NO: 17148 - DNA, 4113 bp, Arabidopsis thaliana landsberg
  unsure (1)..(4113): unsure at all n locations
gcccgcttcgttcaatcaattggcttctcatcttttttctttctttctttagattttcaagctcacagtctgtctcttgttctgtaaaggtgtttgccgatcaatgggttttgttgaacaataagagttagggtttgtttgtttgcatgataatagnnnnnnnnnnnnnnnnnnnnnnnntgttatctatttttgctggaaatttatgttctttggtgctaattttatggtcaatcgattgtcttcattaagcttttttgttgttttatgtctaggcttctttttctggttatggattgagagatggaacattaatattttctttttggttgtttaacgctttgttttaagtttgattcctagatttatttgtctcttttgtaacttgtttgtttaagattatgcgttttgttcaatatatctacctgtttccttctcttctgcagtttttgcagctcctataaaaatctaaacgagcacaaggactgtaagttacacaactacatagtactttccttgagttatataatttcccttgagatatattatcagtaacttacatagcattgtgttcatacttgtaggtgagaagaagatcagttttcttcaaggtaagatcacattgatggagatgttttgtcaagatatcttacgaaactctgttttgctgcttcttctattagcaaccttggatattcatttactttctctatctcacgtttggatcaacagttttaaggtttatgattcctgcgtaatttattgcatatcttaaatgatgatttctactgctaattcctttgacattattctgcgtcaactgggattttgtattctctttttctgtaccaagcttagcttaatcgttatgcatttgctataatatctatttccacattttgttttagacaaagtggtcattgatagattgtcttcctcacttgtgaattgtgatggaacttagtaatcttttgattgcttcacctgccaagtctcaggattcgttttttttttaatcattcaagattttttttcgtgagacatacttatgttgcttaatgttattattatatccttcaaagtgttgatatacaatatgtctaggttaaggctctttgaaatgctagtttggtgaccgttctaccattgtttagatttccaaatattattgcaaggaaggaataagttcagtctcgtggttctttatgtgttagaataaagatttctagattttttattcactcattgttaacgatagattgatgcttcttttttgttgttttatgtctagacttctttttctggttatggattaagagatagaactttaatcgtttcttttttgttgtttgacgctctgttttatgtttgattcctatgtttatatgtctgttttgtaacttgtttgtttaagattatgcattttgttctatatatctacatgtttccttatcttctgcagattttgcagctgcgataaagatctaaacgagcacaagggctgtaagttacacaaccacatagtgctttcctttagttatactatttcccttgaggtatcttttcagtaacttagatagcattgtgttcatacttgtaggtgagaagaagatcagttttcttcaaggtaagatcacattgatgaaactctgttttgtcaatatatcttatgaaactctgttttcctgcttcttctattagcaaccttggatcttcattactttcttgatctcacgtttagatcagcagttttaaggtttatgattcctgcgtaatttattgcatagcttaaaacgatgatttttactgctaattcctttaacataattctgcgtaaattgggattttgtattctctgtttctgtaccaagcttagcttaatcgttatgcatttcctctaatatctattttcatattttggtttagacaaagtggtcattgatacattgtcttcctcacttgtgaattttgatggaacttagtaatcttttgattgctgcaagtgccaagtctcaggattcgttttttttttaatcattcaagattttttctcgtgaagcatacttatgttgcttatgtgactactatatcctttgaagttttgatatacaatatgtctaggttaaggctctttgaatacatattttgcgacgttatgtttggtcacaacacggagcgactactttgtcattcatttacgactagttcgctactagacgaaatacaaaagcaattacgtcaccattttaggacgcaaacaatatgtcacaatatagtctctatttcatgactacattccgactaatttctgcctataaacaaaaggtcgcgatttgtactttcggacgtatttgatactcgcgatttttggaattcgaaagatcacataagaaaactgttatatatatatatatatacgttgattgagtaaactataatcactataagtttctaaaagctttaaatcacattatttgaacacaataatttcattaattctaaatcattcttaagtttaacatgtttgtttagaagaaggatttgatttttttgtaaatatcaaaataaagttatcaaatcaatgttttaaactcttatactaatagggatactctagattacagttatgtttgtttttagtgattggtatcaatagttttgatctgtaatgccttgaatctaaaaaatcaatttgtgacttaaaccaaggagtcacaaaagagtaacaatatgcgactgtattcggactcttttgatactcgcaatttttgaagatgaattttgggcttttattttaatggaattgggctttggtttgggagatgaattttgcctccaatttcgtttctgttgtgactcgtttgcgacagattaaggactcctcttcgttatttactatgtaaacacttagtcgatttttcattatgcggcttctctttctccatttagggtttcactctcaaaacttctcaactctcttctcttctcaaatcgatttctctcctcaatctctctcagtctcttctcaatctttcctcgatctcttctcaatctcccctcaatctaatgtcgccgaagggaggaaagtctacaaggggtcgcggtggcaaatctcaatcacgtctgagggtcttcactgggtcaaatccggcgaagccatgtggtagtaggacattaccggtgaatcctccgtatccaaccactggtaagcgtaaaagggcagatcctccgaaaccaagcagaggcttgagtccaaatccaacggatccaagcggtgttttgattcaacctccatcgaatccaagtgtgagtcggactatgaataatagtggcggaggtgggaggagaggaggaaggagtggtgtcggagtgtcttctcactcctctaatccatcagagacaatctcatagaactcttccatcccagtacccgccgaggacacaacctcttcctgctcgtcaaccacggtctcctgttattcaataaccgcctcttgctcctcaaaatgacgaagaggaagatgacgaagaaacagatgacgacgacaacaacataccaatcgaagaagatgatgatgaagaagaaaatccagacctagactacgaagagctgttagatggtttgcttaatcttgcaggccgacaacatttacctgttttgtccaaggttcctatcccatgcattgaaactctctggtaatagaagctctctgtcaatctatctctctccttttcatcttattagtgatgtgtttagagcagctagagattgatttgtgatttatgattgtgattgtgctagagtgttatttgtgatgtgttactttagttcttgtgatgtgtcaagtgtaattgttctagagtttaaaaagttagcattaaacatgtgagagtcaaaactcacacagtcgaattgtatttagggtttcttcaaagaacagatctttgcgagactctcaaagaacaacagaattatttgattaccgtggacggtgttcttgatcttattattgaaaagatgatgattcgatcgtacaagtgtttagaaaagtaaaaaataggtgttttgccttcaaagtcggagcgttttgatagtctgaagttgagagcgtc

SEQ ID NO: 17149 - DNA, 2025 bp, Arabidopsis thaliana landsberg
ttatgtctgtcagtgaagtagtgaacaaatagatgttctgtatattttctgattacttttcataaatcacaaaatagccctttacagattgtcgtatatttaaataaacccctatagatatatatttatactaaaacctccccgcgttaattaattatgacaaaagcttggtaaaaaccctatttttcttcttctcttcaatttacagttctctgcaccttttactttcccctgttttttgatcctcaatcaccaaaccctagcgtgttcttctgttgattatttcgaaaagggggtttgtttgttttctgggaatcagcgaaaatctcgaaatggttggcttaatatttcaatcgggataaaatcgatcgaaaatgagtcagccttctgtgattcttgatcgagctaactatgctcacaccatccgattctgggaagccgaaactggtcgctgttgccgtaccattcagtatcctgatgcggtttgtttctctctctctcccttgattttgtgacttctgagtaataaataaaactgagacaaattaatgtttgtaattgcagcatgtaaataggcttgagataaccccagataagcattatctagctgcagcttgcaatcctcatattcgactctttgatgtcaattccaatagtcctcaacctgtaaaactcctctctttttttctcaatgtggcgtgttgattccttctacctgctcgagtgatcttgatggagtcatagcgtgtattaagtgatgacttacgattcacacaccaacaatgttatggcagtaggatttcaatgtgatgcaaaatggatgtattcaggatcagaagatggcacagttaagatctgggacttaaggtatatcatgtcatcttcatctttagctaaaagtttatagatttattcaagtgtggattctgggaaaggataaggagatattgaatataaagttacgaaaaatactaagaacgttctaaattgtattcttgttgactcgtaaaccaaaatgcagggctccgggttgccaaaaggagtatgaaagtgttgcagcggttaatacagttgttttacacccaaatcaggtacatgaagtcatctgttattgttgtgctgtgggaatcagcttcgttttatgtttaagagagttgttgtattgctactgttgaaactgctgtgattttggtagttgtctcagctgttatcactatttccttagtctttattatgaactttgtttttttttttgtacagactgaattgatatctggagaccaaaatggaaatatacgtgtatgggatctcagagcaaattcgtgtagctgtgaactggtaattgcctttgacacgtcttcatttcatttctgaaaatccgtagataatcacttgaggttaactataggtaccagaagttgatacagctgtacggtctttaactgttatgtgggatgggacaatggtagtcgctgctaacaaccgtggaacatgttatgtatggcgcttgttgcgtggaaaacaggtagtgttcctgatatgcaaacctttcttttgtttaaccatgctgtagtcgcattactctaattgtccatgccatttaaaaattcaaaatcttttacagacaatgacagagtttgagccccttcataagctgcaagctcataatggccacatccttaaatgtctcctctctcctgcaaacaagtaacatgtttcttatactttctcttttaaccgttttcttcatcctctccttttcgaagctcttacatatttgttagcagatatctagcgactgcatcatctgataaaactgtcaaaatatggaacgtcgatggtttcaaactagagaaagttttaacaggtatgttctccatgttactgtcaacagcattcattctccattatcgtctcttacactctcatcaaatcttatataacaggacatcaaagatgggtttgggactgcgtcttctcagtggatggagaatttcttgtaacaggtactaatctctgtcttaa

SEQ ID NO: 17150 - DNA, 3761 bp, Arabidopsis thaliana landsberg
tttttttaattactgttatattttcgagttttttttattatccagcgtgcccctactaaacgttaccggaaaaaacgtaattacagggaatgccactgccacgtcagaatttgctgacgtggattaaatgaactcagccggcttagttacggtatgttgcggttgacttacgtcaaaaatatatgagtcataacaaaacggcgaagtatgagtataactcagccagacgttacggctgagttgaaaaatgttgtctgagttatagtataactcagacaacggtatggttgagttaaggatggtcggccgagttataagaagttatacaataacccagccaacaatatggctgagttatgagaaaaaggctgacttatttcctcgacgcggccgagttatagttttgatcggcttagttatggaaagatgttacggctgagttatggtcgagtgaaataaatcagccgccaatagctggattacgatataactcagccatgttatggctgacttattgttaaaagattaattactataatatcatgcagttatggccgagtttttaaacgttacggttgagttagttgagttacgacataacacggctgacttaacttagtttttttcctgtttttttcctacgagtgacttatagatttgcttgatggctgagttatgaactattcgtttggtggcttacttgtcacctcatcacttcaaaaggacgtcggctgtaatattccatgtcagcatcgtcaacggaaatacgaaacgtcccttgcttctttaactcggccgtctcccttatgttgctcctgatgaaagagatgatggcttcgaaactattctccatttcaaacagccttttgctggaaccgtcatccacacacggcctcttgttggaaccgtcatccacacaccgccgcttattggaacctgatgcatccatgatctcggaagagttttatttcttagagattagaagacaagacaagaaaggaagagttctagttgctaagaatcgacaagagaaaagacaagagggaaccagtatatatatagtcctctaacgtcgtttggtcctctaacgacgtttggttctctaacgacattggggttcttgactattcagttgtcgtaaactggtgtatgtatagtcctacagtgacgtttggtttctttgatgggagggaagtttgggtttgacaagtcaaccaccacgttagaataactcagccatcacacgatttgtgtgatgacaagtcagccaccgcgttagaataactcagctaaacatcgaattaaacaacgagaactcagccgtgacggtatcataactcagccgtagcacgaatcgagcgatgataagtcagtcattacattgtttttttgttataattaacataataatcgattcatacagacatatcaatcctaaagtgtcattatttagtacaatcacatgctaaaaatccgaaaagacacagacatatgttcgaaaaagcaaatcactgctcaaaaaaccgaatgaccatccttgcaggtgcttcattgaagatctctgctgccattctaatccgtagaccctgaatatttgaatcagtaatgccatcaaaacaaacaccaagcaataaacatttaagaatctttaacgtgtaaacgccgcaggccccggtgataatattttgcgtgacctttgtcttgtgcctccgtcagaatgaaaattggtcgtattgcgggatacgaactttgagaggaagaattttgctcatcatctgtggaatcatcctcatgaacggcctacaagcttccacgatgtttccatcgctaatcggagtatgctctccgacgatgcaatcatagcaatcgatgtgagacctaggcaagttcacgtgaagggtcacccaatggttacctccggtttggcagacaagatacaagtgatccacatctgttatccacttcttatttgccgggtcttcctccagccgtaccgttcatccaacctagatacggggtatctctgaaagaaacctcttcggtcacatcctccactgcttgtaatcattaacccacattgacgtgaaccacgggtctagaatcatgacgagttcgctgtggtatgggcagggatctcgcaggagcctctgggcggggactttcatctacgcagcaatatgttgtactaaaataaaaccaagacaaaacacaacattaactcagtcgtaaccaagtaaaactcagccttaacacctaaataaatctgccattagctaaattaactcagacagaacgacacgataactcagccataaccttagacaaactcagacagaatataacaataacttacatcgtaaatcagtcattatctactataactcagacataatgacacgataactcagccataacattagccaaactcagacagaacataacaataacttacatcatcacccagccatccatgtttctcgtctggccagtcctttctttcggctatgataacagagtagaacagcacatcgtcgaacccatatgttttgtaataatgtttgctaacaaataataaagaaagttaatataaacaaatagtgtaagcatgtcgtatttaacaacttagtaacgtataaagggccatacctttcgggacctgtcaaataagccttaagcttctgcagtttggccggatcaaccggtgccagaggatcatagattgctcgtgaaggcagacaaccctttctcatgcagctcagcccgttgtctccaataactggaaaagtgtgagtgggcatatcttcggggttaatcaatgagctcccatccggggccagcttaacagttttgagccgaatttcttttacactctttagcctctcggtttcctcctcatcttcatcagactcaggaaggatttcattatactcggatacaaccttatccgtgacatcaactacatccgaatcttcctcagctttttccttagcttcctcagctttttccttagcttcctcagatggttttggtttctttattctaatctttggcgcagtaggaggcacctttttaggctgctccaaaggctttcttcctcttctcttctcgttggcggtttctggattagctcatttaatgttttctcctttttatgctttggcacatttggggatggtggcttcctagagcgtaaacggcgattgagaggagaaacagtctcaacgaaatcaaaatcaggcacaatggagaccttatcaaattctccttcaagattcctacttaccccaacatcagcttgtttcgactacataaacgtaacgaaaactcaggcgttaaataatgaaaactcatacctatgtataaatataactcagtcataactaactaaactcagccgtatcataatcatatacctcagccataactaactaaactcagccgtatcatattcatataactcagccatgactaattaaatttataactcaaccgtgtaatattcatataactcagccataactaactaaatttataacatgaaaacaactcagccataactaacaaacgtttataactcagccgtaaaatatttagataagtcagccgtaaaatattcagataactcagccgtataattcagataactcagccataactaactaaaagttataacgcagccgaataatattcagataactcggtcataactaactaaaagtttaccggaggaggactagaagtagcagattggttatttgtag

SEQ ID NO: 17151 - DNA, 1086 bp, Arabidopsis thaliana landsberg
ccacttcatatccagctgaatattgataacatcagttcaagatgatccaacagttgggagcgaaaggaatcaagtcagatgaacgtaatcagcgggagtgggatgatggatctgaacatgatgatgtaacaaagatatacgtacgaggtggtcgtgaaggaataagatccatttatttcaactatgtgaagaatggaaaacccaaagatggatcaatccatggttactttgactctggtttcacacaaacggtatgttctggaacatatacggtattctaaaaatcggcggctacctatgcgtctacaaggccaaatcacataaacattttgatattatattggcaatatccgtcaaaagaaaagtcaatgttattttgatgtagatctgataaggctgccgattaatttagttttttttcttttaattttctatttgctttttaattcatttttaaaagggaaaattatcctttaacggtaaaatgtaagtagtaaaagtttactctaagttcttttaaagtctataattagcaattctagatcatcgtctagaaaatcaacatattccttaactcattttatattgaggtgaagttgatatataatgctgactttgtggtatttgtattttcactaattatgcagtttgagattaaccatctacgaggtgaatatcttgaatctgttgacgcttactacgacaaaaagtcctacggtatgcaagcaattcaattcaaaactaacttcaggacttctgaactgatggggtatagttatgagtgtactatgtttacgctagccgtccaaggaaagaagatcattggatttcatggatctaattatgtacatatattatctcttggagcttacttcatttccattgctcctacgagattggaagtgaaaggtagtaagggaagcaagaagtgggacgatggatttgaccatgaaaatgtatcaaagatcgaggtactaggtggttttgaaggcatactgtacatcaaagttgactatatcaagaatggaaaactaaaaactggattagtccatggtcactctggtggtgatggttttttacagaggg

SEQ ID NO: 17152 - DNA, 912 bp, Arabidopsis thaliana landsberg
cacggagaaaggtatcttcgacaacaacaactctatttatgtaattaaacccagcgatactggcaccaaatgcgggaatatatagttgaatcttccactctcatcaatttgaagacgtgcgactgtacccggatttgcccgtcttatcatgtataggtaagaaggcagttcttcaaaactactatcaggggttcccagagtgagctcccttgcaaacctgagcgtcttgtatgacttcgaataactcatctgttaacacaaacatattaatcgataagtcagcctaaactataccacaactcaaccaacaagtgatcttaagtcagccttgaaagtcataactcaaccagaatgtaattatatgtcagccatactatatcaataagtcaaccgtaaaatatatataagtcggccaaacaataatcagtaagtcagccgaaacattcggaattccctatactctaaaatgcttattgataattattctgacaggttttggtctaacatccggaccaacgtcaccaagatagtctttgtaaagaactcccaaaatatcatgtgttgcttgtcgggatcgattagaacattccgtcacagaacatgtgtgttccgaatcatatatacaaacctaaaaataaggctcatccccttgtgtagatgcacgaactctccagcgacatccatcaacccagcaatcgtaaaccattgtagtcgtatttgatattggtacatcaaaatcaaatccattccttatcacaagaagtttgagtcgatactccaactcgtttgctaccgtatcgttggcctacagcgagtgttagcgtagtcagctccaaccttgaatcaaccgacctcctagaagatctgatcgtttcaatgttttaagttctcttcttaggaggaagttcggtg

SEQ ID NO: 17153 - DNA, 2811 bp, Arabidopsis thaliana landsberg
caaaacttaagcaaaatctttcacaacttaacgaaccaataaagcaaaaaacagagtttagaacattcatcaaagtgaaacgaataaaaattaaaaaacataaataccataaaacatcataaaaatccaaaacagagttttgataggaaacacagaaaaacataaaacaagctcatataaaaatctaccacacatttcttcttccatggccattcctaatcgaaagagatccaagactcgaagacacatcctcaagcaaagcttcattcatggcatttcttagattcatctcatcagtagcatcatagaaacatccacgtgtcctagactcacttatcagtgttgcccaaatcgaaccacttagagccaaagttgtctcgttcccaatcacccataaacagtgtcttgctcgagtcagtgccacgttagctctttgacggttgttgagaaaccccacttttccattactgatacttctaacggtggagatgataataatgtcttcttctcctccttggaaaccatctacggaccgaacattcaaagtgaattgctgacctgataaggaactgtacttatctccgattttctcttggattgctctcatctgtcctttgtaaggtgagaccactccgacactcaccttcatcctcctttcacatgaagctgtttcaaagaataaacgaatttgtttttataagaataatgaaaaacagattaatatactctcaaatcaataaaagattaatacctttgaaaagatttgatataatttcagaaaccacagcaacttcaaccatgtttttgggactatgtccatcaccaaactcttcttttccacgtccaacattgataaaagaaaacgagccaaacatgtttccttgaagaaacctcttttgataaatgctttctttaacattttcagcatctttgattctcccaccataaaactccttgttggggaaacgactaatagaaggatgcattcgatattgaacatcaagcaagtgtttgttgtgaccaagcaaaaccaatctctcaaacaagcttcttccgaatttcgccttttcacacatctgccacattattcccatattacaatactatagcatatatgactaagaaaaagaaagtttttttatttaaggtaagtgcttacctcattatgaaccattgcaggcaattgaaactcatctcctattaaaatggcgtgacgcagtcccggaagttgcaatgcagcaactgattcacattccttaagctgagccgcctcatcaaccacaagcagttctacatttcctgtcctttccacgttcatttccgcagcacccgaggctgtgcagaggataatatccgcgttttgaagataaaatttcctaatatcttcgttttctaacatgtctggaatctcaaaacgttttggaagtaagcgtagagccttgaggcaatcaacactgagtcttttgaagcaatcaaatctgaaatttccttcctcgaaatcaaccctagaagaattctccctcaagaaatatctgatacgctgaagagattgacgagaagcaatcattatcttcacatcttcatatggaaggtaaaccttgggaagatgtgtgaacaaatcaacgatgcatgtaaccctttaatcacttaagctattgaaattcttctttacgaattctcccatagtaggaatgtagacatgtctctcatactttccctcggggttttcaagaaactgtatcagtgactctaatctctgcatccatccagaaaatggtgaaaacagtttaccaagcttaccaatacgctcatcaagaaacacatcgagaagaacatgatcgttcttgtgaatccccattctgtcccagtttcctgataaaatgatattccctagcctgtaagtagcattttccgatgtcgaattttccttaaataaggataagagcctcgatgcaacttgtacaatagctgtgtttgtaggagcacacacaactgtcttgcaccttagtttgagaagggcaaagagaagagtcgcgaccgtctttgttttgcctgttccaggaggtccccatatcagtttcacactgttcttatgggtacagtttcttgtctcaaggcagcccaagagtgcatcctcttgggaagagttcaatttcgttgaccggattatatccaaaacaaggtcagatctcccatcattttcagaacaaaaacattgttctgtaccctgtaacacaagcaaaacaaaatttactcatgtaacataaaatattactaaaaacattaccagatcaaaaacattgttctaaaccttggaacacaagcaaaacaaaatttactaaattcactacaagaaaaccgtcgttttgcgaggaacaattgcaagggaaggaatccctcgcaaatttgcgagggaattgcaggtattttgctacaccacggacgaacgttgctaatccctcgcaaatattgcgagagactacttcctcgcaaatttgcgaggaatgtacgagtactttgcaattaacaatatcaaccctcgcaaaccactcgcaaaaatctcgcaaatctttaccctaaaccctaaaatatatagaagtgatttaggatctttgatttttatttataaatgtaaatctaaatgactgtataatcatacaagttgattatatggtgatgcacaaaaacatattgtatatgtttcaatatcaacatttcataatgaagatgttaaacactctttcatcataataataaaaacacataagttcatcattgatgtatttgggaaaaatgcacagttggagtttt

SEQ ID NO: 17154 - DNA, 1437 bp, Arabidopsis thaliana landsberg
gtcattgtgccggatataaccgtacctcggttagtcagtaaatcgaattgaacttcatgtcatttacttgactttttagccgtaatgtgatttaaatcagccataacaaggacgatttatcgccaaactcagccgtaacacgcaacctttcgtattccttgacttgttttttttaataattcttgacaactcaaccgtaaaattgttacatgtcttgtctgtaactcagccgtaacgaatatatcttgccgccaaacacagccgtagccagaaatattttcccgccaaaacacggaacctctcgcattcctttacctgtcctttttaataattcttgacaactcagccgtataatagttacatgtcttgagtataactcagtcgtaacaacatattttgccgccaaactcagccgtagtacggaaattttttcttttcaaaacacggaacctctcgcattcctttacctgtcctttttaataattcttgacaactcagccgtataatagttacatgtcttgggtataactcagccgtaacaattatattttgccgccaaactcagccgtagtactgaaatattttcccgccaaaacacggaacctctcgcattcctttacctgtcctttttaataattcttgacaactcagccgtataatagttacatatcttgggtataactcagccgtaacaatatattttgccgccaaactcagccgcagtacggaaatttttcccgccaaacgaacagacacgaacctctcgcattcctttacctgtcttttcttttctataaatcagatacttgaactcatcatttagacgtttcatcctcacattttaacgacatggtgcctcatatcgacggacagtttctaagagatgttgaagcgatactcactgctcctgatcaggtgaatcttccagttctaaaccctggtttaaatacatgagttgacaaaaccactgttacgtggttcagattcaatcaccaactctcgatcgcgattgcagagatacttcaatgcaactttcaccatgcgtggccgacgtaccgcttgactcccgttgaggtcaaggcacgatggttttttcccctcatgttaagcatcaatctttgatttaaagcacagtcaataaaccataaaccaaattcttactattttctatctttgtagcgaaaatacacgtgggattcaaggcacactctaacggtgtagacgcagtttaatttggtggcaagaacgttgtaccgagacaatatgttattagtgtgtatgaagaaaaggagagagaggtcgatgagggcgtgacacctccaataaagaagggaagtagaaaggactcaaggccgaagtcataaagacaaggccaaatatctcctcatcaaagactgaagaaggtaagaattgtggctctaaggaaagctaaatcag

SEQ ID NO: 17155 - DNA, 932 bp, Arabidopsis thaliana landsberg
tataattatcgaaatgggacgactttataacacatttagcttctccttccccctctttttttgatttctcaaaataacacttcagctatacatttcatgggatttaaattatttgcatattttaatttgtttatatctgcctatctggagatatcgactgactaccatgatggttcaaataaaaatttaatcaaaaacagtcctaggttcggatttaattttatgtactcggtcaaatttaagttccatggtttgtttgatggtctggtataatgcatacaatacaacttaaatatcttctagacattatagcatatccaatccattattaagaataaactgagaatattatttttgaacgatcaacaccttattccattgataacatgtaaacaaactacaacaatggataatgatagaatagattcaaacgaggaatgttaaacaagaaacaaatgaagttataacataatatagaatctgtgtttaaaatgtgtaatctctaggcacatttcaaacaaagttgataagagaataagcaaaacactttttgatttatttcattgatgaagcataaaacaaattacaacaatataaagatattatcaaacgaggaataaaaacagaaatgaaatgtgggatatagaaatctcaattttgaatgtgtaatctctaggcacatttgaaaccagatggaaccttcttaccacaatggtttaggacaacgttcaaagaaatgggaacattaaggttgataccaagaacattagcctttagggcagtgcaaagacagaccgcggcttcaagatcaactagacctttgataagagcgcaacagttggacgttggtggcagagaaaccttaaccaaatccaacacgttagcacataccttaagtttaagagcgtctttacaagtgggtttaggagatg

SEQ ID NO: 17156 - DNA, 563 bp, Arabidopsis thaliana landsberg
agtagaaagtaatatctttgagaagaaaaaataagaagaaagatatagttaagggtttactgagaacgtcgacggtggttctgccgttggaaaaacggccggtggggccgccgaaatcgatgccgtaagggaaataatcggctcttgcaatagatctaagacgattgttgtttccattgtcaaccaaagaatcaccaaagatgaagtaacatggaacttgaggctctgcttttaccttaaaccctaaacctaaaagcaaaacccacacagaaactaaacaccatttcctcaagtaactctccatcgatctcacaaaacaaaacaaaaatacttaggaactgaattttatgtatagtagaacacaatgtgttggtgatataagtgttagtgtaggagtggtggtcgttgtggtgaaatgtgaagaaccagagaagttttgagcctatatatggagtctgagaaacgtaagtgtatttatattttcttttctttttttacctttttaaagtttgtggcatactttactttaaaatcgatgggtcaattataattggtattgtttg

SEQ ID NO: 17157 - DNA, 967 bp, Arabidopsis thaliana landsberg
  unsure (1)..(967): unsure at all n locations
tgaaagattaaaagttcctgaggcattagactcatcgacttaaaatcattaagaaatcttcttcaagatttgtgattattgttgtttatgttgatgacataaatataattggaataccaagagagattgatgatgcacgaactcatatgaaagaagaattcaaaatgaaagatcttggaaagacaaaatttgtcttgaacttcaaattgagcatttgaaggtatatttgtgcatcaatccaattatataaaaaatattttaaaccgctttaatatggataaagcgaatcttttaattactcctatggtaaatagatctttaaatgttgaaatgatccatttagaccttgtgaggataacaaagatatacttggtcccaaagtaccttacatgagtgatgtcggtggacttatgtatattgcaaatagtacaaaaccagatatttcttttgctactaatttgcttgcaaggtacaattaatcctctattagaaaacactagaatgggattaaacacatattttattatcttcaaggtactattgatttaacattatattattttgaaaattccgagtttggtttagttggttttgcagatgtaatgtatctatcggactctcataagtctagatcacataccggatatattatttattttgttcgcttagttaacgctagcggatnnnnnnnnnnnnnnnnnnnnnnncactaccacaagttgttcatttcgtcgctgcagacgctgtggttgcgtgccgcgggttttgtgtttttttagatgtcgatgaccgctgactgccgcgggtttttgtgttcgtttctatgacacatccacaattttacatttcatttcttattttatttttataaagttatattttgaatccaaaaaatggaatttaaatatataaatccataagaaatatttttttagctagtaatgattttttgttaaatctataatta

SEQ ID NO: 17158 - DNA, 900 bp, Arabidopsis thaliana landsberg
gccgtgtcggcatacaatattttcccacaggaagtcctcaacttgtttctcggttacctgttggaaggctttagcctcaatccatttggtattgtagtcggtgaggaccagcaggttttttaatctcttcttcccacctgaggcttccatgggacctacgacgtccatggaccacttcatgaacgggtaaggagaagatattgaggacatttcctcgggaggttggtgcagtgtaggtgcatgccgttggcacctatcgcacctgagtgaatgagttatgcaatcggctaccattgttggtcagaagtagccttgctttttgattctgagggcgagggtacgtccactacagtggctaccacattgtccttcgggcatgcttttcatgaggtcttttgtttgttgcccgtaggtacacaccatatagggatctgcgacgctgcgtttcataagtctcccttccatgatgcagtaccttgcactctgggctttgagttttctggcctcccacttgtcgggaggtgtgatccctcgttcgatgtaatcgatgattaggattctccagtcgttgtacattttaggttcgtacaaggcaggttgttcgggggtttcgagctctggctctccctccgctacacttgcctccgcggctgctgcgagactctagccgcggcggtggtgcttcgggttactcgtgtgaagttgcaagttgccgaggtttccatcccagcatgtttgaccgttaggtcgatgctcgggtgtttggggttttcgagctttggctctccctccgctacacttgcctccgcggcttctgcgagactctagctgcggcggtggtgcttcgggttactcgtgtgaagttgcaagttaccgaggtttccatcccaacatgtttat

SEQ ID NO: 17159 - DNA, 1470 bp, Arabidopsis thaliana landsberg
gcaggtcgactctagaggatcccatttctttttgttgcatgttaaggttggcaaaaagtgtaagcaaatcatcctcatcttcactagagctaccctcatcactagatattgtatattttgtggaggctctagattttaccttcttctttttgccgtcatttgtcatgaggcacttgtggccgacgttggggaagaggaaaccttttgttgacggtgatgttggtggcatcctcgtcggaagaggagtcggtggagctcacgtcggagtcccattcccgacacacatgggcatcgcgcccttcttcttgtaatatctctccttctccttcttcttccccttcttgtcgttgcccctgtcactgtcactagatataggacattttgcaataaaatgaccgggcttaccacacttgtagaacaccctcttagagcggggtttgtagtccttccccctcctttgcttgagaatttgacgaaagctcttgatgatgagcgacatctcctcgttgtcgtgcttggaggcgtcgatggggagcatctcgatgtagactcttctttcttcacttccgtcgctttgaatgcgacgggttgcacctcggtggaggtggcgccttgctccaagttgactatgtgtttggagtctttgatcattacctcaaagctcacaaacttgtctatcgcttcctcgagagacattagcttgtatctaggaaccccacgtattaattgtacttgggtaggattacaaaaaacaagggatattagaataaccttgaccattccatggtcatcccatttagtgctcccgaggttgcgcccttgatggaccattgtcttgagccggttgtacatggcttgcggctcttctcctttgttggggacgaatcgatcaagttctccctcgatcgtttcgtgtttggtgatcttggtcaccttgtccccttcatgcaaggtcttgaggacgtcccaaatttctttggtgttcttcaaccttgcaccttgttatactcctctcgacataaggaggcgaggagtatagaagttgcttgggagttaaagtgcctaatttgggcggcctcgtccgagtcatagtcctcgtcccccacctgtggtgcatgcggtccaaattcgacaatgtcccatatgctttcatggagtgagttagatgatgcctcattttatcactccacatacaatagtcttcaccatcaaaatatggtggtttgcctaagggaacggaaagtagaggagcgtgcttggaaatacggggatagcgtaggggcatcttactatacttcttggctcatggcgcttagaagtagtggacgactcggtgccggatgtggagggtgttgaagagtcggtctcgtagtagaccaccttcttcatcttcttctttttcttgtcacccctccgatgtgacttgatggaggaaaaggattcctccttgtacttgttgccggactccct

SEQ ID NO: 17160 - DNA, 1560 bp, Arabidopsis thaliana landsberg
atctcccccaaaaagcagctcagacgagaactcaagaacaaaaaaaggaaaaaggacggaacttgatcagaggaaacaaacgcaagggaattagagagaagaagaagaatcccagaaatttgatcttggcgagaagaagaagtaagattcacttattaggggaaaaaggaggttagtcaaaaagggaattcatgtctgtggagagagaatacgaagaagagagaagagacgggcacgaagcgggcaagagagagagatttgttgggcaataataatgtaaatatatatgtgtttgtttgctaactctctcttctcttctcaacaacagttacaaaacgcatttttcaacagagactaattaattccttcacggacaaatgttccctaattgcattaccaacattttgtttttaatttgataaaactatctatgtatctccttcatttggtcattttttaaaatgtttttcatgatcatttgttatttttcagtttgtatattaagtcgtttattacaatttccaatcaattagtactattcttactaataataataatttgtatttcaattatcaatttaatgtcttgagattttcccaaaacgaaaaatccaccgattattagattgttttagattcggtatttgtttatccgatatcatcagcctattcttttgcagattatatataaattccaacaaatccgcaacaactttaacgtaacagcatgatatgaaaacacagtgtttacaataagactcatcatcatttcttgagttataatagatgagtcctattgtaaacactagacaacttcacgggtgactcatttatgttccatgtaatcatatcttaattcaaacccaactgcactagtccctttcacaatttcacatagaaaattaaaacatcagtagaaaaacaagaagatgattaaaaactgcacatagaaaaaagcatgagcaaaatatatataagtggaaaaaacaattggtctctgcttagctccttccattagaagaagagttcttatagttgtggaagaggtttacgagtcgctccagcaccgcagcactttttgagaagtaacccgagaaaccaaccggagtggacgccggagggaaatcttccgccggcatagcaaatggacgaaccattttctccattgtctccaagcttaaacaagaacctacttcttgaagcctctctggtcccattatcggaagtgtgtgttcccttagcaatgtctctgcctcgtcgtcattattctgcatcatgtttcaatattaccaaaagtttataatatgttcctctaattagttaaagacatcctttgctcttacccttaagggagacaaatcagctccacggctaaatgtaagttcaatgcggaatcttttcgggtcttcaagtgatacctgcatccgttttttacgtctagagtcagacactgagagagcatatacatatattgaagcatgtgtgagagtcaaagggaatgtaatgttaaacctcggtgttcttcaagagccttaggacaatgtaactcatgtaatcgagt

SEQ ID NO: 17161 - DNA, 1043 bp, Arabidopsis thaliana landsberg
taaacggacctgaatttgtttctaaacattccatggggcggaaggtcaactacttgtcctgctcctctaagtcccaaaacactcactttctcaatcacccatcctttgctcaatgcaaacttaccttctttaacttgtgaccacatcttcattgtcccgtttccgaccgaagcgtagaagtcaacgtacgtggactgtccatttcctagcttcatttccggaagctcgtcttcgtctagatagagtttaccggtggcgtaaccttcagaagctcctgcagggaaagcaatgacgaggctaaacggtgttgttcttgcgtccttggaaatcaacccgccttgttgcattggtaagatagtgttttggtaaagatgaacgttcacaaagttcaaaggagctgggagagttacacgtttcccgttcttggacactactgcttgagtcatgtcgaacatgtggtaccaagaacctggtgggaacaatgcttctacttcggttttgccttgctcgagaaccggagatatcattaagctgcttccaagcaagaactgtctgctgttgccgtaacattcggtgtattcagggaatgagaagaagagcggtctagcgatgggtgcaccagtcatatgcgcttcgtagttaaaagtgtagaggaaaggaaggatcttgtatctcataccaagagcgttacgagctgagtctgcaactgtgtcccattggtaaagctcttgtcttggtgagtagtaattggcgtgatctcttgaaaacgggtaaaacgcgcctacttcgatccaacggttgcagagttcttctgttggttgtgggtagaatccacaaatgtctgaaccaaccatgggaactccaaatataccgaagttcaacatagttgagatagacacttgcaagctctgccatgttccttggttatctccggtccagtgagccgcatactgacccgaaccaacgaaagtagaccgggataaaatgaagggacgtttgccttggacattaagtaagcccttgtgagttgcgataatctcaga

SEQ ID NO: 17162 - DNA, 1503 bp, Arabidopsis thaliana landsberg
aatacctcaagagtattggagatgcagagaaatgcaatgaccgtaaaggatatagcggttgcgacggtcttgtatgaccgagatgctccgccatattttgacgatcaagggaaggaaggtaaaaaaaaaattcaacttgctaaatatattgttagatagctacaactgttgttatcgtcaggaaagcaagaagttaaaagtatatctatatattatcatacatatagaagagtatgtgtttatcgttagcgacagataacaacattaataaaagaaaactttatcttcaactttctatatctcgctagtaataatattatcgaattcattaacatatcgttaacgcctgattcgttgattgacttgcagatgcccttcagcgagccctgaaggatgctgattacgagggggatgacatttacatcagccgcatttttaagaataaagaggattgttcaactaagctcgctattcatgcgatccggaggaagttctatttcatttacgcaaagtccgggccaaatgttgtggcggctgtgtgcgtcacgcatacatgtccatggtgggtttaccaactaagctgccagatagggatatgttcgaggttaggagcacgacttcaacacacacgtgtagcgtggatgctagaggggacttccacaagcaagcatcaacgactgtgattgggaagttgatgggaactaaatacataggagtgggccgtggacctcgacctaatgagcttagaagaatattacgccaagagtttaacctcaacgtctcttattggaaggtttgaaggacaagagaaatagcgatggacaatgcaatggggtctgctatggggagttacgctctaatccaaccatactttaagctgcttttggagacaaatcccaactcacttgtggcaatggaaactgaaaaggatgcttcaggggtagagagattcaagtacttgttttttgcccttcatgcctgtgttctaggttatccttacatgaggaagatgatagttatcgacggtacacacctacgtggacgatatgggggatgttatttgcagctagtgcgcaagacgccaatttccaaatattccccattgcatttggaatagtaaacagcgagaacgatgaggcgtggacttggttcatgactaagctgacggaagctattccagatgatcccgagttggtgtttatgtcagataggcagtcctctatttatgccagcatccgcaaggtatggaattaatctctatgttatccgataatgtggggtttaccatcaggctttttatgtttacataagcctttttgtactgtaacaggtttaccccatgtcatcacatgctgcttgcatcgtccacctcaagagaaacattgaggcatactttaaagtcgaacagttaagtgccttggtatcaagtgcagctagagcttatcggctaactgacttcaacaagatttttgctgaaattaaggctacgcatggaccgtgcgc

SEQ ID NO: 17163 - DNA, 1104 bp, Arabidopsis thaliana landsberg
cgtcgaccaaataaatttgaagtttatttacttacagccatgttggtttattatttacaaaataacctttatttaaaaactacaaactatatatatgcatcgatatttaggagaatcttaatgttattaatcattataacttcactatatatcatcttcctctcctttcttcactgcatccttcgccgatggtcgatttaccatcgtttttgtcgactgtccatcgatcacaataggcccaccgtttgtgatgctcatttttggcatatccggagatttcgtcttcatggagataaattcagggggtttgtacttcctgacgtctggtagggtcggaggcttcattagaggaagcattggagtgatcttatgggccactgtgtctaaatggtaaccgagaaatctggctgaatctggttaaattgatgaatccggctgaattgtttagcgagttttggctgaatctgactaaagatctttgaattcaaaagttaatggctgaatcttgatgaatcatgatcgtcgcttgggaggaacacacttctgctgctgcgttacacttttcagatcaccattcacactctatggcgagaaaggaatactcgaagacatggagagaaggaacctatcacagcattggctcttggaaaaaccgtcgacaaaaatattcgcaatcggatcatcgttcttcagaaaaaaggaaatccaaaatatgatgatttatttgtgttttggctttccactaggttctaatttactcaggtttagataaagtatgagtcaaaatatcttaaacaaagatgcacttgttgtaacccaggttttttttggtgaataaattttgcattcattcaaaaaaaaataaaaaaattcaaaacatattaattaaataaagaaacatatgaacatattagttacataattttattttgtcaacaagaccaaataaaaaacaaatgaaaacattacacttgaaatatatgattgaataactttattaaacacaaggtaataacttaatttagaaaagttccaatttgtaaaacattaagaatgtattaatacatttaatctttttcaaatataaatatcatataaaagcat

SEQ ID NO: 17164 - DNA, 537 bp, Arabidopsis thaliana landsberg
tatgaacacactgagatctcgagcggcaagttggtgatcgaagtttcctactttggatggcatattcattctgagacacatgatctttgtgatgagacaagttgtcctgtggccattggagatttcttggtagcgcactcgcaagttcttcccggatatacccctcctgtaagttttttctacttatctatgtgggttttgttgattaatacgaagcattttggatataatgacatgatgatgcattatgctcatttgaagttgatgtaattctattgcagtcataacaaattgcctagtgtaatcgaatctgtttagttggataactgaaatagactgagaagaggtttaacttggtttcgatagcatattatgagttccatgtggaagtattatgtctattaagcggctaaagtgaagaagtttaaccttcttgttgtcaagatttgctggttatggtttctatagttatatgtttgtcataccaaactttcgttttgtgtttctgcctttaaagaaggaccagtctaatccttt

SEQ ID NO: 17165 - DNA, 3411 bp, Arabidopsis thaliana landsberg
tgaacaaacaataaatcccacattggtaccatctttggataacgaatcccccaaggcacggacgctacctaaggttttttgggatgttgctggccacgatcacctccaaggaagttgacgagcagatgctgaatgtgcagaacaagaactcgtcctactttgtggagtggatccccaacaacgtgaaatcgacagtctgtgacatcccacctactggtctgaagatggcatcaactttcattggaaactcaacatcaatccaagagatgttcaggcgagtgagtgagcagttcacagctatgttcaggagaaaggctttcttgcattggtacacaggtgagggaatggacgagatggaattcacagaagcggagagcaacatgaacgatcttgtgtcagagtaccagcaataccaagatgcaactgcggatgaagaaggtgactacgaggatgaggaagaaggtgaatatcaacaggaggaagagtactgagaataatttagttataactgctttaaaaacaaaaacaatttagtcgtttgctacttttcttttttttaaaaggaacacctcaactaccagttgtagtttttttctctgcttgtatttgacatatctggttgatgtttctgtacttttgttcttaatcttgttattgcctgtgatgtttctattgatattttccagttgtactgtcttcaatctttggtcttctatcctcatctttctgctacctgactacctcagtacctacttaaggactttaggtttgatctgattggaaaatagattaaggttcgggatttgtgacctcagggcaagtgcagctccatattagaccccaaaacaaatttatcactgttctgaaatacaaattccccaacatgcctagctttgaggattgattgttttctaagctatttattttctttaccaattccacatatacagtttaggataaaagcgaaattgtcttttttcaaacacgttctcttccttttgttaacaagcaaaataacatgtgctcttccaattttcattttctgcaacccttcatgaatgggcccaaagcctgccacaaacatgtgcacaatattacaaactctaaaaacaaaaacaaaataaaacattcttttttgccaatttgtattttaatatcaatttgaatcaaactcatagttttaaaactcaattttgtaatcgaaaacaatattttttttttttttaaggaaacttacacagtagagaaagaaacggaccattttaaaattttgaatttcgtaaacaaacaaaatagtagcccttattagataattgggaaaaaaaaacaagaaacaaacacagagaggagtgagcaataataaaagctcactcactcacacttttattcatttctctgaaaacccttaaatctccggatttcgattcccgaggctcgaaaaaccctaaatctcttctccgaattcactcatccaaccgaagatgcgtgagattcttcacatccagggtggtcaatgcggtaaccagatcggcgccaagttctgggaagtggtttgcgccgagcacggcatcgatccaaccggaaggtacaccggagactcagatctgcaacttgagcgcatcaacgtttactacaatgaagcgagttgcggtagattcgttcctcgtgcagtgctcatggatttggagcctgggactatggatagtctcagatctggaccgtacggtcagacctttcgacctgataacttcgtctttggtcaatccggtgcgggtaacaactgggccaagggacactacactgaaggagctgaactaatcgattccgttctcgatgttgttcgtaaggaagctgagaactgtgactgcctccaaggttattcttctccttcttcttctagatctgtttgtattagggttgattgagctttactggagttttaaactgcgagatttgcttctgtagggttccaggtttgtcactcattgggaggaggaactggatctggtatgggaacattgttgatctctaagatccgtgaagagtacccagatcgcatgatgcttaccttctcggtgttcccttcaccaaaggtttctgatactgtggtggagccttacaacgctactttatctgttcatcagcttgttgagaatgctgatgagtgcatggttcttgataacgaggccttgtacgatatttgcttcaggactctcaaactcactacccccagctgtaagatttcgttacccaattgtgctcttttacaaatgttagattagtcgctctatgcttaaaatgctatgtctagatggtgattatgttaataattggtatcaaattcagatctgcaagttttctctatatataacttactgtttagtcactgtttctagtggtttgttcatgtctatatcctcttgtcttgtgtgctattggtttatcaatgttgagctcatcactataaatccttaagctgctctttaatcttattggaacaaaactttccggtgaagctgcaagtactttctagtttaatcttatatgttgcttgctgttacatatgggatatgaattcattgatgactatcgatttgtgaaagtatactgtcttctttataatatacttgtttctgcaagatatgttgctatgctcatcatgttgtttgttgtatgtgtctatatggcttacatacttggttcattctctgtgtgcagttggtgatttgaaccatttgatatctgccactatgtctggtgtgacttgctgtctgaggttccctggtcaactcaactctgacctccgtaagcttgctgtgaatctcatcccattccctcgtcttcacttcttcatggttggttttgctcctctcacctcaagaggttcacagcagtaccgctccctcacagtccctgaactcacccagcaaatgtgggactccaagaacatgatgtgtgctgcagacccaagacacggacgctacctcacagcctctgccatgttccgtggcaagatgagcacaaaggaagttgacgagcagatgctgaatgttcagaacaagaactcgtcctactttgtggagtggatccccaacaacgtgaaatcaacagtctgtgatatccacctactggtctgaagatggcttccactttcattggaaactcaacatcgatccaagagatgttcaggcgagtgagtgagcagttcacagctatgttcaggaggaaggctttcttgcattggtacacaggtgagggaatggacgagatggagttccagaagcagagagcaacatgaacgatcttgtgtcagagtacagcaatccaagatgcacggctgatgaagaaggtgctacgaggatgaggaagaaggtgaatccgacagggcagagagtctgagagtatttagtg

SEQ ID NO: 17166 - DNA, 4278 bp, Arabidopsis thaliana landsberg
gcttattgccttgattatacaaaccaaacacatgcactaaacagttctaatcagatcctgaccaccatgttttttttgctagcccacacaacatcctagattccataccaaagcactcaactatatccactaggctatcatcgctgggtctcatcaatcaagttaatgtttaagaaccttctagactcattcctgtattataccatgacaaatcgaccattcattttcttcttctttttttggtattctttctctcccctagacttattcttttaagagaggaaacaaagggtaactcgcatactggattgacaccctcggcatttttccaacctttgtaattgatcattccaaataatgtataataatggggtcataagaaacattcctacccttatacactattcgaaaattctatcaatctctcatatttttattatatatttttttataaggggagaggaatactttcttttatcacattagtcgacttatcaggtatgaacaagcagtcaagtcctatgaacactaaccgttttgatgaggtaaaaggaagagcaatgagattagctccagcctctgtggattatgttgggaatggatgtccttaagtttgttgattggctttctggattttccattagtcggattgatttgaatctgcagtacttaaaccatccatgcaataaactcgagagatagatcataatttcagacaaaagttttaactcaataaaacgactatctaagttagaatgacacaactgactcataagaaaagaaaagatgaagttagtaactgactcccccagacttagataacattgtccccagagtcattaagcaagaggaatcgaaagaaaaataatcaaaagttaaaagttagagaaacgtgagttgccacctgagagtggtgtcgatcgattataggttggtgtcgatcgacactcaggtcatttttgcatcgctttgcgaattcagctcatcgttgtagagctttggttagtgttttcaaatggatcctcgagttagactgttaaattactaaaacacacatcaatagttccaacaaagcataggaaaataagtgcaacaagttccaatacaaataacaaatagtctgaaataaagcaaaaacaaaatcagaaaacaaagcaagatagggaggatggctagtcctcatgctctgagccggaggtgggtgcgggagagcgacgacggcgacgagtggaagcaacacaaccgtatcgagagagtgtagctatggcgttccagacgctcttgaagttgtcgacgatgtattgttgaaagacatatggctccatcgggataggaggaggagaaggcagctcatatggtagagctaaagaagaagatccaactctcggaccccagtagggttaatgaactcatcctcagtctgagtcggtgcggatcctgaacctgaacgtctttgtgtcctggagcatggtgcggaatgcagacgagaaggatcatgatgaaaaccaatctcctcatgctctcctgtaatctctgtaagtgcagggcaaggtaactgaatcatatggtgtcgtgtctcatctctgaaacaccaaaggaagttgcctttcagcctgtgaaagtttttaagattactttcatccattgtgaatctcgtggtgttgacctcttctccttcaaagttgatgcgaaaatgctcaaatataggagtgagaagactgccaactctcttagatttcctccctttacgtgtaaagggcttggtcttgagtgagaccaagtgatgagcaaacacaccgccaaagttgacatcgcggtcaacctcctcaactccaaagctgtcaggaaagaaatcatgaacaacatcgtttctttgttattgtttttaagcatgttgtgtgagtagtgattaggatttctgaggatgggatagagtagttgtggaacccctagtcgaatatgttggttaagtgtagatatcttgaatcccttctcgattagttgtgtttactgcttattcgtttctgatcaactggaatccgatcccagacgttccagcgcccagaaggcgtttaatggaacgttggatctactaattccagtgataatcgtctctatcccaagggattggccgtttagaacggttattggctttaacagtcggttcttattgcctgcttagttagagatcgctaatggaaattaggtctgtgtctagctatgcttgaggatttctatcacgggagtgaattaatctgttgttgaacctgttgtctagggataacttaattgagatttgttaaccaactgaattgatcagggagaccacacgattcgattactccatccttaggaatttctcatccaattgatttctctgtttacttacctgcttcattcagttgctattgaattttagtatttttctgttttcaaccgttctactcgatcacaccagtctactaacagtgagactgcctgatagagtaaactgatccatttctgcattttcactctttgtcatcctgttgtactcgatcacagggtcccttctggcagtcgacccagcgatcgagtatatcagtcatctctgtgactttttactgttttctgcatcaacactaggactattagaaaaccaaccaaattctgcctggcttgacttagcaacttctgatcatatctcatctgtctacatcacacccatttggattgacacctaaaatactacaacgataggatagtgttttaggattaattgacaaaaaaaacctactatcatgcagcagggctcggtgtcgaccaacacaccctgggtgtcgatcgacaccatcaggagcagcacgcggatgcaatcggtgtcgaacgacacaacaatggtgtcgatcgacaccaacactagattcctgcaactattcctccagatgcggaacacgtcgtactcttggggatttcaacagatcagacctgttctatgcaattcgatcagcgattgtacccccaccattctagagaaacgactatgagctgaagcctggctactttgctttagttggccagcatcctttccatgacttatctcatgagcagccaatggatcatatcgagcgatttgaggatcttattttgagcatcaaggctaatggagtctcagaggactacctactgtgcaagtttttcccttattcacttgctggggaagcagcttctttggtgaaacaacttaaagcagggtccctcaagacttggagaagcatcaagatagcctttttgaacaatttctttgatgatgctaagtctgaggagctgagaaacaagttgtctaccttcacacaaggtcccgttgaggacttcaaagccgcatgggttagattcaaggagtatcaacgggactgcccacatcatggcttcaatgaggtacaacttcttggtacgtttttcaatggagttgattagagataccaaatggctctagatgcagcgagcaatggtaacttcaacacgagatatccagttgatgctactgctctgatagagaacctagcttgtagtaagagcaccaagaatgctgactttgagaggaaaaagattgctggagctgtttcaggtaatcaaattgcagaggtacatgctaagctggattcagttcacaacctgcttacagggaagaagcatgtctaccttgcagctaaagatgagaccattgagccttagattgagtcagaagaaggagtcttctacatagatggtcagggatacaggaagtttgggcagccacagggcaacttcagtggcaacaggtttacagggaactagggttctttcaactacactccaaagcctgctttccaaaagacctttcctcaaagcatctttcaaaggaactatggtaattcaacttaccaagccccccctccaccctcagcagagacaagaatggaatcgatgcttgagcagattctagagagccagactaagcttgttgtggagtttaatggcaagtttgatgctgtctacatagatcttaatgggaagatcgataatcagagctctcacttgaagaagctagatgtacaagaagctcaaactgcacaatctatcaagagacaagagggttttcttcctggtaatcctgatgctaacccaaggaagaaccgcaatgccatcttgatcagagaaggagatgatgtgtgggaggaattggacactgaagacgagttggagctcgcagttgcagagatggtgttgaccgacaccctcctgtgtcgatcgagaccc

SEQ ID NO: 17167 - DNA, 2172 bp, Arabidopsis thaliana landsberg
aaacaggttctcgaccaaggctttcctttataattacatttagatatttgcttaccaatcaaagcttaaagtacttttatcaaccgtataccattaggtacatgaattgtatgttggcatgggcggccgagaaagatttggattgggcggtttgggcggttacgggagtttattatttccgcgaaggcaaacgtggtgtagttgaagcttacggtatgttagatgcgaattggcataatgttcataactatacttatctccgtaggctctccgtcattcaaccaccgcacacaggtattcatcaatcttgcttgtaatttaaccagattattattacatatagtttgatgtaaatttaataaacaggacccggtgtaaagcacaatcatcacaagaaaatatttcatccgttaaccggactctgcctagtgagaaagtcacactgccatgagtccgagctcacgttaggtccatgcacaaaggacgaaccgtggagctattctcatggaggcatacttgagatcagacgcggtcacaaatcttgcttagaaggagaaacagcggtcggaaaaagtgtgaaacttggcaggatatgcacaaagattgagcaaatatcggccacaaagatgcatttgtcgttcaacactagtgacggttcgttggtatgcttagacgtggattcggataacaatgttgttgctaattcttgcaactgtttgaccggagatactacttgtgaacctgcaagccaatggttcaaaatcttctgaggtttatttgttgatttaagctaagagagaataattgtctaattaggattagtgaattgttagttattctacgtttcccccataagcttcgcctctgtgtttttatggcaaagaaaagaacaattctccgaaacgatgacgattttgtaatgccttacttcttcacaaagttaactcaaaactttttaggttagaaccctaaagcattaatattaccctagttttcatattatcttttaaggaaaaaaaacaaacaaaattagaccaatttgatgagaaagtatgcaaaaatcctccacctgaggattaaatttgtgtaactattacaatcttttcacatatcacaatcaatcattccatacatggccaatacataaccaatacaattctgtaatagtaacttacatatgataatctattttagctactaagctttactatctggatctcttacaccttctacaagattcggttactaggtaaccagcctctccatctccatgtatcatgaagacactaatcatcaacatgtaatgcacacatctaacttatgctacaaaacattaaacagatacaataaatgcttacttggaaccatcattggtaattcagatagcggagagcaagagtatcattaggctttgagtctgactatcagatacccatatacttgacctgaacctggcatatatagcagcttgaaactatagaaattggagtgatatcaagagcaactgtaatttcctttccagtttctaatacatgagactgcaaatagtcttcaccttggtcatttaccggctattcaaatcaaattctcctgcttcacgccagttttcttgttcccctgtctctccattctcattctcctcatcattcaagaaatcttctgaaggttccttgtcctctctctgactgttgtttccccatccattcatcatctcatcagggttcatgttacgtccctgttctcccatctcgtggctaagctgaatattgctgccctgatttccaaccgcattagcccttaatgggttacgagccattatctcagcatgagattgagactgtccagcttgagctaaagctgccatccgcagcttagcctcctgagcctcccggccagccttctccctatccatttctgctttcagttcaatcaacgctttcctttcatcttgtagcaaagcttgttctaccatcaacctttcctcagatctgaattctcccatagctctctttcgagttattatgttaaaagctagtgcttgcttctcaaacgttgccgtgaattcagcaactttcgcagcaatgttgttatcccattgttgagagcgggacaaggcctggcctgttgggtctgaatcaaggattctatcatcctcttctgcttcgtaatctg

SEQ ID NO: 17168 - DNA, 667 bp, Arabidopsis thaliana landsberg
gatcagagcttcaacaaggaggcacagaatcattccatgaatttttggagaggtttaaggactattacagggagtgtcctcatcatggttttccacgggctacattgatcaacactttctaacggggagttgacaaggcatacaagatggcattagacactgctagcaatgggaacttcatgcccaagacagagactgaagctacagagctaattgaaaatctggcagctagcaacaataaccacaatgttgactatgacaggtccaatagaggtgggggaggagaatcgaaacagcttgttgagttggccgacaaggttgagcagcttttgagtacagataaaaaagctgtcaatttttgtcaggattccagcaaaggtgcggtgcatcaagagttcaatggagatggttttgaagatctacatgcatagatgaactttgtgaatgggtatgggaactatcagaacagagggttcaaccagaactacaggaaccatcccaacctttcttagaggagtacaaatgttgagaatcctcaagatcaggtgtatccaactcaggcaggctcacaaggtcagaaatttcagcctaactgttttcagaataaagggaactattagggacaatttcaacctcttgcaggtaccggtcatgcgtcttcatgtgg

SEQ ID NO: 17169 - DNA, 976 bp, Arabidopsis thaliana landsberg
gtctccaacacaaatatgtgacagtgaaatttgttgtctgcttaatgttctttacgtactccaaataaataaaaatgtatttagatttcgttattgattaattttttagtttatacttatcaatatatgaaaatacaacctgctactagtattgttccgatattagactaaatgcacactcttgttgttattattattattatttttcactcttgttgttatgtatgttcatatagtggttttactttataatattacacatacaaagaatcgtataaaaatatatgagcaacggaaatgtggaaatgatatgtaatgtctctaacctttcaaaaaatctaattgcaaaaagaatggagtaggtaacaaaggatacattgaaaaataaaataaaaatagcgcataattatgtgattgcataatcatatatatatatatatatatatttataatcatatcatatgaattattaaaaactgcaagaacataatacggatacccaataattctacatgacatatttgaagggttgtaaatttttttttttttttaaaatatatttgaagggttgtagtgtgacaatacttacgacttacaagtggcgatgaagcaacgtggtagcaaacgaggcccatggtcatgtggcccccggatgcgtaaatcaacacgaacataacatagcaccaccaatgaacaaatatctatacaaggttggtcgaaaatatatataatttatggtagaatatatttgtcgaacgatcaatcaggaactattagcagatgttctctgttttcttttgccatgtgaaacccacatgacactttgacatttgacaagaactcccatggcatccatccttattaatttcttttcttttcgctcccatgttttgcctgttagtcgataactattacatataaattaggcagtataacaaaaaaattaggcagtatcaagaactcccatgtttgcctg

SEQ ID NO: 17170 - DNA, 1167 bp, Arabidopsis thaliana landsberg
  unsure (1)..(1167): unsure at all n locations
acagggtggttgttcgacttcaattgattatttatctatgccagactttttttcgttcatatgagcttgattatctcataccaatgtttcttattataaccattgcagaaacggccaggctcacctaaacagcgggatgatactccatctggtaagcccccgctaccaaacaatactgcatcacaattcaggaaaggggcttaccacgagtcgttggagtttgtacaagcgttatgtgaaacgtcatatggtttggtagatatctttcccatcgaagatcggaagattggtcttcgggaggtgaaactgacttttcttattgataattaaatttatgtcaaattctacctttgtagcaactgactaaattttatatttcttttgtttggttttagtctcttgcagagatcaattttcatttatcggaagctgaaatcactggaggtatttttctaaaattatattttaagagttattatttggaggtctactttatttgtgtagctcaaatatattgagccggtatatattctataggccatgtatgcttttctctgaaatagtatgtgaacgtttcatgccctgttaaagtttctgagtgctcatcgtgttgcttgtcttaaattagtattatgtccgntatatcatatttatttccactcttgtttgaagaatctatgtttttccatccttgctcttttatcacttattttcctctcttgtataggatttccttgcacttgtgtttctttcttgagagaattatctggtccaatctttttggcttctaaacctccgcgtttttaaggattattgaattctttattttatatttcgtcaacattgtttctgttgtggtaaatgtttttgttatcaaattgaatttgtattcataatttaaattcaaataaccttccaggaatttgttttccaatggggagaggagtttttcgtgtggtccatattcctgaagacgaatgcattcttttgaattctagggaaaaggcgccatacatgatctccgtagaagttttgaaagcagaaacacccaggtaaaatctacttcttttaataggaagttaccttcttttttatatcccattaaccatacgaagtgtgaaacttttcatgataaaactctcccattggtcttttttgttttctgat

SEQ ID NO: 17171 - DNA, 763 bp, Arabidopsis thaliana landsberg
taataaaagaaaatagctgatatataaagtactaattttgaggacaaacataactactgatactttgaatataatattaatctgatgatgcccaatatcaaagattccggtaagtgaaagccattcatactcaatttcatagagttatttggagtattgatcaacgaatctggaatttgggtataacatgtctaaggagaatctacgaattgatgcaagagaagatatcaagtaacatcaataacattagacgattatggagtttcatcgaagagatgataaccaagaacgacgatctcatcaatttgggattgaatctgaaaaggaaagaaacggttgactagcaagacttcggtttctaaagcatagtcgaaattcactttttttatcgtttattaaaatatttaattataattgtgtggatgtatgtttgaatgtgtttattaataatgtattacggatgtatcaaactcttgtattcgattcaaaatcaatgaatgaattatgtgtaaaaaataaagaagaaaaagacaattaaatcttatactgcaaaaccgcaaatgttcagttaaaagttgttttaaatcatgaatcttgtgtcccaagtcccatgaaaaccaaaccaactatgagttggtctagtagttaacctattaaaataagccacggtagaggattctttgaaattaccgggtttcctcaaaaccttaaaaaaaattaaattatttatctttttcaaaaacctggataggaaccttttttt

SEQ ID NO: 17172 - DNA, 1305 bp, Arabidopsis thaliana landsberg
  unsure (1)..(1305): unsure at all n locations
agaggatcccttccttttgagctatgttaaggttggcaaaaagggaacgcaaattatcttcctcatcactagcattgtcatcactagaggattcatatttagtggaggatttagatttaaccttctttttgtcgtcctttgccatgaggcacttgtggccgacgttggggaagaggagtcccttggtgacggcgatgttggcggcgtcctcgtcgtcggaggagtcgcttgagctctcgtcggagtcccactcgcgacaaatatgggcatcgcgcccttcttcttgtaatacctcttcttttcttttcgtctccccttcttgtcgtcacctcggtcactgtcactagatataggacatttagcaataaaatgaccgggcttaccacatttgtagcaaaccttcttggagcgggatttgtaatccttccccttcctttgcttgaggatttggcggaactcnttgatgacgagcgtcatttcctcattgtcgagcttggaggcgtctattggttgtcgacttggtgtagactcctccttcttctcctctgttgccttaaatgcaacgggttgagcttcggatgtggtggcatcatcaagctcgttgatcttcctcgagccttcgatcatgcactcaaaacttacaaaattcccgataacttcctcgggggtcattttagtatatctaggattaccacggattaattggacttgagtagggttaaggaaaataagagatcttagaataaccttaaccatttcatggtcatccactttacgctcccgaggttgcgcacttggttcaccaaggtcttgagccggttgtacatggcttgtgctcctccccttggtgaagcatgaatcgaccgaactccccctcgatcgtttccctcttggtgatcttagtcacctcgtctcctttgtgcgcggtcttgagtacgtcccaaatttctttggcacttttcaacccttgcaccttattatacttctctcgacttagagaggcgaggagtatagtagtggcttgggagttgaagtgccggatttgggctacctcgtccgagtcatagccttcatcccccacggatggttcctgcgtaacaaattcaacaatgtcgcaaatactagcgtggagtgaggttatatggtgcctcattttatcaatccacatacaataatcttcaccgtcaaaaccggtggtttgcctagtgaggacagaaagtaaagaagtgtgtttggaaatgcgaggatagcgtaaggggatcttgctaaacttcttcggctcatggcgcttagaagtgacgaacg

SEQ ID NO: 17173 - DNA, 643 bp, Arabidopsis thaliana landsberg
tttataattttgctttcggtttaatcaaattggtttagtagagatgtacacgtccattctgttctactatgcaatatcttttttttggtattaaaaataaataatccaaggctgttttccccctaattaaaataaaatactaaatctctcgttttatgcatacaaaattccaaaaagatttgtcgatttctttaacaagaaaaacaaaattgtactaatgcaaaaggaatgaataaaaataaataatgagaagtgtagaccattaagcagacaagatgcaattaaacaaatgtaatattatatgtaacccaccttcatcttcacctttgccttgtttataaaatctctctccttaaagctatactcaaggttagatcaaaacctaataccaatagcaattaatcacaaaaattaaattcgacctttaatatcaagaaccgtcacaacaccatcatcatcatgactagttccagctctagctctggctctccttgtggtgcttgtaagttccttaggaggaaatgtgcaaagggatgtgtgtttgctccatacttttgtcatgaacaaggagcttcacactttgcagccattcacaaggtctttggagctagcaatgcttctaagttgctctctcatcttccca

SEQ ID NO: 17174 - DNA, 1465 bp, Arabidopsis thaliana landsberg
  unsure (1)..(1465): unsure at all n locations
cggttattgcatctccgatcgttgatgatttattttgtagcgcatcgcctgtgtatggagctgctgggtctattcatacgcctctcgctgcccgttctcgttccgctactcatccgtttgaaatctctgactcaccggacaacatccacagtccttaccatcttcacagctccgatcatccaggtttagttctcgttcccgatctcttagatggaacaaactatggaacttggattgtggctatcaccactagtattgaagctaagaataagcttggttttgtggatggtactatcgttcgacctgaggaatatgatccatactacctgatttggaagcgatgtaacagcatagtcaaatcgtggttattgaacagtgtcacgaagcagatctactccagcatcttgtactttgcgactgcatctgagatttggaaggatcttcatactcgttttcacaaatcaaacctccctcgactatacaagctgcgtcaacagatacattctcttcgtcaaggtaccatggatctctctacttatcatactaagactcaatctctgtgggaagaactatccagtcttcaggttactgctcgatctgttgaagcnnnnnnnnnnnnnnnnnnnnncaatcgtgttattgatttccttatgggactcaatagcaactatgatactgtcagaagtcagattttgatgaagaagagcttacctagtttgtctgaggtctacaatatgttggatcaagatgattctcagaggtcagcttgtgctcaaactggtacattggattctacagctttccaagtctctcaacagtcagctcagggcacttctggtggttttcagtttcagcgaaaggacaaaccaatttgcacttactgtggacgtgttggtcatgtcatggataaatgttacaagaaaaatggctatcatgttggtcatccacgtttcaagtcttctaaggctccagttactacggctaatgtcttggtggatggagatattgaagctaatgcagttgttgacaattgtcataggaaatgatgacctatccacagaacagatgcagaagattgtctccttcctcaacaccagaattcatagctcttctcccacacctgaagttcacgctgtttcagtgccttccctccctactatatcagccactggtccaacacctggtatctttcatcccactatcatttgttcttttaccagtgttgatagaccttatgcctgttctacaaatagcaatctcatcgctattaacgcttgggttatagacacaggagccactaatcatatctgccatgataaaacttccttcaccaatttcaaaactcttgaaaacaccaatgttaatcttcctaatggtggtcttgtgagcattgttggtataggaactgttactntgggtagaaatcttgtgctccaaaatgtccttttcattccccagcttaagt

SEQ ID NO: 17175 - DNA, 3868 bp, Arabidopsis thaliana landsberg
  unsure (1)..(3868): unsure at all n locations
ggatccttttccagctttccaacttcaataataagtctttgagaccttaagatgagattttcctttttttccatttacacaggttgctgattttattttagcatgttttgtgttgtcaataggtagattagttcaggatttggtctgtggacaatggacaatgaattttgcactctcttgttttatgagcaacacaagcaaaacacacaacatataaaagatacaagtatgaacataggatactggagataggtgataatctgtatcacaggttagtgctgatctcagaagcagctcaaagatgacttcttgggtatctttcctgcggcttgaaacctagcagcagcttcttccgcatcaaggatctcttgagcccgtctggtttgaacatctgccttcttcttttgtgcctttgcatgaactgccgctttttcgttccttagtttctcagatttctccatcttcttactgtccatcttccgctgtagaaaacaacaattttttcgtctgtatgttagttctttgacgacatgaaatgtcatgtttcatagtcttgtaccatttggttaacttgctgtttagatagattcatgtttttgatcatacactacaggctacagcagtagaacagtcttaagcatacatgagtacatagttcagattaggaattggtagatgtcttttgtggaatcacctgaattctagcgagttcagattcgatctttgtagttttctttttctcccatcctgaaatatctagtagcttcttctgagtcctgcaatcagagaatctgtcacagtggtactgaaacgacgctgaaaagtgtttgtgttgtgacttacttgttattgacctttgttatctttagttccttccatgccttaataacttttgactgctcatctcctatgtggtagtaggtataaactaaaaatttaagatacaacatgaatctaaacaatactgatatgagttacctctttggatcggaatatttggctccatttgattgagaatgagtttcaggctttaagttctagttgctagttaaatgcacatttaggtctatttatagtgaagtaacacacatgttcgattacaaaaggtgaaaatttggaactgtcggtttcaatgcattggtgtcgttttatgtcttgagggaatatttgaaaaccatcgttcgttttaaattaatatgtcgcaaggaataaatatatcacaatgcttgcaagctagcgaatcttgatatgattggcgagcactaagtgttgttctaattgctcttagtttataatttggttagtttttataatcctttcattgaagaatggaatcccccatataaaaaaataagatgcatgtgttcaatatatgccaaagcattccataccaagtccccactatggagtaatttcactatctaatatctatctttgcaaaataattatcattcttttttttctttcttgtgaaaaacaaaacaatttaaagacattgaatccacacaaaatgtaatatagcggacaagcaaaagcagaaatggtccaagaaaatggcatgttaaagcttaacaatttgaaacgaataaaggatgcattagaatgttgttgttgctcagagattgagtcgtcctttgatgatgtcaaggctcatctcactaggatcagttgcttgcaattcaacttgaattccttccatttctctcttgaacctgtcttttgagcttgcatacaacatcttactccgaactctcgatgtatcaggtgacctgatcaatacaacacattcatgagcatttgaaatcatgtggaaaaaaacatgttaaggagagcaatgtgttgttaccacgcgatgaaaaagatcttgctcttctgacaattgtcctctgtggtgaaatcaaaatcatagacagcgtatcgacattcgtcatcggggatagagctggtgaaatcgtcgtaagtttcttctggattcccaagcttttctatttggacttgctgagccttctcatcgattttgaacacaatgaacctgtatgtcctctttgctttcaactctaagaacttaatcttgcattcatcattcacatgcatcccagacgctgaattagcctgcacaacacacacacacacacacacgtagtcatttatttatacattaagctttttccattctatacatcttcctaaccagttaccataaaacttagattgtgatttaggatcatagcatataaaccatatgtccacaacatcattcttaatgaagtcaatatatacatgaaacctattcatgtgttacacttccaaaccaaataacacaaaaccatatatattcaaccacaccatccacatataaatttcacatgttgacaatcagaacataaacagaatcaatgcatcatcatcatctacatcagaagattaaatgtaggaacttaccatattttctttggagaatcgaactctaatcttgtgtttgatgattgggaaaaatgaagaggatagggaagagtgaggaggattgggggggtttatgaggttgaggaaaaacacaaaagttgggtaatattcttttggtctttaggctgatcacgtcttgaagtagatgactttgatgctatcacgtcgtgcccatttttttcaaacctatatatagttttaatccttgataatacatataaatctatatttatttgtgtttgttgcatatgagctcaactttggtcgggagatcattggaccgttgaagttttcatgatgaacatgttatatatatttttttctcttctatatactttgactttagcctctatgctaaatattgttttatgcggcccaaacgaccattgaacccataattgggccttgttcacttctgggcccaatggcctttttctctcttttccttcactactattcttcttcttcttcgttcttctacacacgagcgcgcctcttcttcttccttaaacacacatctctctacacttcattttctcacctttctcttctgatttcacttgtacacgattaagcaaagattcaatttccaacattgacgtttctctcgagtgggtgaagtagaagaaagttatgtttaaaccctaaaatatttttttcctgagaagtcgatctctaatggctcttgtacccaagattcgcaatcgcaccatctcggacaaaccagtctcttcgtcttgtactagaacatcgagtttcagacaaagacttctcgccagttgcaaacgatttctcaggttcaaattgttggttcgtgcttcttcagtgtcattaaaaaagaaaacagcaagttgttcacaatctcaacaagttgttaaacataatgatgataggattgaggaacattcttctagtaatcggggtattaacaatggcaacaatttcttagtatcatcaacagaaacgaagaagcttgttgcggtactgattctaattaatatattgtatcaatgtttgtggatgcaatgcaagattgttctgtttcattgatttagtaagagagctcttgtattgatttctgttgaagttttgtggtgaacctttccaaccactcaacgaggaggaagtagctctagtcaatagtgccttgtctaagagaaacaggtttttttctttctttcagaattagcttatcatgtgatttgacttgattgagaatttaaccacttgtgttgctnnnnnnnnnnnnnnnnnnnnnnnnnnnnnnnnataaaaactccaatattgacatctctggagaaactttacaatgcctaaggccgaatcaatggcttaacgatgatgtaggttaagtcaagagttccttatgtgttttgtttgcaggaatcgtgtttgattttcgtct

SEQ ID NO: 17176 - DNA, 572 bp, Arabidopsis thaliana landsberg
acgtacatggcgagaaactgcaatttcaatccaccgtttgatatattcaggttcaatatgtgttttatactgataaagataaaaattgagtcgcaagctttctaagaccggagctctgtgtagtggcagcttcttgtcaataaaatccacaagtccaacctcctcctccttatcatattgacaagtgttgagaaaagccagaagatcagtctttggagaaccgaaatcgagtctaggctaccacatccaaagaaactcccaacgcttagacaaaatggaagtggatacatcatcttttgtcggaacaaacgataaaatcttcaccagcacatcatctggcaatccattgaatatgtccatatcttacagtttttttttttttttttgccaaactcttacagattctaagttactgcaaaacactagaaaaaaacaccatcaaatgattttttttcaggccaagcaaacgaattagttacaagagaaaacaccgaacacaagcatgacaaaaccctaaagagagctgtaatgttgaaatctgaaccggaaaaacccctgaaaaaattaaacct

SEQ ID NO: 17177 - DNA, 1428 bp, Arabidopsis thaliana landsberg
cgaaatatgggttgagcaagttgttgtaagttgaaacgaaagtgaatgtacattaaataattatttcaaaatttggtgagagtggaatatattaattttggcacgtttgtgggggagagaaatgttacacaagtcgggctatatactcttcttctgattagttgagagttgacatttgaatccaactacacacaatgatgattgcttctttaaaacttataaaaatcttgtctctaaacttaggccgtattttataattaacactccatctgtttttctaaatatttatagtttaaaatttttgtacacaaattaaaaaaacatataaatatcatttaatttatttatttcctataaaaacatcattaattacaactaatccaaccaataaaaaaatatgatgtaaaatataattgattaaaaattattaaatacatttaatgtttgcatggaaaagtgaaaacaacacttatattgaaaaaaataaaaaacctttaaactacacttaatttttttcagagggagtattatatatatatatatatatatagatagtacaagtacagtaatatatatatatatagtacaagtacagtaaataaatgtgaaaatttgtgataattattggattagttttgtcattatactaacatttgggtattatattcctaagaacatattcaatggtatgagtggttgagggaatcttaccaatatttttaattttaaatttgacaatttgaaagtttagcaattctattggcctcttaacagttatcttgttcaatggtaaggtccttaagaaataaaatttggtgtttggttttttgaagttttgaatagaaagatagaaaagagacaagtgaagtttggtattagagtcttgataaacacattttgaaaaacagggattcatgaaaaacaaaaaagatatacaagaagttttgtattaacaaagattcatgacaatacataacaataatatgacaaaatatacaaactgtgtgatgaatcgccatgttgtaatcaccgccttgtcctaattccataaacttgatctcagtgttccatggattccatagtccacttgaaccatttcatcaaaaatgacacgcgatgttaagctgtgtgagacaatcacaaagtttagctcatgagacgggttgatgtggagtctgttcatgtcgtcaatgtctctgtagagacttgagaaaacctgtacaacaacactcaaaaaagaccaacttctagggtttgatccgaataatgcggcacctctggtggctgttgctagttacattgatggaagaaacaattgagctcttgctagttacattgctaggttggtttaataagataaaagttttatccaaagttcccgactttcaactgttttatccaaaaatctataacctttcaatgaacata

SEQ ID NO: 17178 - DNA, 1126 bp, Arabidopsis thaliana landsberg
  unsure (1)..(1126): unsure at all n locations
ataaagcttgagatcttcaagcctgggagcatctattgcaactacttgctctttaaccatatcctcgtacaagtggccaacgagggtgaaactcaatagagactgagagcacacacgtaaataatctacattgtcacaagcactcctctttatagttaagctttcgagagctgggcagccagagatgagcttttcgaaagccaaatcgttggcaaacttaaccatatctagatacataactttgacacaaggtaaagaaacagactcgggattactgaaggtcacgtcagagagcttcaatgataacaagctctcacatgtttaaactgtttgaggtatctgcaattcacattccaaccacctcccatctagaacatgaagatgttcaactttccgcttaataactgtgttgatccaccgggtgacattagcattatcaagctcagtccacttccattcatactttagccttaaatattggtagtttaacttgaaattttgcaggcgagattcgctgttaaaacccagaaagctatcgacaaagctcacaaaagcgttgtactccgggaagtcaccataccccaagtccaaaccaggtacacttctccatatatttccccatgtacttgataacacactagtcttaaccacatcttttgtgggaagattcaagaaaacctgacatagcaatgaatctggtaattttctcagccaatctagatgacctctcctatcatacgagagtgtggaactcacacgactctctgcgtcttcatccatctactctacctagtaaacaaacatcaaatcggaaaaaaattcctgtaaaactattttcggatgaagaatcaacttggaacgatgaatcaaatagatagaaagaaagagagagcgagtacctgaagaatgagaacagtgtgagaaaaatcgccgtctaattgtctctctagtctctactcgtctggccgtggccgtgtcagtgtcactgtagtggttgattagcaggcgtccttatagatgtaatattttataggcctcacataattgggctcacaatgggcctgttgggttttggtcgtgcaagtttcgtcaactataatatnttttcattatgatccccaaatta

SEQ ID NO: 17179 - DNA, 2472 bp, Arabidopsis thaliana landsberg
  unsure (1)..(2472): unsure at all n locations
gaactctcttttaagacacaagcacaataaatatgaacatcatcacctaaagatgaacacaagtttttaaaaacttaacccaaatattttacttgttacatacaacagaatttcattttgaccaaaacaaaaggattttttttgtattacgccatcagaatttaccaaaccatggacgaggccattcaaatattgtgtgacattaccatttctatttgaaaaaaatctagactggcttctttcttatttatcatcatagactcatagtcatatatattcaatcctaagaatctaaagattaattatgattctataaaaacccctttaaaaaaacatcaactctaaaaagaaagaagagaggtgtagaagttgtttttttataaaacagctcatatcttcttctttcccccgacaagttcggttcccttcttctctcctcctccaccttctctccattttcttacctctcaacaagtttacacaaacaaaaaaacaaaaaaaaaacaaaaaaaaaaacaattttttaaaattcttttcttagacaaagacagagacagagagaggggaagattttgggtttggtgtttttctccttttcttcattgaaagttgtcttcttttttaatcttctttgattaaaatgggtaatgtgacgtcaaatgtggcggccaatttcgcattctttccgccggagccagcaacatacggcgtaacgaaggatgacgagaccgggaagctggtcttcgccggagtgtcggctgacaagaacgtggaagtccaccaactcaccacaaagtccggcaacaaagttgttgccacgttttggagacacccttttgcgagattcacgcttctctattcccatggcaatgccgctgatcttggccaaatggtcgagctattcatcgaactccgtgctcatctccgcgtcaacatcatgaggtatatcttaaaaactttaatggttagattcttgacgtttgacttgtttttaaatgttttgatggcattttgaaacagttatgattattcaggatatggagcttcaacaggaaaggtaaccaaagagaaatcattcaaaactataaaaccttaatgtgatttattcagatgtttttgtgttcttgactttttttgtttttctggttctttttggtttagccgtctgaattcaacacgtattatgacatagaggcagtgtacaattgcttgcggagcgattatgggatcaagcaagaggagattattctgtacggacagtctgtaggaagcggtccaacgttgcacatggcttctcggttgaagaggcttagaggagttgttcttcacagcgccattctctctggaatcagagtcttgtatcctgtcaaaatgactctctggttcgatatattcaaagtaagaaaagcacacacaaaagatttgcttttggttgggttacatatatactctgttcctgtctcatctctttgttttgaatgtcttacttcagaacatagacaagattcgccatgtcaactcacaagtccttgtcatacatgtaagtaaaagctttagatctagtggatttgtctgtcttcttctttctgttgatttgtgctgattgatttgtgatgagctgctgcaggcacaaatgacgagattgttgatttgtctcacgggaaacgactgtgggagctgccgaaggagaagtatgatccgttatgcgtgaagggaggagncattgcaacctcgagacttaccctgagtacatcaagcacctcaaaaagttcgtaaatgcaatggagaaactctctctaaccaatccaccacccaaacaactaactaatgagcccagtatcaccgagactaagcacaatcggtgcttgaaattcgggaaacggtagtagcagaatcacaagacaattggtttggtagatttattccttggcatcgcatgtgcagagttatttcctcaatgtgatcaaaaccaatgctaaacacagggtcacagacaacggcgtaacagagatcatctagtgaggtatttcactgtagaatgttgccctgcttttgggtatttgatcgatgttcaatctcctgtaaaaatgtagcttcaagtttgggggtttctgtaacacatcattacttgtaggagaagcaacacagaaaagatgtaatcagcatttccttcgaactatctagtgctccttagcgagacaattaagtacattaccacaaaatactctcacattataactatacatctgggatcaagagtactaaatcatcctaggttgtctcgtcaggagaatcttgagcccctctgctacaacttaaatcgacatcagagtctatggaagattcacgatgaatgaaggacgaatattcatcatcttctttgggtggcttatagtctttacctctccaaatcacgacctgctccttgtcaaatgtcaccaggatgcaagggaccaaatccttcacacaaac

SEQ ID NO: 17180 - DNA, 1547 bp, Arabidopsis thaliana landsberg
  unsure (1)..(1547): unsure at all n locations
atcaacacttgttaaacatagctaggtctttattatttcagtcgaatgtacctttgcaatattggagtgattgtgttcttactgcagcttatttgattaatcgtttgccttctccattgttagacaacaaaactccatttgaacttcttttaaagaaaattccagattatactcttttgaaaagttttggttgtctttgctatgcatcaactaatgttcatgataggaataagtttagtcctagagctagaccatgtgtgtttttaggatatcattcaggatacaaaggttataaggttttagatttagagtctcattccatttccattactcgtaatgtggtttttcatgaaacaaagtttccatttaaaacaagtgaatttttaaaagaatctgttgacatgtttcctaattccattttaccattgcctgcaccattgcattttgtagaaagcatgcctcttgatgatgatttacctgctgatgataacaatgcttctacatctaattctgcatcatctgcatcatctattccacctttacctagtactgtgaatactcagaacacagatgcattagatatagatactaattctgtacctattgctagaccgaaaagaaatgctaaagcacctgcttatttgtctgagtatcactgtaattcggttccttttctttcttcactttcacctactacttctacttccattgaaacaccatcatcatctattccacctaaaaagatcactactccatatcctatgtccacaaccatttcctatgataaacttactccactttttcattcttatatctgtgcttataatgttgaaactgagccaaagacttttgctcaagccatgaaatctgaaaagtggactagagcggctaatgaagagcttcatgctcttgagcagaataagacttggattgtggaatctttgactgagggtaaaaatgttgtaggttgcaagtgggttttcacaataaagtataaccccgatggaagtattgaacgatataaagcacggttggttgctcaaggctttactcagcaggagggaattgattataaggagactttttcacctttggcaaagtttggcagtgtgaaattgttacttggacttgctgctgcaactggctggagcttaacgcagatggatgtttctaatgccttcttacatggagagcttgatgaggaaatctacatgagtctgccacaaggttatactccaccaactggtatannnnnnnnnnnnnnnnnnnnnnntcgactcttgaaatctctttatggcttaaaacaagcatctagacagtggtataagagattatcttcagtcttcttgggagcaaactttattcagtcacctgcagataacactatgtttgtgaaagtcagttgtacttcaatcattgtggtgttagtctatgttgatgacttgatgattgcaagtaatgatagctcagctgtggagaatttgaaagaattattgagatctgagttcaaaataaaggatttaggaccagctagattttttctagga

SEQ ID NO: 17181 - DNA, 3697 bp, Arabidopsis thaliana landsberg
  unsure (1)..(3697): unsure at all n locations
ctttgatcttaatcaaatgatcgaatttctcactcagaagcaaatttagtgaagatagattggtttcacacaaaatgggagagacaattttggttttggttactctaatgatcaatgcagcgaaggtgttcgatgaaatgcgtaggagagactttcgggaaattacttcactaagtgcttttttactgatgagaactccctttaatgatagaacaagatatcaagcaaagaagccttgtggtcttatactgaattctagaatacacagtgacgtggtggtcttgtcttttgataagcctgttgttgctgtctcctctctcaatggctatctcctgcgactaaaacggtaaacctttaatctctttaggttcgtgtgtattcatcagtatctggtcaggttacaataatatattgcttattaactgatcaatctgttactgtcctgccttgcttactatagtagacagtttctgtggttttgtaatacttaggcatgtgttaactatgattagaggacttacagtgagttaaggtgtcttcgtgtgtgtttctctcaaaatgatatatttgttactctgtatatatatatatatgctcgtggaatcctgatgagaatttggttacagctttatcaatcctctaaatagttttcaacagtgcaaggttttgtgttcctctcttgaaaatatagtctctgaagtgttaacaagctatgtatgactgtttgcagagttcaggcagcaatgtaaatgagctggagaatataagcaatgataggactgagtcaatagttcaagaacgtgaaggttccgacaactaagcaaactgcttcttcaatttggttcgataactgtagataaattgtgataaaatatcttttatttgatcaatcattacattattgtagagaatcctcggccaagagattggtagctagatagataaggttgacttggagtcaacttcttgcttagagttttgataaactttatagctttcttcatttattatagtaaacgtttttaactcattttttttccagagaatctgtacccttggcgttcttgtactggttcatcgtagatgattctcgacgactagttgttatggctgaagcatttgtgtcgtttggacttgagaagctttgggatctcctgagtcgagaatcagagagattgcagggagttgatgagcaaattgatggactaaagcgtcagctgagaagtttacagtcgctgttgaaagatgcagatgccaagaaacatggaagtgatagggtgaggaacttcttggaagatgtcaaagaccttgtttttgatgctgaggatataattgaatcctatgttctgaacaaacttagaggagaaggaaaaggggtcaagaagcatgtgagacgacttgcttgcttcttaacggatcgccacaaagttgcttcagatatcgagggtatcactaagaggatctctgaagtgattggggaaatgcagagttttgggatacaacaaatcattgatggtggtcgttcgttgtctcttcaggaaagacaaagggagatccgacaaacgnnnnnnnnnnnnnnnnnnnnnnnncttgtcggggtggagcagagtgttacagaattggtttgtcatttggtggagaatgatgttcatcaagtggtttctatagctgggatgggcggtattggtaaaaccactctggctagacaagtctttcatcatgatttagtccggcgtcattttgatggattcgcatgggtctgtgtttcgcaacaatttacacagaaacatgtttggcagaggatcttgcaagaacttcagccacacgatggtgagatcttacagatggacgaatatacaatccagggtaaactctttcagttgttggaaaccggtagatatttagttgtcctcgatgatgtatggaaaaaagaagactgggatcgaataaaagcagtgtttccacggaaaagaggtgagctcttatggtacatacatgaagcactttttcttcttaattcataaaagtgattgttaaaagaaatatatagaataaatgcctttcttattccctagcatgagaaacacaaatattttgaaggttggaagatgctacttacttctcggaatgaaggtgttgggatacatgctgatccaacatgtttaacttttagagcaagcatccttaatcctgaagaaagttggaagctctgtgagagaatagtattccctaggagagatgaaactggtacatacatatcttattatataatgtttagtttctctaacttttaagaaaaatacatttacatatactaatttacatgtatatatttatatgattttataaatttttattttccttaaccaaaaagtaatatttgtatacatattgctattttttccttactattagaacaactaactaaaaacgtatggtaatccatatgctaatttaggcatgtataaaaaaaatgtcaatggtaatcttgattttgaccaaaaaataattaatttaattagcatgaacaatgagtgttgttaaggttcaaaaggacaatataattattaaacattaatttaattggataacaattaaaaaaattaactattaatcctagtacagtaagtcagtaattacgaatcttgaaaattggttttggtttttttcttcctattttttataggtttattcaaattagaaatatcgaattatctacttttatggtttattcatgattggtttgattaaaatttaacgtaataaaatcaactaaatttgaaagaaacatgtattgattaacccgtgattacacgattccttgtaataaagttcaaatagaatactaagaccaagaatctagtgtattattttaatttggcagctcacatgttgaaatgtattagcttgtgatattgtgcagaagtaaggcttgatgaagaaatggaagccatgggaaaggaaatggtcacacattgtggaggactaccattagctgttaaagcgttgggaggcttgttagctaataaacatactgttcctgagtggaaaagagtttttgacaatattggatctcaaatagtaggaggatcgggcttagatgacaacagtctcaattcggtttaccgaatattgtctctgagttatgaagatttgccaacgcatttaaagcattgtttcctttacctagcccattaccccgaagattccaagatatatacgcataatttgttcaattactgggctgcagaagggatttacgatggatcaaccatcgaagatagtggagaatactacctagaagagctagtgaggagaaatttggttattgcagacaacaagtatttgagagttcacttgaaatattgtcaaatgcatgacatgatgagagaagtatgtttatctaaagccaaagaagagaacttcctacaaattatcatagaccctacttgcacctctaccatcaatgctcaatctcctagtagatctcgcagactcagcatacatagtggtaaagcctttcatatattgggacacaaaaacaatacaaaggtgagatctcttatagtttcgggattggagaaagacttttggatacgatcagcttcagtcttccacaacttaacattgctcagggtgttgaatctttcttgggtaaagtttgaaggagggaagttaccttctagcattggagggc

SEQ ID NO: 17182 - DNA, 518 bp, Arabidopsis thaliana landsberg
gttcctcccatcatcctcgtctacattgtgactgttatcactgaaacctattagccccgacttgtctcctcgcgtgaaaaatagtccgtaggaggtagtgccacgcaagtatctcagaatctgcttcatagctactccatgaccttctttaggttcttgcatgtatctactcaacacgccaacacagtatgagaggtcaggtcgtgtgtgaggcagataccgaagatatccaatgcttcttctatactcttttggctcaatgttcttctctgtctccgagtcatgacttcctttctctgttcccgcctttgatagcttcaaaccggagtccattggaatgtgaactgcgttgcaatcactcatcttggtttcgtctaggatcttctctgcatatctccattgtttcaacataattcctccattatgctgaattacttcgattccaagatagtatgtgagtacccgagatcactcatctcaaacttggacgccattcccttcttgaaacattaatgagc

SEQ ID NO: 17183 - DNA, 7339 bp, Arabidopsis thaliana landsberg
ctcagagagtaagtatacctcctaaagtagtccctgcggtggcgttcctgtaagcatacttgcaggcaagatcaatgctttcagaagcataccttaacacaacaagaacatacagaatcaacaatagtgatatataagaaaaaagatatgataactaaaaccattttactctgttaatgatcagcaacttttacagatcttcaaccgcgaaatcttgcaattaaaatcaatggaaaggaaaatttatatgagcaatttatgtatgcttacggatttgggcaggccgtttggttaagttgacatgactcccatgaaggtacatcgtttgaccagccgttctatatgaagatggcagttacaaatgtgagtagagttttatcttggatatgactataacttgctgaagctgattaaagaaagtaagattgtaccttgagtttggcttgaagttcatgaatcatgcgtggaaggcttgaattgtagtatgtttctagagcagactcaattatcatatcatcccacaccttcatattcaaagggattgacaagttggattactagaactattgaagaaaacattttctttatcttggtaacttccaaagtttagatctttcaagacaatcagaagaaatttaacgttttagcatcaatataatcgacaacaaaacgcttacacggagcaaattagtctcctgattgtaccagtgaactgttatcttgttaccacctagatctccaataaaaccttcatgtaaaggctgtgaaaacatccaaatccacaataaggattaggcatatatattatgttgtttcctatacattaatctcagctgcaataatcagagtagtctcaaatgcatataattcagaacatcacttggtgtctaatatgattagtctaaacttgcaaaaagggatcaattaacctgatggatatctcccatataatgtgataagaacatgagagcctctgttaagttatctgcaaagcaaaaaaaaacaccaagtcacactattatgatgcttcatataactcacacacaaaagtatcagaattcactagaactctaactcacagtggactatactctgtgagttttcagaagtagacattagttggttagtgtaattgaagattgcccctgtcacacaccagtctttaggacagtccccttcacagaaagacaacaaagcacatatacttttataccaacgtcaaacagaaacatgagtgaaatttgaaagaaaagatcaataaaagacccacgagagtactcatagttgcatttgtaatcaggcgtatcagcaaaatgcaaagcactagtccatcgccattgcgggagctttttgatttcatcaggccatgagcaaacagctgctagctcaccatttgcagattcaggcagaagtttcttcacagaaactacagtatcttcctcaaaataactctaaagattgaaaaatggtattaatcaagatatcacacaaaggtccaaagaagagtttttagtagattcaatgaaacagtaaaacaaaacaaaacaaaaagcctcccttttttcctctcagtcttaacaatagagtattaaattgatattcaagtatcttacaacactcactcaagtacgaaatctctcagatctatactcacatagatcatttactaagataaatttagagctacgctttagaaagtaagttaaggaaattttaacctgagctattttgcagacagcgtaatgaccagcgtctccccaacagagagctccattaacgagctgtgtaagcacgagtatactcacaatccacattctcaacgaccaacccattctgagaaaagcttctacttttttctttccaaagttaaaaacagagaagcagtttttcaacaccgagtaagcaaaaaaggtttttttagtgtataaacaatgagaacctgattcaagtgcagagaagaaagaagaagccaaagagccttgaatttttcctttttctactccatggagtatagtcttatacttccattgatggtactatgtattcattatggtggaatagcaacaaacaaaaaaataatagtttttattttgtcaccacgttcataaatatttgtttactcaaattgtatatagttactcttgagtcatttaaagtgagtctcgacccaagcaagtaaccggaagttttccagctgtttaacatttctgaaaaactgtgtttattaataaagatatcaagatatatggttgttgggtgatatcaacttatcaagtaagcaagcatagcttctccaaaaactaagcattacatgagctaaaggagctaacagagttgtgcaaaaaaaaaaaaaaaaaaaaaaaggagctaacagagtggtcttgggaatatttatctcagtttcatgatccagcatgcttaggttttgaagaaaagatacggttaagagtggctgccaagcgtatcccaccttgcgcaagtctcttctccacaatgggtaaccgagagaggaaatagtcatctgcagaacaaacacgagagaagtctcgaagatcacagtattgcatacaagtctataactgagatgaacatgtatgggtaaagaaagctaagatcttgtttcagagtatacactgattgttcaaagataagctaatatgtccaagaaactttgagttcaatgctgagagagtatacctcctaaagtagtccctggggtagcgttcctataagcatacttgcaggctagatttatgctttcagatgcgtacctgaaaagaatccaaaacaatactgactcgacaatgatgtaattaggaaaatcaatatgaaagctacaaccatatttctctgcgatccatcaactttttagatctctttacacaaaattttatccatctttctgcgtttaacattgctgcaaagaactaatcatataggtatcttgattcttgacagaaaatgatatatttatatatgcttacggatttggacaggccgtttggttaagttgacatgactcccacaatggaacatcatttgaccagtcgttctatatgaagatagcagttaaaggaaacaatcaatgtgagttgacggatttataaacatactggcactggagcttcataaagaaagtaagattgtaccgtaagattggcttgaagtgcttcaatcatgagtggaagacttttattgtagtatgttttaagagcagactcaattatcatgttatcccagaccttcatcattggaagatcataagaataatttatccaatcaggaaagataactttttctttcagcattcgataacaaacacttacatggtgtaaatttgttttgcgacggtaccagcggactgttatcgtgtttccaccttcatctcccagaaaaccaacatgcaagggctgcgtagattacatataattcagacacagaccttgttctgatatgattcatttaaatggcaaagagatttacctggtgaatatctccaataaaatgtgataagaacatgagagcctctgtcaagttgtctgcagacaaagactagtcacaactctatgctccatagaactcaaacagaagctttagaatcagactcactataatattatcactcacagtggactgtagtatccgagttttcagaagcggacataagttgcatagtgtaattgaaaatagctcctgtcacacaccggtcttgattcttatgagtatcatggcaatccccttcacaaacacaacatatagattggatttcggatatgaaaacaggtaagcaattggaagagggaagaataaacggacgacaatactcgtagttgcatctgtaatcaggtgtgtcaacatagtgcaaagggctagtccatcgccattgccaatggtgcttaatctcatcaggccatgagcaaacagatgctagatctccatcagctgatttaggtagaagtttcttcaccgcagctacagtttcttcctcaaagtagctctgaggactaaaaatggcattatcaaagataacacaaaaggtactaccttgtctacagaaaattttcaatccaaatcaaaggtttagtatctatctagactccaccataacagtaatctcctagagtatttgtgacagttgcagagctaattcgatctttaatttggtaccaaagatatcaaatttacatgaatcacagtgctttcagcaactttagagttcgagctcagaatctaattacatgaatcaattttgacctcggctattttgcagactgtgtagtgaccttcttttccccaacacagagctccattgatgagctgtgtaagcacgagtactctagcaaaccactgtcgtagcgacgaactcattctgtaaaaattgcaaaggttcgatttttttttgtacaaagattgccgaatcaaagattttgttgttagattttgcaaaatttttgtttttatcagaagaagtacaaacggaccgatgaaaacgagagaagtcaaaactgttgttgcctttgatattcatggtctttgcctcaggtggtaaatccttattaaatcaaacaattaacaaaaataaatacactttttaagcccaaaataaataaaaacttcttacaaaatcatattctacttcgaaatcaatgtttggtatacaacagcttatttgatactatatatgttccatagttacagtgtctttttgaccaaatcagagatacataaaagccaacaaacagaactcttgtaaagagatatctatgaacagaatcgaccagattttattgattattgaccatgactcttgtctctgaacatttctccctttgcagagaatcaagtctcaaggagaatcttaccaatatggttgctactctccataaggctatgaccttctgctgcttgtgacaatggtaaatacttgtaaatcactggttttaccttccctgcttctatcgctggccagacattcttctcgacttcccttacaacaactgctttgttttcagggcttcttggtcttaatgcagctcctgtaggaacaaaacagatcaagaattatcaataggtctcagactctcagtattgattttgagagatgattgattgattgtgttaagtacctaagacagtgagacgctttggaagcagactacttagttttatttctgcattggctccttccattaaaccgataatacataaccttccatcaaagtttaagctgtcgaaatttttctgcaaatacggtgccccaatgcagtccaagataacatccactcctttcccatcggtttccgcttttacctttgcaacaaaatcctcggttttgtaatttatacaaacatcagccccgagttctttgcacgcagctagcttttcatcactccctgttagttaaaagaaaatttgaacaatttcggaaaaaagtacataaaggttatcaatatattgaagctcagaccaaccagctgtgacaaatactctcactcccagatgtttagctatctgaatagcaaatgtcccaatcccacttgaacctccatgaatctaaaatttcagatactatcaaacattagcaaggacatagacaagaaagaaaacaaaacagcccaagagagaagacaaatgcaaagcaaagtaatagataaaagcctctagaattgaccgtaaaaggattggcttttaccagaccatagaaactgtttttatacataaaaagagaagagaagttgaaataccaagaatgattcaccaacagagagacggcccatcatgaagacagtagaccaaacagtgcatgccacttcagggaaagccgctgcatcctttagagagataccagcgggaattgggaaaatttgtccagcaggaacagaaactttctctgcataacctcctccagaaagaagagcacacacctgagacaaagacagtcagaagtaatccaagacaataactttatacttcaaaagtaatttacttgcttaagcctagagtaaaactaaatccaatccaacacaaaactataagaagcctcaacagctaaacaaatgtaaacgaattgcaactagacagaaaccaagtcattcaaattcagatgttatgaatcctaaatcattaagaacatgagtgtgagcactgagcagtgtattcaaatgttctgtatcctaaatccaagctcggataacttaacacagagacaccaaaccctaaaaccaaaattgaggattagtccctaatttccagaaacgaaatcacaggaatatatatctacctggtctccgactttccatcgagagacgcctttaccgacggattcaatggtcccagaacattcgagaccaaggtaagggcttgagccaggtggtggattataaaggccaagtctttggagagtatctgcacgattcaaagcagtagcgagaactctgatgagaacctcatcgtctttaacttctgggtctgccacatcacggagttgcagaacctccggcttacctggctccgagatcacgatcgctttcattctctcaagcttccgtattcaagtcctcttcttctttctctttagtattttttctttctcttagactagatggttcgagcaaacggaagaaagagtaaagagtgttgttattgaccaatgctccacggtttatttgttccgtcaaattccaaaatctttggtttgatcggtactattcaaccgccgcaattgggatttaaccgctcaatttttatattattttgtgtttaaaagtttaaccgcttatttttcgcgtttgagattttatgcattcgactctaatcatataaattgtgtgtctaaaagtctactgaaaataaatgtatatatttgaacatgttacgtacatcaatttatttattatacaatgatttaacgtcaaaatattaatagagctatgagattaggtatatttagataacaaataaaaataagaaataaattagaaataattttaggacaaatacgatggatcaaagatttttacatcgaaatatattgtcggtgtggctacagaattactatgaataagttcattgtggtgacagctataatttgggaggagaaacaatcgttcgggatgttgatcagattcattttgtcgttgagcatatatacttcaacctcattgaaggtaatagatgaatcattaggatgcattccatccaagtcaacggatatcatgtaataattaattacaataatgagtctatctatatatgtgtgttttcagtacataaactttacatctttttttatcactcatccataaagctttaattcatatgagctgtccgtatatatggg

SEQ ID NO: 17184 - DNA, 1284 bp, Arabidopsis thaliana landsberg
  unsure (1)..(1284): unsure at all n locations
ttctaactacagacatggttagtcttattgataaacaaataactaatttgatttgattgctagacagaggaagagagagagattagtgtttgtctgtttgaggttaaacaggaactcgtgatttcttacgcctagtctcgtatttatagggacagagaccgtcatagattaaggaaatcctaaacctaacctgactttgttctggtaattgaccattatgccctcatacttgccacgtttgcctttttcgagagccctttgttatcttagtattttctgataattgactattataccattattttatgcactttctactgatttagagcatcattatcatggatatataataaaaatctcttaagagataaaaatactaatattttaattctacagttaaataaaccaataactggattataaagtgtctcttagtttgttattatgtctcttagctaagagattttttcgtttctctttcttctttctcttaagttttaattatttttcttttttttaattgttaagaatcaattaagaaactactgataaagttggtcttaggttctcactttaaaaaccaattgtgaatttagaacgagggggtattgaataattgaatttaaaagaattaaaatgaataaaaaagtaaaagattttaaagtatttgacaaattctatccaaatcacaccataatagctgggatttgtttcttcacgtttttgtctttgatttcttttaaattctaatcaaatcacattgctaataaaacaatcttaatgttgaataacagtaaaatttaaaagaattctaaaatcaacaaattgaataacagtagaatttaatagaattctaaaaccaatcaattgaataacactagatttaaatagaattctaaattctttcatattcaattaaaatcataccttcaataaccccctattagagaaagcccataagactatacaataaaagcccataaagtttttaggtcaagcccaaaagatcttcaaacataagtagggttttacttgtgagttttatataaaagcttctgtatcagagggtttttaaaagacaacaaacacttttgacttctcttatgttcttccgccgtttatgtcttcttcgttgttgcttcgatcttggttntgttttttaatgtctgattattcagttttttccttctccttcgaatcaaaggctattaatgattgcacaagtactgggacatccctgtaaaaaaattggggaatctggctaataattttatgtgcatatat

SEQ ID NO: 17185 - DNA, 711 bp, Arabidopsis thaliana landsberg
gatcaactcaatccttagtacctctgatactcttgtattggttgtacccgtacctatctccttagtagataatccgtcctctatcatgataccttttcctttatatgtcactgttatgggctatggagccataatgagtgggccatccggttcagaataaaagtgtgacagtgttttgtcacctacagtcaaaagtaaaaaacagtgaacaaatggtaatagtgttatagaatagtaggcgataatatattaattatcaaataacgaacctatgcgcgatgagctattgttgttggatgagtcagtgacttccattaggtcatcgctacagaatgaaatgcttgtggaaagcgaggttggcgttccgaaggttgaatcgcttgatgatagggcgaccacttgtgtgcaaacttcttgtgtttcaaatcttgctagagtgagtcgcaaatcctcatgtggatcgcccttggaaatgtcgccactcccgaaattaagagcctagcagttttacgagtgtcgcccacatttgttgcatcaatttgagttactcctagggtcatttgtgttgcacacatctctcgccacatttcttcttgttgatgagttcaccacatctcaaacaaacgatccctttctctttcatcatcatcagtaactttctcttttcgtttagagcttgtaatggagtctggttgcgtgtctgttagtggc

SEQ ID NO: 17186 - DNA, 758 bp, Arabidopsis thaliana landsberg
ggttagttatcactccgattcttcgccggttactcatcactatgattctccgccggtttgttatcgctcagactctccgccggctcaatattgctctgtttctccgccggctcgttatagctcagactctccgccggctcgttatagctcagactctccgccggctcaataccgctccgtttctccgcctgctcaatatcgctccgtttctccaccggctctttatcgctctgtttctccaccagctcgttatcgttccgtttctccgccggttcgttatcgctcagactctccgccggctcaatttcgctctgtttctccgccggctcgttatctctctgactctccgctagttcgttatcgctccgtttctccaccagctcgttatctatctgtttctccaccagctcgttatcgctccgtttctccaccggctcgctctgatcctccggcgaatactctacagctatgcgttggtaatcgatgtatcatcattcagcttttttactgtaaccgcgtccctcatgtcctccgtaggtttctcggggatcgaaatcacaccttcgtgggtttttggaatagtcaagatgcgggaaagctaaagagatctagacatcggttggagattgcagagcttttggatttgaggaatcacgttgtagattcgagaggaaggggcttgaagggtcgttcgtttgaggtggttgttggagaatgtttgggttatagaggagtaaggctagagaaggcgataggca

SEQ ID NO: 17187 - DNA, 1769 bp, Arabidopsis thaliana landsberg
tcccagccccttgacaattccaacttagtatactcattggagttctcaataaccttagaaatttgctcggacttgaacaattgctttggtagattttataaacacagctatctatcttatgcaattgactttcctttcaaagcttcactaacttatcaataaagtagaaaaccagagcaaatccagatgatgaaggtttgtacaagcaaaccctaggcgatctcaaccaaactctgcaaactaatatgcaacccacaagattaatccaaacttgttgaaaacaccaaaacttatcctaattccggcagaaaacgagaatatctccggtcttcaagctccgctcactctgaatttgatggaaactcttcgtgagagagaagttcataagcccaaaagagggacggcgatggtggtgtctgctgttatgatcggcacgaacggcgattggaaattgatgatcgcccttttagtcggcgtcgcttttttctttctttcttattctctttagagtttatcaaatgagaattcatcatgtctatattaatgagaaagaaaacagttttttttttctttctttcaaaaactggttattataaatagggccataccgtagtgggcttttaatagttaatgctactaaatgcgaaaacagtaatccaaaagtccagaactggtccgtaaaagagtcagtctggtccacgaaccaccgaaccgctggtttaagttatctgatactgcgcgcacactagtaagagtttagttatcccacgctaacatgcgccaacggcaaacattaaaataaattaggaattttcaagatttaacaatttctttacacaactttctctctctttgcttctcctccgtttctccgtcgttgcgctaccgcacagttcatatcgtttcttctcctcatgaagattccgctgcttttgccgttgttgatcgtaccgttacgtaaaatttcattgtgttgatttggtcccgatttgaagaagccaggaagatacatctttgaaaccggcatcggaattttcgaatctagggttttagagtgctgggtttctccactaggtttctgttcttgatcttgttaattgtgggattgatctgattttggtgtttgaagtgctgggtcttacggaattgggaatttaagatgggtaatgttgaaattccgaattggcttaaagctttgccattggcacctgtgtttagacctacagacactgaatttgcagatcccattgcttacatatcgaaaatcgaaaaggaagctagtgcctttgggatttgcaagatcattcctcctttacccaagccatcgaaaaagtatgttttctacaacttgaacaagtctcttttgaagtgtcccgaattggtttcagatgttgacatttcgaaggtgtgtaaagaggatagagctgtattcaccactaggcagcaagagttaggccaaactgtgaaaaaaaacaaaggagagaagggtaagagtaattctcaaaggagtggtgttaagcaggtttggcaaagtggaggcgtttatacattggatcagtttgaagctaagtcgaaagctttctacaaaacccaattaggaacggttaaggaactggcaccagttgtcattgaggcattgttctggaaagcggctttagagaagcctatatatatagagtatgctaatgacgtgcctggctctgctttcggtgagccaaaggatcaattcaggcatttccggcagagcaagaggaggggcagggggtttt

SEQ ID NO: 17188 - DNA, 1690 bp, Arabidopsis thaliana landsberg
  unsure (1)..(1690): unsure at all n locations
tcatcttcttcttctaactccgtgaataaatctgggaattttggatgatacagagagacaaaagaatttggaagaataaagagaaatcgagactttggagannnnnnnnnnnnnnnnnnnnnnnnnnnnnntttgtttatttacttgatcgaattggattggatttaatggaattggtcaactaaaagaagcttccttgaagatcatcgaattggatttattcaattttggtttggttcgatttgatttgggtaaaccaagttgtaatgaggcaattattaatttaaaccactaaaaccagaactgaagagagaaaagagtttaacaaacagctacaataaagtgtgtttttttataaggacaaaaagaaaaagaagcgaaagacagaggcacagagctatattactcttacagacaccagtactttctgaaaattacaaaactttcctacaacttttataggcctgaacaatttgacccccaaaatcttgactcatactaaaatgacagagacgatcaagagcataaacgatacacattctcatactttacctctttcattgagcgacgatatgctcgtaatccccaaggttcccggagtatatagcgaacaaaaagaccataaggctgataaaatgactcttgaacaatgtgtttttcttatttcttcctggtggatttctttgctttgaagattctgcggcctgacttatcgccacctccagtgctgcctagtgaaaagctcccacctccttggaactctagactctgtgatgcctggaaaggtgatgcgttctgtaacgtgcttgccattggttggcctccaaactggaaggggtttgccattgatggaggctgcgttgctgctcctccaccgaaggcaaagtttggttgaggcatcgagactgctgcttgtccaaacattggggctaccatagatgctctattagcttggtctgtgtcttctgccatactgtcttccatgctcacttgttggttattgttgataccatttccattattaggtgcaccaaatgcaaacccaggagttgagttaccaaacagagactgtgatggagtccctgagttaccaaataccggctgctggggagtggtaggaggggttgacccgaaaccaaagataggtgaaggtgacggggtgttgttggtagatgcaccaaaaatgggagtagtagtgctcgaaacagtagcagcagaagatcctccaaaggaaaaggtggtaggagttgaagatgtggtgaacgaggaactgaagactggaccagagtttggagaagagttgggagcttgccagcttgtcccaaataggggagagctcattgtactactagagcttgcagaggagtttgtcgaactcaattgaggagttgacacagaagtaaatacagcaggttccgacttagaaaatccaaatggagaactgtttgatgcaagagaagagttcccagacaaaccaaatgaaggagctgatggagatgannnnnnnnnnnnnnnnnnnnnnnnnnnnnnnnnnnnnnnnnnnntcccagtattacccgtctgagcatttccagcaccaaaaagatttgaggcctgagattgagagctagtagcagaagctgatgaaacagcattgaatccaaaaacactgctttcagtacttgcagatacaccaccaaccatgctacta

SEQ ID NO: 17189 - DNA, 613 bp, Arabidopsis thaliana landsberg
  unsure (1)..(613): unsure at all n locations
ccactttcagattcttatcaaagttttcctaaaagggacaaaattcttgaaagatgtgaacttttatgtgttgtttttgttggtaacagatgaagaagaagcaatgttgctgtttaaggaagaagatgaaggaagaataagaactagtgttcctacacaactcatgaaactaaatcgaagccattggtggattcttgttttcataagcatcttctttctcatctctgctcaagccatttctgttctccttggtcggttttattacaatgaaggtggaaacagtaaatggatctctactcttgtccaaaccggtggctttccgattctttatctccctctttctctccttcctgcttcacaatcttcttcttcttcttcttcttcttcttcttctttcaagactctggtttggatttatctttctcttggttttgctattggtttagataattttttatactctgttggactgttgtatctctctgcttcaacttattcgattctatnnnnnnnnnnnnnnnnnnnnnnnngtgtcttctcttattacatcaatatctcagaaaaacacttgtttgattttctttttagtgtggaggctctctatttctgctgt

SEQ ID NO: 17190 - DNA, 1823 bp, Arabidopsis thaliana landsberg
tggtctgggggtaagtgacaatatacacaaccttagtacaaactataattttgatttcagagtcttaactctctcttcaatttgacttcaggaaaatacgctcaagtgacaaacaatccagagaacgacggatgtataaatgctgttttacttgtgtaaccaaatgtccggcactgtcgtagaagtatggatagagacgagaggaaggcgagaatcatgttggctagttttattttgttttctcctgaaacaattttgtgttatttcaagttttttttatgaatgtgtggttggtcttctcatcacattaactagctgctatgttagctttataagtatcccacattatgaaatttgttgcttctaatgttcattttgagcctctttaccgttactatcggagctagtatgccttaagaacccatgggagcaaaagtgagataaatctgaaggtaaacatataaaatcgaaccacaaggcaagtcaaaccaaacttcaattaccgagaatatgaactagaccaatccaaaagtacgtagaagattgaggaacttgcagctaaatgtagagcaaagaaaaagacagataaggctaaagtcgaagctgaagtagagaatcgcttgcaacaattacgaatctgatcaaaagtgttgtcgtttttatgattaaataaggatactcttgtattgtatcaacaacaattttttgttttgtaaaaagatttgggatttttcagaaaccatatatattttgtagcctctggatttttctttcttctatgatttagtaactggtacccttttttacctattattgtacataattatataagtttgaatcacaccgagatcaattgtgcaaggagtgttcttattagaacatttatagaagctaagggacaaatagaaaatacaacagtgggataagctggtgaagcttaagcttatcaactcgtgcttggtaaagctatggctgccaatggaggatcaagtacttggaaaagtcctgaagacagccttcttgtgaggtcctctgcttcaactttcgcgacgtcagctctcattccgatatcagtagcgtatctactcgcacaatacacaccaatcgctgtagcagccatcccatacacgtttgtagtcagaagccgcattggcgtggacaaaaccgcagcaatcggcccacctataatcgaaaccgcctgaccgctctgtcccattgtccttccctcaagaaccagcaatgcggttttgcaatatatagcgaaatcctcacagttgttcttgaaaacgtcataacatccaaatccgttttgaaggaggtgtttggcccacgtgaacaacaatctcattagggtcagcgacagcgagtgtgcaagttcctcctctggctttgacgaggaagtgagcagcgttgactgagtactcaaaccggtacaagacaccaccggctaggaaacagttaaggcatgaggaaacaacaccgtgaccttcgttaggtggaacacaggttggacagtgggtgtggtttcgggatggacctgagctgactagtatgagatctagaacagtcccggttccaacttcttggcctcgtctagtgaaatggatgactctatcatctccaacatagatgcctacacacaaaagtattagcagcattatggacatagcttccacaccattctctgatcacaacatttgggaataaagcaacacagtgatcatatgtggaatctatatagggattaagcataatataatactagagacacttcaattacatgattcgataactgatctcgttcgaaagataaatcctaattc

SEQ ID NO: 17191 - DNA, 1783 bp, Arabidopsis thaliana landsberg
  unsure (1)..(1783): unsure at all n locations
atcaagatcatacttagcttaacatccatcaatctcttcaaattccccaagaaatacttggatccgtagatcttagcttcatccacgtttgtctcaccacttggattgcttccaatatcgatgtctnnnnnnnnnnnnnnnnnnnnnnnnnnnnnnnnnnnnnnnnacggttccgccacctcaaaaagctcattcatcatagccaggctactctctgtggcgtttgcgtcaaaccacatcgtagagtattgaaccttgaacaagtttcctttccgatgaggaaaagcggtggccgttgccggaatccggtccatcactccaccgtaagggttgaattgcaacgagacgctactgttgaatttaaacattgtcttccaaagcttctctaaaccttttttgggtattggttttttgacaaaatccgatttactcttaaatgacaatgaattcgtcggaggcctatctagaaggatgctcttgggtgtacccgccgggtaattggcccaaaacaacgttgtgttaagccagctcatttcgtggcaatcttcacgtcctaaccctaattcagggaagctctggtccattatctccatcagcttatctgttggacccaagaactgagcatagaatacaaccgcgatggttctctcgccgggttttggtccatttacggtcctaggccatgctgttatgaaaagactatcaggtagtttattagcgacaagctgccacttgtaaagaatatcagtgcctccttgttctaatgttttgttaaccttaaacactgtcaggatctttggaacctccacgaggttgattttccaagatagaataactccaaaacttgaaccaccaccgcgaatcgcccaaaagagatcttctcccatggcagctcgattcaagagcttgccattgacatcaatgatttgtgcgtcaatgacatgatctactgtgattccgaattttctcatcagatttccaaaccctccaccgcttatgtgtccccctgctcctaccgtagggcacacgccagccgggaacgctagcgtttggcttgcctcattgatctttacgtagagctctcccaatgtcgcaccagcttgaacccatgcgttctttctcgacaagttgacatcaatagacctcagattgtgcatatcgagaatgacaaatggcacagaccatacttaataagtgcctacttagacaattgctccataacggacactgaatccgatagaattcaattatgtagcaactgcagtaccagaacaatacgcttgcagagatgctcgactgatggaagcgccgagaacgtcgcgacgagattcgagaggccagtcatagtaatcggtagcaactctcttgaagcagaagtcgttaacgccgccggactggagaatggtggagaggcgagtcacagtttcgttttcatcaaccggtagagaaggcgacggagcagcagaggaattctgtgggagaaaagagctctcaagaatggagattttgtggaggatttcaatttggagtctctcaagctctgccgctgcagtttccatgccttctccgtcgtccatttcgaattgccgatcgtcgccgcagcaaaagttttgtttcgtttcttacgtttgatttcgtaatcatctgtgctcgtgtctacggtaaattagaaaggaacaggatgatctgagccgttgaatttatcttgcgtcttgtggaaaataaaaactctgggccagaaccaggctcggaaaacactagacgttatatgtagatattggcc

SEQ ID NO: 17192 - DNA, 1286 bp, Arabidopsis thaliana landsberg
tcctcgaatgatctgcgtgctcttgttcgctttgggaataatttagaatgtcatcaatgaataccaccacagacttatcaaggtaatccatgaatacactgttcatcaagttcatgaagaacgctggcgcatctggtcaacccaaaagacatcactgtgaactcatacaacccatacttggtaatgaatgccgtcttcggaatgtccgaaggtcagatcctgagctgatgataacctgaccttagatcaatcttggagaacacagtggctcccctcaactggtcgaacagatcttctagtctgggcaagggatacttgttcttgattgtgacctcattcaaagctcggtaatcaatacacatcgtcttggtgccatctttcttttccacgaacaagacaggagcggcccaaggcgaggtgcttggccggatgtagactttctctgacaagctcatctatctgcttcttgagttccaccaattctggtccagacactcgataggctcttttggaaatgggggcggtaccagggataagctctatggcaaattcaacctttctctcgggtggcatgcccgttagctcctcgggaaacacatccggaaagcctgacacgaccttgatagcctcgagcgggttgggctctttactatccactgaaatctggtgacacactccctcttctgatttaggcatccatagctcggccactacctcttctcctgacggggacttcaatgttacggtcctcttatcacaactaacatttgcttcatacttcattaaccaattcatccctagaataacatctatcccgggggtgtctattactattaagtcactggggaatcctatcccccttatttccaccattatgtttgaacatattttatctgtttgcaccttgccaccaaccgaattaatcctcatgggtggcatcattgcctctactgagatgctatgcaattctacccatgttgcagtgacaaacgaatgagttgcaccagtatcaaatagcacttttgcgggatgagattcgactgagaacatacctactgccacatctggtgcatcctggattgcttcggcctccaagtggttcacctttccacggttgtacgcttggctacgattgcctgctgccggctgcagtacaccttgccttgttggagcattggggttggtctgatgctgcagcatcttcttcggggacttcatcgaccagtgaccttgatctccacagtggaaacatcctctggatgctcgttgtgctcgggccgcttgga

SEQ ID NO: 17193 - DNA, 635 bp, Arabidopsis thaliana landsberg
actttttaccatatcgccgcttgttatgcacttattagaacaatatccaagcagacacaatcttttagtttgagttgatctagcgtcaagcaaatcattgacttgagactcaacaccttgtacccttgaaaaccatccttggacttgagcaagccgttgcaaacctttatcttcttctatgacaactcgtcttaacagatcatctcgtctctcttcaagttcttgaatagttttctccagagcctcaagatttgcctccatcatgtgaatgtaattcccatcaccaaataagcagccacaagcatgatttagcgtttgatgatgacaagatacatctagtgatacacaatttcccatctttctcaaacttttaaaaagagctagagaaaaagatatacaactcgcacctaacaagactgcagttcaaggatagtggtgaggtgaagatgttctatatccacaaaatgatatgaaacatcaaagacgaagatacgcactacactacactaccctacactacccactttgtctctaacccggttaaatcagtccatattgaaccgaaaccgacagaaaaacttaaccgaagaaaacaaacgaagaacaaccagaatagaattcgaactggcaatgag

SEQ ID NO: 17194 - DNA, 1809 bp, Arabidopsis thaliana landsberg
ctgatcttgatttctttacattcttttctttttcaggtgaagctccgtcgtctattaggtttattttgatttctccgattagaattttctgtttttcggccttcatctcgtcaaatattcccgagccgacaatgagtctctcagattctaccgactttgtgcactgagacgatcttcccccgatccataaacaaaagatggtttggagttcgtcagagggctccgaaccgagtttgagtcgtcaggacggtgcatcatcatcatctaacgcacgtgaagagccgaacccttttgtggctggggaggatgccatcgctgatatagctcgggaactcgatcttccaaagtatcctaagccgtctctcgttcgaaaaacccgtgccccagcagctgatgaggctggaacatcaaattggcaggacgtaaccaagcccttgctccaggtgatagttgaggatcatctttactttgggctgaatgaaactgatggaattttctaggctactgagcggattgcgatgcggaaatctgacaagggaaggaaaaaaagaaaaacaaaaaaaggttgtacctgatccgcctggttcgaccctttgcaccgagcaatcgcttcgggacctggcggctcggttcgattttggcaaagatgtcgtccttcgccttccaacctcgagcaagagagctgacaaccctctggagggtttcttcaccctttatgaagggttcttttatcactgcttcctctggtttccgatcttgaggttgattctgtagtacgtgacctcataccagattactctttcctagattacaacacgttccatgaggcatctcgtcgggattttggtgcggaattacgagacgaagaacgagatcacgcttacgcatcggaagaattatttagagattcgccgagtacccaagtcggtggtgaacagatactacatttccccggcgaaagacaagataatcatctggggttccttagcaaggacgagccctatacagatcattttttctttgtggctctcaacgatgtcagtgttcccgaaaacctggtcgggacgattttgacgagatggggcactcttggtagttagacttagaattattagtttacacccgagatgatcgttgagatttgacgcttaacttatgtccttgttttttgcagctcgctctattcgattcctcgagccgtgtcccggtgatatcgtttttgttcacggagagttacctgctgggaagtgtaactgggtagatcacttttcaagggaaagagtcgaacgagccctgaagttaagttgcggcgtatcctgttcctccagctcagaatcgtcagaccatcgattttctcattttaatgagttgcaagaaaccaagctgaccctacaggaggtgtatgagaagaagaggaaagaggccagggaaaagaaacgggccaaggaggatgccggaacctcgcaggttgccctcgaggcgggtgccgtaggcagcgttcccgaggcaactgccactccggatatcgtccccgaggcgacgcctttggttgccaaacctgtcgaagggcacgagttcctgtcaagcccaaacggttctgctgccatgaaccgtcctgagacgatattcgggttgccggttcgtgaccgttctaaggcgtcggggaagcgcataagaagctcagaccctgaagcaaagaataagaagaaaaagaggaaggaaggtgagattgctcagaaggtagccgagcctatattcgaggataagaccgcctcggctaatcttattggggcttgccctgggttttgc

SEQ ID NO: 17195 - DNA, 889 bp, Arabidopsis thaliana landsberg
gataatgtctcttgagtataactccatttttacccgtttgcgcattttccttctaagggttagttgtgtcctagttaatataaaaacatgttataaaataatcaataaccaaacaatgaagttgaaactattattacttctatctagaaaattaatttcaatttagtgtattaggaaaataaatataaaactaaaatttaacccgcggtttattgcgggcaatcggtttatttgattcttatactaaatatttgaatgaagttgatatcttaacttataaatataattttttaatcaaacataattaaataataattgagatttttttaggttgttatttagtgataaaaggaatgtgttaaaatgtgtttaaaaatatgtactaattagttatgtgtatgtaattttagtgaaagtaaagtatttacaaaaatgtaagattcacaaattggtgtaatactttgtatgattatatgtgttttttttaactatttgacaggttatacacttttttggcaaaataaagaccatatgaattatgttatttataattatatgtctttaaagggaagataaaaaaataaaattatttcacttatttttgttgaacggtttagattgaagggaattaattttattgaacggtttagattcaatcagatcatataaagtttagaagattgttaagaccaaattatctttaatgattttgaatagcaaataacaaaatccaaaattgaaatcaaaattgaggccaaattagacaaaattttaatttgtacttcacttttaataataaggggatagtgaattcgttattacaatactttttgaagtaaaagtgaagatatcactaaagagatacaatttagctgtgctcgtggtgact

SEQ ID NO: 17196 - DNA, 3673 bp, Arabidopsis thaliana landsberg
tggggaagtaagaagcatatcaatcctctcagtgtcaaaactttgaggcagaaccatttgcatcttaggtaagacattacccatgtgcacctgcacaatatgatgcatataagcctcagactttatgaacttttcgctacactggcagcaaacccagaacctccaagtcttattggcctcacaaaaggaaagagcttcactaataatctcattttcattcccatcctttgaagcactaaaatgactcttaagatcgctaagcttaactctaagcaattgtttcttcatttctttgctcatagaatcccagtatgacttaacccgatcccttctatccgctgtggagccgtttctccttgcattcccatgctttctcctctcaccgcttctcttccccgaacctaatgttgcatctgatcccttgttgtcaacagcgcctacattctcacactctgacttctgctgcaacaacctagctgcagctaccctaacttcaacctccttccttatctcttcaatactcttgttagcctttttaatctcattaggcctcctggtctgaaccaagttactctcaataggatcctcagccattctcctaataggtatcaaccgaaacttctcttcaccttttcccagattattcatccaagtggacaatgaactaatgttggatttctgtattagtgacctgagctcatcctgcacatgaacaatacgagcctcaggtgtcaatatcttaagctgagtttcatcctgcaaactctctttagcaggatcaatcggattttcgatagagagagcacgatgacactcttgcacaacttcgtcgtactctctctttccatcattagcagcctcgtaaagcaagttggcataaaaatgcccaaactcaatcgaatcaggagacaactccacagcttttctagcagattcaattgcattccggagatacttctgtttcgtagctagatcttcgtagacagcagcaaccttcacgcagatagttccctgaacacggtggattagggcagagtcttgatggcgagagcatgaatccttaatgagacgaatcgctttgttgtagctcccacgaccgaatgacttcagtgccttctcgcattcgagcttgatcagagccgaatccaacggcgcgggagcttttttcttctgacccatccacgattcagcttaaataccttaattttatcggcatgaagaatactctacgcgtacgtatatatatatacgcgccaccaaatgggcaaagatggtcaaaatcggatattaaattacagtcaacagacggcgtcgcctgagagatcccggccacgtattacggcggagattgttggtgaggggatagaggtagagagagtaacacaggagtcgttgttgtgctctctctctctctctcgctacggagcagaagaatgtcactaaaccaaaaaagagatttacattagcgattacaaaccggtttacttcgattagtaattatttctagttgaaccatcggtattttatggtttactttaccagacgaagcgaactactcggtttgcgaattgaaccgctgtgttttttggaaccgctacatgctggcacaacttgcccactttgacagatattcatcaggatcggcaaggagcatgaggttgtcaacttgctcattgtaagagctatccctagtgagtgccttcaggctgcctctttgcgggattgaccccgcaaatgccgcatatgaaagccgactctcgaccaactaaagtcatagcctcataggttagtttgctttctaatgttcgaatcacttacccgatcacaaatcctaatttcaaatgtcgttttattacggttaagtcctaagtgttaaacacagtcggattgaaaagaaaataagaaacatatactactacatagtcacatagtaaatgttaaaagaatgatatgtagagatttcattggattagagtttctgcaatttctctcctaacttctgacttcattttcattagttgacaagatatgatatatgtataatgatgatatgatctatagagatgaccgatgaaatagatttatatgaacatataatccttaatgtgacaaggatttaaccaagaaaactacatgatatcttcttctatgacctcttccactgaaaacacttttgcttaaattttaaagacaaaatcgtcttccccatcctcttagaagttagaaccactgagatgagtgtaaaatcacattctttcctctcgagtttacttctgcttgtcaaaaaaacgtacttacttcctttgtagtatgtacttacgagatctcctaaattgtagcaacagaactctacttggtctgcatttgttttgcttcttttttattttaacgtctctcgtagagaagaacctgtggctgcaagtgtcctctttcacacattgaaagaacatcgatccagctaccgatcacctgaaagatattacaaaaactgggtgataatgtccacgagtgtatctgctgcccgcaaaacccattgcattgataatcttaccttgacggttttgtcatcgtacatgatccactgatcgtgctcacgactatgtgcaaatcaatgataatgctgtccataataacaaacctggagttgcagaaatagcaaaagaacaatttgttaccttgaggtttttagggtgaaagcacacaaggaaaacacagcacatagctggtgttttaacgactcttctgataatatcatagggaagaagaggaagaaatgcgtaccacagaaactaagctatatgtgctcttagggtccagaccacggtacatgatgctgatgtctatctcggtattcaaggctgcaagagtagctgctatgtcttctacagtctcacatgtgttttgccaccctaaaactgccagccccaaaataattagtgacaagacgcgaatatcagcagtctgaaaaaatttccattcatcaaaatcctaaaaataagttttacctgtagtaaatacatgtggtggagtagtgagaatatggtggatatggttgagtttcccacacccaccggtttcgggatcacaggctagttgatggttcatctcgacaaggttaagaagttcatcaaatgaattttcagcgcatgtaacctattaggcgtaaagtgggacaaaaccacagtgaataatcagattatatatgtgaaaacgcaatcaaatgaacactcatacgataccttcatggtgcgtagggcactagcgttgatgttatggaaaaaggaagtgtacttcaaatgcctggactccagcccacagctgtagcaattcagttgctcaaaaatatccattccaaacaaagaatgggcaatacatgtgcggttggcacagtcccatgaaccagtacagttgctgtctgaggaatccacatcagacacgcttgaactttgagcaaatgagcgatgaaggcagtcaaagatcacagccagtacttctgaagcatcgttcatctgagcctgtccaccatatgacgcccaggattaggctaattaatgaaatgaaggtttacactgtattaggataaacatttaaaaccagtaatcaaattcttttacctcttggaagaaactactatctggatacaagttacttaaagcaatcctgagagatgaag

SEQ ID NO: 17197 - DNA, 1786 bp, Arabidopsis thaliana landsberg
  unsure (1)..(1786): unsure at all n locations
ctttactccataaacctttaatgttatagtcgccctgaagtcctttttcaggccaagattctctgaagagtgacatggtacagttttggagtagtgatgcttgtacttttaactgggagaaaaccatttgacaggtaaactctattatgatccaaactaggcttgatgtatgtagttgagaaatgtgtttctgtttgaatcttacaactggttataatttgagcagcacaaggtcaagatctgagcagtcactggttcgatgggcgacaccacaacttcacgacattgatgctttagccaaaatggttgatccagatcttaaagggctttatcctgtcaaatccctttctcgatttgcagatgttatcgctctctgtgtccaggtaactaatggtcacaaatcgagtcttgcaaattcaagaaagtcttttactgattttgggtcttgtttcttaacagccggagccggagtttagaccaccaatgtctgaagttgtgcaggctctagttgtgttagtgcagagagctaacatgagcaagagaactgtcggagttgatccatcgcaacgtgctggtagtgccgacacgaccagtgattacatgtaaatgcctctaccaagagaaaagacaaacactttgctccgtcggatgttaatcatagacaattggaagatagaaaaaagcaacctcatacattgtataatcccattgttttattgtaattgtatgttccaaaggtgtagcttctagatcctttacatgaacaaaattctttcttgtaatcttctacattggttctatttgggcttggttcaattcttgatcatcaacttgttatcaatttcaaaagacgtgaattcaaaaaaaaaaaaaacttaacaaagaatttatgaatccaaaagtagtagacattgaagaagataaacccgagttactggaataagttgtgaaacaagtgctacaaaagagcttgaagggaagagacacaaacaaagaacaaagagtgtttcggagttttgatttcggagttcttctatctgtctcaatctctctaattgtagaccatatacttgggagtggcactgaacttttggtaacctttaatgactttgttcactgcgtctagaaagtctttctcagtcacagtctttctcctagctctgattgcgtacattcctgcttcagtgcatacacttcgaatatcagctcctgcaaaaagacaagatttacaaaacccaaagtcagaacaaattccaaaagacagaaaagctgtttcatggtcaagggatcatcaatacccgttgagtttgggcagaggcgagcaaggagttcgaaacggatgtctctttcgcagttcatggttcttgtgtgaatcttgaagatctgtgttctgctctccaggtcaggtagaccaaactcaaccttacggtcaagacgtccaggacgtaaaagagctgggtctagtgtgtcaggcctggattgaagagttaatacagaaacaccaatgagtcaagcggtattattgggttttgtagtttacttgaagatggtaagagggaatcgtaactgacctgtttgttgccataagaaccttgatgttaccacgtgcgtcaaacccatcaagctgattcacaatctcaagcatagtacgttggacttcgttatcaccaccaacaccatcatcaaatcttgcaccaccaatggcatcaacttcgtcaaagaacacaatgcaagctttcttggaccgtgccatctgantagagagtttatacaattcagaacaaaa

SEQ ID NO: 17198 - DNA, 965 bp, Arabidopsis thaliana landsberg
cttcgtgggtaaacgtgcattaatgtgaaataaaatataaaatactaaacattatagaaaatacaaattacattatttatatatttcataatataaatttaaatgtcgaaacataatatttaggtacatttatacctttgtctctgacagaaaatgattccagtgtaatgcgttagcgattacaggattgtgtgtacagtgccagggtactgttcacctatttataggcacagggtgcaacctgtgtaaaattacatttaaaccctttataattgactacaataatgacacaaacatcatgggtctttgagtcaatccatctttaagtcggttcggcctttcgtcttaagatctatcattgtgccgaagctctctaagtaatagcttcagcgcttgctcctgagagtgtctgccgaagtgtttctttctttaggatctttggctatgaagcatacccccaacagtagccccttcgcggtgctagatcgtttttcgtaacgagcttgatccgtgaaaaaatcttttaggcttcgagatgccgaagatccgaaaaacaccttccctgagctcgttggcgagaaacgattaaaataatccttgcgcgaggtggccccatcttgcagcagttatgcgcgccctggtgattcaccttctcggactctatggcccaccgttcaatgagtgcgggtggctgtttgtccggtgcggaagaccttgacgattcaccttcccacctgcggcactatataaacagacgggtaggtgtgaagttaccacagcattcattgctattgcactgttttgctgccaaaatattgaccaaagccgaagcttgcttattgcatcctcatccgaagctatttgttttactcaagcttcgtaacaagaaagagcttcggcaaagttaaaaaatttcaacttcattcaaaaaacaagaaattcaatcatcagatggccagagtacg

SEQ ID NO: 17199 - DNA, 520 bp, Arabidopsis thaliana landsberg
attatcttaaacattaaacaaaacaaacaatattaataaagcaaatatctacatatacattttatataacaaattttattaaaaatttagccccgcagtatactgcgggtcaaaatctagttggataatagaacttgatctaattaagaggacacgttatgactggagaagaatagaaggatgggaagagatcggttgtgacgaagaaaatggaagcggtgatggaggagacgtcacagatcttaactgttcaccaccaaaacaaatggcgacggagacgagaccgttcaacgatgatggcaaaccagtgatgagtatattttgtagcagatcatagatggtgatgttgagatcagtcaaaggaaagaaaaagaacaaagaagaagagaaaggaggaaaaggaagaaaagtttcaagaatgtttcttacaggctaaattcccgacagaccagaaggactcagataaggactaaggtgtcactggaaagaacacgctgtcaagaatccacagcaactgacg

SEQ ID NO: 17200 - DNA, 761 bp, Arabidopsis thaliana landsberg
attgagacctctcgtctagttcgcgaactgtgtttagtaatctttgtagctctgcagggaaagtgcttgcatctacatgaaattgaatttccgaattgtacaattaaaaccctaaaattcgaactaattagagaaaatttatcaaataaagagagaaattatggatcttacactcaaggtaatcatcaacataaactccagttcgtgcaatagccatctttgatctctgatgaactggatttgattatggagcatagacttcagctaggatttcgaattggggattgagaacgaagcttttttttttctcacgagttactaaagttatcaaaccatacatgggctaaaaactaaaagccccacaaacattgagattacgcaaaacattttaagcccaaaatgagcccaatagcattgttttgcgggaaaaaaatagcattgtttaatgaaaaagaaatggtattctgacttcattcatgacccagccaacgaacgttgtcaaaatattcaactcgacatcccattcgatattaaaacgatgttctaatcaatgaccagcaaaattgtcattatgtgtaagtaataaagcaatgcatggtaaaataaaaagaacaaaagaatatttggaaacacatagacgaagatatgtgcatgtgatgaaacaccaatttcacaagatacaacaaactatataaactcgaaagagtgaaataaattaatttttaaagcaaatcttttagggtaattaacgaatcattcag

SEQ ID NO: 17201 - DNA, 2117 bp, Arabidopsis thaliana landsberg
  unsure (1)..(2117): unsure at all n locations
gtcatgtccatcatcatcggcactgttggtttgagaaacaattgcttctcttgcaagttcaaaagcaaacttaatgtcgttttcggctaccagaattgcttcgctagaagcaaatttctccctaaggcgttgaacttcttttataagttgtttgacaacttttttctgcttaggtttacatttaccacttgttatctacattgtaaatcagtatcagttttgttaaaccaaaacatcacaatggaaaccgttgtcacaaaacaagagatgatatagataaaaaaatttgagaaagcatatattattatgaaagtgccaaaatattcacgaaaaaggtataccaaagtaaagtaaacacttacgttttggtaaagctcattgtcatcacaatagatcacgatctttctgatccctaagtcgagtgattcacttaacccacgaatcaaagccctaaccttaactccttcaacgtcactcactgattccttcatctcaaacaacaactcatccatctgatcacaaatggcaaccccaaatccagccgccacattatccgtactcaccaaccccttagagtacaatctgtagacgacgtcgtcaaaaacttttgccgctgaagattgagtttcgacgaccttaatagaaccctcaccttcaaggtttggtgtatctccatctaccctccgtttcttcgaaatcgtgcctaaaagcagagagatttaaaggtaaagtatgaaggagattgaagtgttcttcatcttattactctcttaatattttcgattacaatagcctctcttatatagtcatagaggattaggttaacccctctaaacacttgaacctattagtcaagataaggtcttgactgagacagctggagctattgagcatcttcttaggagctgccttaatcaccagctcatcacttttgtcttcttgttcttttgcagatgaccgttgcacactaacaggctgactggacatttgtttcgtcttgggcttccagaccatgttattgggcttgggcttatctgaatctttagacaacattggtggaactacaccgtttagagttgtgtctgaatttgacctaagtctcttgtccttttgctcgattaggttatcttcaccttttgttgacctttcaatctcattctccatcgatctctttgtatcttcactgatagtccccctcaaactcggagtgggtggaacatcaacgccaagtttgaatcggagagaagcaaacagaccatgaggaagtgatttggtgaagatatctgcaagttgaaattgattcgagatatgagagactcgcagtgttcccagagctacctgttctcgcacatagtggtaatgattcgcgaagtgtttgctcttcttgtgaaaggcaggatttgcagtgaggtaaaccgatgatagattatccccgtacaactccggtgtttgatgaagtggaatgtcgagttctttcagaagcttacatagccaggtaatttccgaagctgcttcagatagagctctgtattctgcctctgtagaacttttagcaactgttggttgtttctgtgattgccaggagatgatgttgtttccaagaaaggtacagaacccaccagttgatctgcttgttgtttgacatcctccataatcactgtcgctataagctcttaaggtacagtccgtatccttgttgaaagtaattcccattgtgatagttccttttatgtacctgatgattcgtttcaggagattgaagtctgctacagtgggcatatgcatcttttgannnnnnnnnnnnnnnnnnnnnnnnnnnnnnnnnnnnnnnnnnnnnnnnnnnnnnnnnnnnnnnnnnnnnnntctgaaatatgttggattctcaaaattttcttcttgatgagataccttgtttaattgcaggggcagaggtgttggcataggagcacagtcaagcataccagcaacagcaagaagatcctctgcatatttctgttgagagaggaacagtccccttgagtgaaattgcgcttgtattcccaggaagtagtcaacttggccatatctttcattcggaaacgcgttgtaangtccagaaagtgagtagcaaggtcttg

SEQ ID NO: 17202 - DNA, 1272 bp, Arabidopsis thaliana landsberg
atgttgtgttccataaagagtgggcaaagccgtcccagaaatggacccccctgaccatccagtccatcctctcaagctgatcctccgacatacgagagtttctaattgtagtttctgtggagaatttttcagtgtcggttatcgctgtaacaaatgtgatttccagttggatttgatttgcgcgaggagaccagccccacttgttcttgctgaaaactcctacctacacgagcatccactccaactctcccatgaagcgcacgaaacactcagagattgcaaagggtgtggccatcaacataaaagctggaaacatttctacacatgtcatcaatgcgagtttttcatcagtctggattgtatcgatcataatagtccagaagcataccacacttctcacccccaacacccactcaagtcacttagatatgaagtccctggttacgccgacaagaaatgtcttctttgccgcgaggagtttgatggaatccatcgccagcttcaccactgtggtgtttgtaattttagcatatgcagatcatgtatgaaaaacccaccaccggttcttgttaaaagcccgaggacccatgaacatcaacttcaccttgttccaagacgcattgacttcacttgcaatgcttgtgggacgctaggtgaccgtagcccttatttctgtcttcagtgcaatttcatgattcatcgggaatgtatcgatctacctcgcgtcataaacatcaaccgccacgaccaccgcatctcttacacccctcgcctcggacatggagacgggaaatgcagagtttgtcgtaaaaatgtggatgggttctacggggcttattcttgctccaaatgttttgattattttgttcattcaagatgcgcaaccagaagggatgtatgggacatgatcgaactggaagggacacccgaagaagaggaaactgcgccattcaaggtgattgatgacaacacgatagaccattacggccataagcataacttacgaatttaccgtggctggaatctaccagaaagtgtagtttgtaccgcatgtgtcttccagatttgttcagaaccgttctacgcttgcgcgagaaagagatgcgatttcataatccacgaaaaatgtgccaagcttcctttaaagaaacgtcatgtgtgccacaaccagccactcgaactatccccaaattatggcacctacttgttacataggtgtagtatttgccgtcaactgttcaccggtttctcctatgaatctaaggaattaag

SEQ ID NO: 17203 - DNA, 1406 bp, Arabidopsis thaliana landsberg
caacgaatcctgcaaactaaatgtccagctgatatccttcactaactctttacgttatgaacatccagctcagttcgcagagcccggtgcagcgtatgttacgaatctccaggtaatcaatgcgtgttattaacttggaatctttccgttaacgaagcaatataaaagggtttctagataactggcctagtgatgggcttttccgctgggtcgggcctttctcaaagccctacacactccaaatgtctcaccaaattgcgggtttggttagcaccagatccgacatccacaatccctttaaaattcattagttctagaacgtgaatcaagcaatgcatcatcaatgaactcatttggctaaggtgaaggtcaagagacaaagatggtcccttaaagaataggttttagtaaaatgagatctctcaagaatgattcagctttagtataatgctaaaggtaagtccctcattatgcatacagagataagatcccatctacccagaatataacaaataaagctctaatggtaatctcatctccaatcccaatataagaacttaactcttccctttgcattctttaatcttttaaaccctttttctatcattcttttcttttctcttaactctaggagaagctttctcaacactttgatacatctagcggatttggatttctttaacaactaaggttcctgatatatcccagttttcactgattttatctatgttttaggtataggatcttgagtctttatattatttctcgagtctttttagtgtcttttcaagtattctatgcagtgagacaacaatagagataaggagacattttggagcaagagctaaggaaaaggaagctaaggacgaatttggatccaggaatcagggaggagtgttgattgacacactcctggtgtcgatcgacaccagtttcggcccagcaaagtccatgacgcttccaagtttacagaagaggaaatttgcccctgaagactttctcatttgcattattagtccgtggacgttttataggggtattatattatttttagacctaaattttcttttatcaagttctttgcaaaacccttttttttagagacataagctattcatcccttgttcttcagagattcattcagttttaaagacagtgaagagatctcttctttctcttatcttatttgctgtgtttatgctttctatatcaaatatgttgtttcactacaagaaaacaggtaaacgacgactacaatcagcaacaacaaacgttttcgtaacgttatatgactttttggcgacggatttacgactcgcatgcgacaacacgaacaattgtagttacatagtcgttgttttacgactatcttatgcaatcggcaaagagtcggcaagtaacgacta

SEQ ID NO: 17204 - DNA, 263 bp, Arabidopsis thaliana landsberg
atcaaaacaaggttcgggcatgggcatctgtctcacttcacccatatgcgaggttcttgagcaatctttcaaactaaatttcgaggcaaccaacaacgtggccgaaaacgaagcactcgtagcatggcttaatttagctcgagggctgaagattgctaaaatatgggcttattgcgattctaagctcctcgcaaatcagttcaacgatgaatacacggctcgagacgaaagaatggaagcttatctagcccacatacacagtc

SEQ ID NO: 17205 - DNA, 1116 bp, Arabidopsis thaliana landsberg
aattgcttttccacttttgtctctttttcatctgtgataattatcattgatatttgtaactctttctgaatttgtgatggtgaatgatgatgatgattctgtggggtttctctgaattttaacgttgtctattatcttaaccaattgataggaaaaagtcttaattttgtgtttgttctgttttctggttatgagctcacatgtttgagattatctttctaacacagaagcttatgatgcacttgatccatatggaaacattactataaaatgggatattatgagctggactggtgatggttatgtggtaagaaatttaaaaacttcactttaaatgttgtggttatcacaatgttatataataaatcttgtttcaaatgtgtctttagtgattactactattaacaaattattggcttcaggctgttgtaacaatctttaatttccaacaataccgtcacattgaggcgccggggtggcaattaggatggagttggatgaagaaggaagtaatttggagtatggttggtggtcaagcaacagaacaaggagattgttctaagtttaagggtaacattcctcattgctgcaagaaaactccggctatcgttgatttgttaccgggaactccttataaccaacagatatcaaactgttgtagaggcggtgtgattagcgcgtgggcgaagaccccgcaaccgcgatttcttcgtttcagattagtgttggccagtctggaacaactaatactacggttagagcacctaggaatataactttgaaggctccaggacctggttacacttgcgggcctgcaaaactcgttaagccgagtagattcatttccgcggataaacgaagaaagactcagtctttgcgtaagtttagcttttgtgttagcatctataagttatattttcttgtttctaatcccacttctcttgatgttttcttatggcagttacatggaacattacttgcacatattcgcagtttctagcacggaaaactccgacttgttgtgtccactctcagccttctacaatgaaactatagtacgatgtcaacttgttcttgtggatgcaaaatagtctctagctggtacatgtgttgagt

SEQ ID NO: 17206 - DNA, 952 bp, Arabidopsis thaliana landsberg
tgaggatttgacaaattctttacctggggtggttttctcatgctgtaaaccatagtctttaacgacaatagaaatacgttctcactgtaaactttagacttggactcgcctaaccaagtccccttgatcaggccgtagccaggttcgttaaagtatggttgttcattcaagacaagtgcttgtattgagacaagaacctgtaacattgtggactcctttgggagccagctctgcctcgcgttaccatgccaggtactgagaagactcaagcataccttaccacagttgtatagattcgggttgattctaagcccaccggaatggtaataaacattctgccaacagaaaaatgaacttccagagtcattaaggtttaaaaacagaacacattttgaggatgtttctgggaggacatactggtggcactgaaggataggtatctgggaactgaatatcgaaaaagaaaagaccgtcatggtaaggagttcctcggctccaataattacagctctcaaaagatccattcttgattcgcaggctctgacatatattgtctctgtctaacaaaatgtgagagaaacgaaagaacaaataatgtggaaaattgttgctgcagactatacaccgacctggcaaattctggttaagaattttccactcgtcttgaacctttttcacccaattcttcgagtgctgaagagtaaaaagagagatggcgggtaaagttacagcggttgaatatgaaaaaagcgattaaggaaacaacaacccctatcgaagaggataaattaatcatcacctgctttgacgctttccccttagaaacatagtgatgatctgagaaatcctcaacggagtcaaatcttttaaagttgcgcagaaactcttccttaagtttcttaacactggaagaatactgtactagagaaataacctcagttaggatttaaca

SEQ ID NO: 17207 - DNA, 1056 bp, Arabidopsis thaliana landsberg
  unsure (1)..(1056): unsure at all n locations
tcagcatgcacctcgttttcctgccccagcagcccagcagaacagtcagcaccagctcaggtggaaacagagcatgtttccactgtggagagcaaggccactgggtaattcaatgctcgaagaaggcagcccagcagcaatcaggccccaatgccccagcaaagtagaacgtatctcagcctggagcaggcaaccgctctcagccgcgttataaccatgggagattgaatcacttggaggctgaagcagttcaagagacccccggcatgatagtaggtatgttcccagtcaattgcagaagcgttatttgatactggagtaacgcattctttcattactgcatcatgggtagaagcacataatcttccaattactaccatgtcaacccccattcaaattgactcagccggtggtagaattcgagcccatagcatttgtttgaatgtaagtgtggaaataagggggatagcatttcccgctaacctcatagtaatgggtactcagggaatagatgtcatcctagagatgaaatggttagataagtattaggcagttatcagttgtgataagaggacaatcaagttgatgtccccactaggagaggaagtggtgaccgagttagtcccgcctgagccaaagaaaggaagttgttatcagatggctattgatagtagtgaagcagatccactcgagattatcaaggttgtgtccgagttcccagatgtgttcccaaaggacttaccaggcatgccacccaagcgaaaagttgagtttgtcatagagcttcttcctggaaccgcccccatctttaagagagcttacagggtatctggaccagagttggttgaactcaagaagcagatcgatgagctgtcagagaaaggttatataaggtcaagcacctcaccttgggtcgcccctgtcctgttcgtggagaagaaggatggcactagaaggnnnnnnnnnnnnnnnnnnnnnctgaatgaggtcacaattaagaacaagtacccttgccccgaatagaagatctgttcgaccagttgagaggaccagcat

SEQ ID NO: 17208 - DNA, 1515 bp, Arabidopsis thaliana landsberg
tcatcatacaatgctcgaaataaatagcggaaaggtactttaagtacatcaagatgtccaagacatcaacacagtctaatacatatccatagtgttcaacattaatatcaaagtgcggagaaacgaaacgtagaagataagcctacacaggcaactgactgggggtttgccactaaagtaaactagaactcgtcgtagtcctggaactcctcaaagtcctccatgttaccaacatcacctcctgagcactgagtacagtggggacaacctggggtgggtggtttgtaaagcaagggtgagtacacatcaacgtactcagcaaatgtcccatttggctaaagtggactagctgtatgtggagttaaggtttagctgttgcttttagttagtcaagttttattattataagtagagccaaattttagtaataaacccagttattacccagaagtactccctccaagaggaaataccagagatcagaattataatcatcattgctaatcatcatcataaaagtaatcaaagttcttctaatcaaagaggatccaaggctgctcataaccgcgagcacggctgatatatcagttttcaaacactctgcagaggttgtgcactttacccacaagccgtgattcccattctgcccggagatcatgactccattgatcactaccaaggtgacccagcagggcatcactacatagcctttacaaagattccccggggctgtagcacccgttaggtttcctaaatgcaccgcactcctccccaaggggcgaacccaaacttggcagagcgagccgcatacaccgagccccattgacggcacgacggctaagtgaactacaccccggatcctctaattattcagctaagggcaccccattccaccctcatggttgcactgttttcccgggcggtcatccatagaacaggtccttacggagaggcactcgagaaaccgctcgagcccccttgatgaccacaagtacaacatcataataagagatgggaaaacagcgtatcatagataatctcatcatgttcattgattatagtttaagcaatagcataaagctaaacagtaataatccaacccaaataggtaaacaaggacatggataacaaaagctagtcaatccttaggcataaatgtgtaaagcgggaggtgaattaaagaatgaataggacagagataggtcaagggacacttgcctccaccaaccgactgctgctcaggggcttctcctgcgagttcctcgggctcttcaaccggatcgttctctaagcggttgcaaacatacatacatccatccattgaaattaggaaaccaacagtacaccatacaagagaatgcaataagtagacagacgttctacgcatgctcgcgagtacggttaagagcgacataggatcagacagtcgagagacgaatacgttacatgactatacattaactactcgcttaatggaagtagatttaatgtagacactatgtttagcgtacagta

SEQ ID NO: 17209 - DNA, 2086 bp, Arabidopsis thaliana landsberg
  unsure (1)..(2086): unsure at all n locations
caggtcgactctagaggatcccctgcttgacgaaatcctccatgttgaattttgaaagacctctgcttgcccatagttctgcgagatgccttttgagtacactgcagtctttggtcagatgcccggtgactctatgtatatcacaatacaagctttcatctcgaatccaagtatttgaccttccttttccttgtaattgtttcccgacgttattgttgaatggttgtgaaccaaacttccttggtccttgattctcccgaggttcgaacttcttgggtggaaaatgactgctggttttgcttgcttatttctcttcgcaaaactttctttttcatcttcgacattccatccaattgtgcactcggaataccgcatcttgaatagtatcaagtttgtgtagtatcaaatcttctttgaatctcgaatcatgtcataatccttttcgcaaagctgataaagccgactgttgtgagatccttgggagcttcgagagtacgttcttgaatttagtgatgaaagtctgaagtgtttcgttcggcccttgtgaaaaattccaaagatcggtgtccgaaatgcttttatccataagaatggaatactgtttcaaaaacacggctgataattcgttaaagttactgattgaacctggctctaactggnnnnnnnnnnnnnnnnnnnnnccacaaagattctcagaaaagagtttgcaatatcccgcatcttcctcagcttcatccaagtcgactcgtcctgcggcgattagaaaagcttcgagatagctttttggatcctccaaaccgttgtacggttctagattaagcttccaagaatccctgattctcaaacttgcgatttatgggatgaaaggtgttcgatgtttgcctagcttcttcgatgacccggttgatatccggttccgaactcgtggcctgatggaattttgacctcatttcctttagttcctggctcaccttcctcatggtctcgagctggtcgaggttttcatgctcgtgctgatctgcgagctgatcttcacctctgagatgtgtttcccaatcttccggttgaaccactgcgttagcggcatctggagttgtttatccactgattccatttcgcacaagggagcttcgtgaattgaaaatagtcctccgaactccgacaggattctctgcactcacggaacgaacacgagattgtatagtattgacattttgactaagagatacctggtttgcttgcagtgtttcaacagccctttccacatccgagaatttttgcgttatttccgacatagtttgttgcatggtttgagagtttcggctaacgatgcgctgatggcgtcctctccggccattgcttgttatctcaaaaatgcggtatagaaaatctgacaactcaataaccctccgtccccacagacggctccaaaatatggatgttggattcacacacgcaagtatttatttatttagtggaaaggattattcttgaggacaaatatactataaaatagataaatgattataaaaaaactatgagtattgtaaaagaatgtgtatagctaatttacaccaagaaatgcgtgtgtctttacatggtcttagacccacaatttatacccaaagaatacatttaatacctatttactcacaatcattctactttaaatatatctgtttttagtctttgaattaactatctgaacgtttaaaccgagtccactccgggccttctggacctcacctctcgccccattcggtttctccaatttgagtaatcctgacttcgatgctgccttcacctcgcaaaccaacatctcgcccatactctcacctcgaggatgcttatgggccctccctcttatgggcttcttctacttgtgccgcaatctttggctggatccgaacccatgatgcgggatccgacaccaacaattagccccccaagtctttcgagttgttactccagttcggaaggctttaatgttctaaggacaaagattgcgccaaatgactcttcaatttcccgcctaaattacgtaatcgagttgatttccgactctactgcaattactcgcgtgaca

SEQ ID NO: 17210 - DNA, 1396 bp, Arabidopsis thaliana landsberg
cgtggctttcagtttggaaagtcaatccaaggaatgttgtccaagggaagtttaccttaaatgatgtggttgcattgcaacaatccgttgatgaaacaactctgagcataattgaagaaattatcgttgagagcttagctgaaacaaaccatcaagatgaacctattgattttgatattgaagatgctgaaaaaggagatgaatttcattgtaattcatcaacatctgaggatgaagatgaagaagaactagatgatgaacaatcagaatattttgaatggacatgattttaatgtgtatttgtaagaaaattataaataaaatattattttaatatctctttaagtacttattttcgaagatgaaaatcatactattggccagcccagttggtcacatactagcccacaatcttatacgatcgcggttcgattccatttgacccctttttttatttgaaaaactttattattcgtcacaaaacggtcgctctttgcaacttatttgtgaccaatgaaagttacagtcgcactttgcaactgattacctacatattacccacactcatttttgcatttcgatatttttaagtttttgtctatgtatatgttttcttatacgttgttactttaatttgattgaaattagatataaaatcataaccaaactcttcaattctgaattttacaaactaaacattcaaaacttcctaatctatatgaagagttacatgttctttgattaacatgattgatattttcaaacaagttccaaaataagttatgaaagcaatgatttataaacctaaacatatgtatgtactttatatcacaaaaatggatgcttataagtgatttatatcaaaagattggatcaaactatgtggattttaaaagttcgtcttgtgacgtttatataattgtcacgaagtggtcacattttgcaacttatctataacatatttgtgactgtttgtttgcattactaagtgtgaccaatgtccgattttattatgaccaatttctgactatttttgcaaaaccaatgtgcaacgtttttaaaaatttattaaaattttgtttattttcaagttattattttgcgaccaaagagggacgaaatagcgacgagtgttttcttttaagtggaaataaacttctcaactttctcatttatcgattcatttctaaaaccaagggttttcgtttctctcatctttctcgaatccaaggcaaaaaactcctagaatccctttctttctcttcaatttctctacattctcttctcaatttctcttattctcttctcaatttctagatctagggtttgtagatctagatctagggtttagggattgttggtttcaaacctccttttggcctttatggctgctggc

SEQ ID NO: 17211 - DNA, 1059 bp, Arabidopsis thaliana landsberg
taacactcacatttattcaaatccattagttcattgatcaagagacttcaaaaatctgatcaaaactaaagactagtgagattactcttaccaagatcctagtggtttcttctcgattgtgacttaaaatttattgccatgagatctcacaatatttgttgtttctggcatcaaaatctacatcagatatagccttcacaaatgattaaaagtccttccacatcgaaatcttgttgaaagaggttcaaagagctgatttgttttgtgtcaagtggttcatcgtctgactcatccactttaagaagactctggttctgaatatacttgaatctgtaatatgataccagaactttgatcaaatagatagatccaaacgcataacaagccaagattatgccacaatttgtatataacaaccaaccttaaaacgatgcattagatttatgtttgccaactttttacaagccttgtttgcatctggctctatcaattgagctttccgatacacagcttcagctgctgtatagtccattagttgcatataagcccatcccaagttcccctgtaacaccacattcattcaaattccatcagttcactgatcaagagacttgagaaatctaatcacaactaaagactagtcgtgagattattagtcttaccaagatcctagaggtttccttctcgacggtgacctgaaacttcttgccatgagatctcgcagtctttgttggtttgccattgaatgcttctccttgatatatcatccaaagcttttgcttcaataactcaacttgctcttctattctcccacatttctgttcaacaaaattcggaatcccaagtttgtcaatttcactatctaataaaacggtaaccgagagaaacaagagaatggtctcggtcagagtttagttaccttatatagatcgatgaggacattgtctaatgactcttgagcttgtcttgaacagagatctctaaaggattgagtatcgtcaatggcttcttcagctctgttctgttgattcttaacaaggccatgtctttaagagcact

SEQ ID NO: 17212 - DNA, 1581 bp, Arabidopsis thaliana landsberg
atgagctcttgtcccgagctgaaacgtgaaaaagacggaagcaagttttaactgcatcagcacaaactcaatcaatgcattgtggaaccccctctcaagtccaatctccatcatcataggcaaagccattaaaaaaccaatctgcacaaatgattgagaagcaagagctgcctcaagaggcttattgttacggaaagctcgttggctactcaatccttcttcaagcccactaagtactagatataaccgtccataaagaaacacatacaccgttagcacggttaactgtcaaaacacacagataatggcttcagtcttgagaaagaaaaacaaacctgccatgtatatatctagtgattgagagataaaaagggagaatctcaacctaccatggtactgaagtagaacccaattgtggtgaaataacaagacagcatccggaagaaatcaaatcggtgtcctagcctataaaggtcgcgactcaaagtttgctcgccatttccattggcgatttttgcctcaaacattgagatctggttgaggcccacatctctccctttaccaacttgtatatattcatgatgagtcacatttccttcacgcagagtagaattaaaacctgaaaccagtaaaaaggtatgagaaaaactgtaaaaaatgaagtagatcatatgtgtaccaccaaagaatatgagatcaagctagtgcctgcaaatatgtcttcactaagattgatgactttagaagctttgcagataccacctctggtaaggtgaaacagacgatcaaaaatatctggatgtccgtaatggaatcgtactctggagcagcaacagaaagagcacatcaattttgacaactacaataccctgacaagatttcagaacagggaagaaacttacttcaagggactagctagcactctttgcccaatcgttacaaaactgttctcttgatttgacataaaccatgcaagagaagacacacttcacaagaaaccacaaacataggagatcagtatgcacacagaaactaaaaatctagaagccagaaataggatcattctgtagtaccttccagtgaaaatatgctctctaagaccaagaatcgtaggacatcttacgcctccatgctttcaagaaactcttgcagcaagttcttcatttgaaagcttcctccatgtagttgtcctaaggtcaaatatttagaggttaagagtctcctgcggtgattattctttgaacaattttaagcatattatatgtgattcattagcgacacatgttagacaaaagaaaactacgcatcgcacctgattcatgtctatcgtctgcaacccttctccacgggtaaatatgatagcatggttctgattttccggctttccctctcctagtatagctggtcccggaagcttaatccgataaatgagctgacagaaaataaatataactcagtctctcttgaacagcagcatctatatcctctggcctcactgcataggattaaactcatccccgtattttgggaaaaaaaggagcacaaaaagttagtattttacttagttttctcaacttatac

SEQ ID NO: 17213 - DNA, 1546 bp, Arabidopsis thaliana landsberg
  unsure (1)..(1546): unsure at all n locations
tgaagctgggtaaacaaaagttgaagaacgcttaaatttcattgatagtttgttttgagtggagccatagaaggatcaaggggaaaggttacctgagagtttgttacgtagacatctgctgcagagtataatgaggcaacacgagtggtcgctggagtccacagaaccgagttcgataggtttccattgtttgacaannnnnnnnnnnnnnnnnnnnnnnnnnnnnnnnnnnnnnnnnnnnnnnnnnnnnnnnnnagaagaagtttaaggtcttgtttctgtgttacgttgtcagacaacagcagctttcttctaccggtggcagagagaactgatggatgattgtcaacagcaggagacgtgattttcatctttcgtgatgcacctctcaaacgatgtctggcagaaagactaatcttttctttcctgatgccattgaggttcttgattattttggactgattacgtttagctacttgctcttgtgtttgttctctctccagtgccaaggcgacagattcaagtagaagaagttgtccctttcccgggtttatgctgctaagagacatcacaagcatatccttatcagtcaaaccgaactctgttctgactgattcacgtagcttttgtcttttctccttcataatctcctgggtcagtgttggagtatttagtgaagaggataccccagcaacaaaagctaactcatcattaacagacagcggaacaataactggctgagatctaagctttatatggtcctcttcacaccatgttaaccattgtttgctctgtacttcagatagaaaaattagcaatttcactcggtcaagcacaggttttgctcgatcaaagtactctcgccggttctccatcacccaccaagcgatttgacttccaccagctggatggtgatccatgtattgatctgcggagatagtaacaaacatcataatgagtatcccaacttgaggcagaaaggcatattgaacatgttttaacaattgttttgatgaacaacatataaagttttcactaatagaaaacaatctaaagtgagtatgctatatatgacaatttctattataaaatgcgttttccagtaatatagctgaaggacgaatgagctatggtacgcatttctaaacatgatagtcagcaaatagtgatgtcaaagaatcagcagatctacttttccttacctatccatgaagcacagacggctgatcctgcaatgacaagatctgctttcatggcagttttgaagctgagttctcctttatcttcgaccactttgatccttctccttgtgagctcttgcaataatccaccccttctgctcagaactacagcatatactgttgcaccacagctcaaaagctcggaagccaactccatcattgaaattggagcaccaggcattgataggtcatggaaaaagaggacgaatctcctagaccaaacaagacgtttgaaggctgatttcctggcacaggtccctgaacgcttttgcggactccattcaagaattctatcctccaatgat

SEQ ID NO: 17214 - DNA, 4923 bp, Arabidopsis thaliana landsberg
catatatggcaatacctctctttttcaatgacatcattatgaacctgtcggtcgattttacatgatatcaactcttctttctgtttactaaatccctcatctagttaatttcgaatatataaatgaaaaaaataataattaaaaagatgtttatttactcacaaagatagccataaccataagcttataatgcagaaaggaaaatgtaaaattctccaatatttgtatcagtgattttaacaagtttttgcgatgatttaataacattctccaactttttttttttttttttaatatataaattctccaactttccattttctccttttccgaactacattagcaaatcaatttctgttcacagtttttgaacgtttcattgaaccatttttcgtaaatcttcttaccattgttaaaaagatgggtacaataattctgctttcaggaaacaaaaaaggactacaactcacgtaaaaattacgataggacctggtggaaggtcaaatgtttgaatttgactagtagatatatagtccaatgcaacatggaccgtatgaataatggataacactttaccgtcataccagatcaaaatagagaggacaaaagtatgaatgacacaagacataaaccatttgttagataagtacaaaagacaaacgctcatttcttttttaaaattcagacaatatttcaataaaacagaataaaagtccaagttttttaaaaaaatagaaattttccaattaatatttattttcaataaaaatgttaattaaagctcaaaattttcattttctgtactagacctcaaattcgttggactggacctctttgatcctactaaaatgtcaaaacgattgcaatgacacctaggcccaaccaactagaaacaacaagtcaagaccactactttatgtgaaaattgagttaccgcttaccatcatctatcatatcaacactgagatattgtaaccaaaactaggatatgtttgtttggctttcatcagtgatagacaacagtgacaaatgatgaaattatgtttgttttgtagtttgttggttcaacaatacctttcagcgataaaatcatgcttgttacattgttgctaattcagaaaatttagcctacatatcgttaacgtttataaaacagttagttaacaatcactaaaaattaatatattaaaaaaagactaaaaaattaaaaataaataccgatggataaactaacgactacaatgcaaacacgattctattatctttactcttcgttaacaacaattagaaaataacaacaccatcatgaaaaaacaacatttttcttgtgtaattgggtatcgttgatgcttacaatacaacgaatgtagaacgaacagagtaaatacctctctttttcaatgacatcattatgaacgaatgaatttgtggtccactaaggttgggatcggcccgttaaaaaagcccataaaccaaaaaatattggctgacgaatatttcaaaactgccattctttatttgtttacataactcaaaaacatgacgataatcaaccaatattaaaacgccacgtgttccctcgcggtcatttatcattgaatcgaagagcacccgtccagcttgtttcaatcgtcgtcgtttttctctttgatttgcctgaaatttgttctcttcttttggttgcaatttctcgatctcgaattttctgagagaatacaaaacttaatttctcaaaccccagcagattcgaatttagggtttcttacacccattagatttcgcgtcgatggcgtccaatcgcggtgcgggtggttctctatacggcggagctgatccgtatagatctaggtatatttctaatattatcagtttctccttttctgaaatcgattctggatagagaaaacgggtcctagatttggtgaattctgcgtaaagtacaagtatttatctttggtgtgtgatttgtagagaagggctaagcactagaaatgcttcaggttcagaggaaattcagctgaggattgatcctatgcactctgacctggatgatgagattctaggtctccatggccaagtcaggcaattgaaaaatgtaagaaaccctctaaatcctatttcgatctttctactttttatctatagtgccatctgtattgtcttcttgtggttctgaaggatcattgttctctttaagctttaagttgatcatatgaatttggaaatttgtcttcttttcggttttgacagtggttagagcttggctaattagttgtgtaggtgtttttttgttcagggtactatgataatgttattgttcacaatacttatcagtcagtccacgattaattagttgaatccacttgtctgatgtcttttgtatacatctgtggttattgttttatatcaccacccttcttgaaggaatcagtcgacattctctacaattccttgtgttttaccttgcacttttgcgcattatttatccctcatgattttttgttatatcgttgatcgcttattttgatgcagattgctcaagaaattgggtcagaagcaaagtctcagagggacttcttagatgaactggtatgttgttgatgtccctttagttttttctttatccatcatagtaaattgcaatgtaagcacttaacatcagtaacatgcattcatttactcttctttacctttaagatgaatcactgattatatatagtatatccgaatatcggtttcctataacttgtttcagatgtctctgttcattattagttgggaaaatatagtttcatcctaacatatgttagataactttaaccgtagcttacaaaaccaatgaatcttgataaatccaaagtgtacattatgtttacttaggatctggtctgaacgctggtggtgggtaggattaaatatcttcaatctcacctagtttggtgaaatgcagcaggaaatggttacagcttatcattgagttcctgccactttgtcaatgagaatgttggtgttgaatgtgttcattgcttttagttcgttctagttttttcttttgttacctagaagaacatcctagagaagataatgacaaacaactagatttggtagtgagactgcagaaacaagcatttagtgctgttataagcaaaataaaataagtagacgaaatgttgttcttgtctgaaacataaaacgcttcaatggtattttgtttttgtttgtgacagcaaatgacattgatcagagcgcaagcaggggtgaagaacaacataaggaaactgaacctaagcataatccgtagtggtaacaaccacataatgcacgtagttcttttcgcgctcctcctcttctttatcctctacatgtggtccaagatgttcaaaagatagatagagagactcatggcatacttgtgttaccccccaaaaaaaaaaccttgatgaatgttggataagttgtagaaaatatcctctagattacaaacattttgtggttcttctcgttacctgttatatagagtgcctgtttttcacagtttacatgaagcaaaattgtatcacagaacaacagcatgagatattttagaccagttcaaatctggccttaacctgattaattacccgtccggtccaattaagtattgggctttcatagtcttatgggctgaagtgtcgtgatacgtgtataattatggttggttcttatgtgtaagtttatggtggtatggtctgtagaggataaagcttccacactatgtaaaggagaccggagaaacaaaggaactgggtttggagataagaagtgggaacttgaatggcttccttatccacttccgttgtagcttcggcttcgtcgcgtttatggaatcctgctgcttccagcggcaagatttgcgttccttctgcttcgctttctctgcgtaccggttctagacggactccgtcttctctcacctcttccgcttcttcccaactgcttcattgctcgtttctctcgtcgcctctttccctagcgtctccattttctggtacatcttcaaattggttcgaattattgtttgtgtttagcttctggtggtgtaatgtatcctgttttttacccaattttgatttttttctggttctttgggtttggtggatttatcactgttcccgtgtgttagactctagcttactttacaaacctaaataattcgaagtttttttttaggagaatctgggaattgtgaaacatagttgtcaatggtgaattcgatttgggagtgagtgaaagaagccattttgtttgtttctgatatttcttgttaactttatatcaacaagtgaagataacattttgcaacttaagcctcactttctgatatcttagctcatgtagttgtagccgcaaataatgttgtttgattttcggtacaaaaaccttttagctcatggcgattatttaggtacaatggttatagattcgctcacagatttgcttcaatatgtcacatgaacttgtccctcctcctttgatcataattttcttgtaaagtatattgtacgaccattgtaactaggctaagatttgagcagtgaattataagctttgccagtttagcaacagacgttatggttagttgatagctcaaggttaaaagggtacctatggaatgcattaaagtcattttggatttgtcttgagtcttgattctgggcagtgtgtcgagagtttggtattgtatggtgagttctttgggtaattaaaggaaggagtttaccggttccaatattatcagcttgatacactatcaaacctataatgtcacattgatcaaaatggtgttgctgtcttttcaggtttgtccattgcgtttgatctcagcagtcaaactagtggactgaatggccagagacgcagaggccttgggtagagctgaaaagc

SEQ ID NO: 17215 - DNA, 1380 bp, Arabidopsis thaliana landsberg
ggaaaaccttcacaaatgataacacaattttaaattttgagtaaggccttttataacgttggatccactttgggttataattagcataaacaattcatgtattcgacttatttagaataaacactataaaaaagattataaatatgcacctaaacttgaactctttaatcttttgttctaaatgatcagaacacgttatagagaagtaataaactatttacccatagttttaaatagcttcaaacgttttcgaataagaatattaactagccatatataatccatgcatatcttgtcttgaacaaattctattaactggctagtggtatattaacaatattataacccatgcaaatcttgatacgtggcaaaacataaatttgacaaaatcaatcagtgagctcgacaaatcatataatttggattctaaaaccaaaggcatctttaaaaaaaaatcaatggaggtgtgtagctacggacaaggtcctacggataacggatagttacgtccgttttgtttgctaacgtaaaaagagcgacgcggaggaacgaagtaagtaaatgcagaatatgaataaaggaaagaatcaacatttgtaaaagttttaatgcgaacaaattagtatcatccataatatatactcttatcactcagattgaaataaaaaaatttaaatttgttttatatatatattcttcttctcgtggatcatatacatatgtaaagtttccaggtcacaatttggaatcaccttttttgttagatagtccaaaacttcaatatcaaccttttacttgagatgattccaagagtgtcacttttatttacactaacacaaaatttcaagttccaacatattaaaacattccaagaagtgaatcattgttattacttgtttacccataggttatgtaagttacttatgacacaaaattttacatttgcacatatataagacagatgtgacacatggacagtcacaactcacaaaccgaaaacaaacgttaatagtaaaagtaattgcttattgcatgattgaatgattagataaatataaattatatttaaattaaacactacaaaagaatccgaaaaaaccgcggcgtagcgcaggtagtcacctagttgttataatgtttaatgaatatagacatgtgtgatctaatttgtttacatctcaatctaattttggtttgaaaatcaaccaaaataaatctttaaggaacaaaccaaaccggaaactcatagggacaaagtttattcagttatgcaaaaaaacaaaacaatgggagcttttggctttggaaaagctaagttgaatcaggcaaggtaaggcaaggcagaaagtcagagagagtacaatgtcgcatgtgaaacct

SEQ ID NO: 17216 - DNA, 650 bp, Arabidopsis thaliana landsberg
attcggtgattaactcctcgaattgctgggggttgaacgacgaggaaggaagggcagctaaacgatttcgcttctcttccaggacggcttccaactcgtccctctctcgttcttcggaaaaatcatcttcatgagtttggtccaaaaggaggagattactctcgtactccttgacatcagattccagctcctctctaaccttctcagtctagatgaagacaattgccccttggatcatttccatcccgcgaccgttcacctctttcctggcctttgacgtcgacttcgccaactcagcatcccgatagttggccaccctatgtacttaagctgcaattcggagagctggttgcacaactcttaggcactagattcggattttgaaagtttgtcccgggaagttgagagttcttcttggaccgtgtagtacgtttggtactgctcctgcagcttgccgttggtcttcatgagttcgatggagaggttatccaactgatcctccaatttcagcctagcgtcatgtgagcaaaagagggtggtcctgacctgtccttgagaagcagccacttcgagaacatctccctccttgtcgagcagtagcctttcatagtaaacaatcatgtggatgagttcgctgttcgcctggatca

SEQ ID NO: 17217 - DNA, 1064 bp, Arabidopsis thaliana landsberg
  unsure (1)..(1064): unsure at all n locations
cgcccgatctacatatagatcacatgggttctctgttagattcagtgaagcttccaattatttccatcatcccagaggatcttcattttcccttctggtgttagcgtaacatatgagagattatcagttcttaatgtggaataagagaaagatcctgtgccggctgctgtatcctggacaacgctgaatggacttacatatgatgcatcaattccagatatcccagagaatcttgtttttgcccaaggaccacatctccagtaaggtactgagcctcttcttataaggccttgtgtggggatttgtggtgtaatctccagtgagaactccccaggcgaaggatcgctgttacttttccatgtagtcaacacacgcttcttgccattagaagtatcatacatcaatgatgactgaggcagcatagtattaccaagatgctcgaagctttgccataatttattccctgaaacatcatcaattacaacaaaatttccggtatctaagagctccgcatgacatttgttggatgtgaaagcttttcctgttgaccaaataacatcttgtttcccatcaagcaagatcacgcgctcccattnnnnnnnnnnnnnnnnnnnnnnnnnnnnctagtaacgggcgtatctctgtaagccacccacacaaccacccggggaatgattcccttgaaccagattccaagataatgattttccgagttattaaaactgaagaaacccaattcataaactccattagaggagctgagagtttgtcctattgacaaaggactctctttgtttatccctgcaattgcaaagctaaaacttataaagatggtattggtaaataagagcaaagaagcaaagaacgtgaccctcatcgtccccgtttgtttgttcttttctttctccaataactatctttttttggattagtgtgtatgaagcaagagagccgggaaaaaaaaaaaaactctgtgtcttgtcagaactactttacttatttttcaaaaattatgcattatttaataaatacatgatagatacattggcacgaagaagtcctta

SEQ ID NO: 17218 - DNA, 4245 bp, Arabidopsis thaliana landsberg
  unsure (1)..(4245): unsure at all n locations
aacttgacttggcttccatcagcacgtcctttaggcatcgcagcacgcacaaccactccgtacacgaccatccctttcttcactttaccttttgggacagcgtctttctttacttttttttgaacaattgggttagcttctttcactgaaccaacaatgatatcgccaagtcttgctcctttcttacctctcagggattgaatgcacatcacctctttagcacacgagttatccacgcannnnnnnnnnnnnnnnnnnnnnnnnnnnnnnnnnnnnnnnnnnnnnnnattggaaatcatcaggacacacaattcacaggttataccccacgaatgcatatgaagaaagtttcatcaaggacgtatatttgagaaaagaggcttgacctgagagaggatgcttccattcatcattccattggaggaggaattcatcaaaccagagaaagcattgcaaagacctccaagcaatgaannnnnnnnnnnnnnnnnnnnnnnntcatataacgacatcaccaacaattagtgacattcacaacaagaacaaaaaagttttaatcttgagtctgcatttcatgaaccaaagcaaagtccatgacatatcacaaacccaaaaactcaaagctcatttcgaaacttatactaaatcaatgttgcaaaaaatctaatttttaaagaaccaaactttatcgaatataataatattaaccccaaaagcgagattagctagtcgctataacaaagcgtaagagatgaaaatgtacctttggagagcttggaagctaaagctgtcgccatttctgcaattcaaaagtttcgatctttagtgtcgcagagagtgaatgaatcttgcgattgcacaaagacaccagatttagggtttaacgtcacacactcgctgtcgcagcgatcatttgggcttgtaatgattttagtcatggattaaattatatagtaaaaaagtggtgacgttgtcaaaagtaggcgtgccggagtggttatcgggcatgactagaaatcatgtgggcttcgcccgcgcaggttcgaatcctgccgcctacgtttttccttttttttcgtatttaccttattttcctacattttaaaaccaggggccataacattttttccacatgtactatataacatttgtttatcacaaaatctgaaattcttaattaacaaaaataaacaatggtgatgccctaataacaaacatttctttcttctttttttttgctacgaactttttacttttgttgattgttcatgcatttacaaagacaaaatccaaagtttcttaatgttatgaaaaattcctaaatcaagaagttaaacggctgagaagaggttgatcaagtggaacaattcaccgatgccgtccattttgaagctagcactgggacccactagtaatctgtatcagacaagagacaaaataaaaccccccaaatggcttctccaagcggagctccaacgaaacgccttttttttttaaactctccaccgcgataagagagagagattaccaaattctcaccggagaagaaaaaagggctttcctttcctgagatttccggtgaaaagtcattgactttatcactctcaagtctctccacaagttgattgattcggctctaatctcctcatcgggggtctttcccctcttgctattcaaatggtaaattcaaatatatctctataccattttatgtttctaagagatatctcggtctctttgctcaactgtttatttgaaannnnnnnnnnnnnnnnntttgtttcgttaatgttgttgttgcgtttgcttgctttacccctttttgtttcctgtatggagacgctaattcttgatctatggttgtttttacttctgaaaggttttggtttgactatgtctagctcagttctagaagcttgctctttgcctgaattaaaatctcgtttatataattttgcctaaagctgtaaaatagatgttatgtgccccttgaacctgtaaactcttttagaggcaatgtatgtttttgatgttgttaaatgcaatgcaatggttgcaggctgctccagtcataattgtgggttcacatgtgtgggttgaagatccacatttggcatggatagatggagaagttactcgaatagatggtataaacgttcatgtcaaaaccaagaaggggaaaaccgtaagtttctataaggttacatctttattattttacttcaatcaatgagcttgtacgtggcctcgacctttgggtttaggctaaaaaagagtaggaataagtccgttgataaatttagatgtcgattaatgttacgttttatcttggaatgggatactgtcatagtcccgttatatccctagatcggcaggtttttaccttctgcattcaaggtagatgtaggttattgtgcttttagtgttttgatcaaaccaagtaacataataaatagagaaaaataccttcaaagaacgtttttggtatttactgaatgtcttaaggcaagtttatactcagaaatatggagtgcataaaatgaagctttcaggctttctagtcggcagttatcttgatatgttgtgagagctaattttattgaaaccgttacacgtgatagggaaacagcttaatgtgataagatgcagcatgagacgtaaaaacatgatttacgttgtcattttatatgttgttgcacatgatatattttcatgataagttctttgctgtcaagtatagatgttcacacttccttgttggccatggttctcctcacatatccccatgttgtatggatttcaggttgtgacaaacgtatattttcccaaggatactgaagctccatctggaggtgtagatgacatgacaaaactttcatacttgcatgagcctggagtcttacgaaaccttgagacaagatatgaacttaatgaaatatacgtaagatattttatccttttttttctaacatctcttactttttgttgctgcaaaggaaatcatttggtataagctatgatactaataagttttgtgttacttctgtagacatatacagggaatatcctaattgcagttaatccattccaaaggctgcctcatatttatgaaactgatatgatggaacaatataagggaattgcacttggagaactaagtcctcatgtttttgcaattggggatgctgcatacaggtttgtgcatgttcacgtccatcaatttatcgtacttctatctatttcgtgagataatttactgatttggtcacggtgtaagttattagggcaatgattaatgaagggaaaaacaattcgattttggtaagtggagaaagtggtgctggtaaaaccgagacgacaaagatgctcatgaggtaccttgcctttttgggagggaggtctggtgtagaaggaaggacagttgaacagcaagtcttagaggtttgtttatttttttcatgaaaaatgaggatgattccatatatggctgtatacagcttaatgtgtatatccccaatggcacattgcagtctaatccagttctcgaagcatttggcaatgcaaaaactttacggaacaacaattcaaggtacgttcttcatctttccaaatctggggcttatcagctaagttcattaattagaaatagttcatactaggatttattcttaaatgcttggttcctaagtttttttttttaatgttgttaattgttcttccgattatgccttaagaaaatcgtattcattgttacttgacctttttcattcttcttgatgttacccacctcgcagtcgttttggtaaatttgttgaaatccaatttgacaagaatggaaggatatctggggcagctattaggacttatctgctggagaggtcccgtgtttgccaaatctcagatcccgaaaggaattaccattgcttttatcttctttgtgctgctccgccggaggtatcttataatttgttttcttctaattgacacattaagtgcatgtcatccgatgctgatatcgtactcattttttttcttctattttcgggtttattttgcaggatataaagaagtacaagctggaaaacccacataaatttcattatctaaatcagtcaagttgctataagttggatggtgttgatgatgctagtgaataccttgaaaccagacgagctatggatgtagttggaatcagtaacgaagaacaggtcctgaaactaatgtgttaaagaggtcaggtttccg

SEQ ID NO: 17219 - DNA, 441 bp, Arabidopsis thaliana landsberg
cactacatacgttgtgttaagccaaataacgttcttaagccagaaatatttgagaacgttaatgctctgcattttcttatgtgtggggtaagcttaatgtttcagagaaccatatactgttattttttgcaactgcgacaatttttcggtctttacgtgatgttgtgaagcatacttttctgacctcagggggtcatggaagccattaggattagttgtgctggatatcccactagaaagcctttcaatgaatttttgaccaggttccgaattttggccccagaggcaacggagagaaggtagattctccaatacatattttgcagctaaattcttagcctaatgttaaatagacgttaaggttttagactgatataaaccttttctctctggccttaatattctatagctttgatgaagttgatgcttgcaaaaagcttc

SEQ ID NO: 17220 - DNA, 2500 bp, Arabidopsis thaliana landsberg
ctgtattcggattcttcgttggtttctgttgtttgttcttgtagcttatggcttcgtatttgttcaaagctagggttttatgtttactagtttgtgtggtatagttcgaatttgtacgatttagtaagctccagatcgtgaattttgatggagatggagttttttgtaaaaaagtcaattccatttgctgatttatgttagtgttttggttcgatttctcttatcttcattatgagctgattttatagcttccattgatctgagctaagtgaaattcaactttccgagcttacttgtataaatcgaatctgtttttatgtgtacaactgtttcttgaagttcagtgatatggtttgtttactaactcgttgttttcttgttgaatttatttaggaagtcatggctatggccacaagggtgttggctcaatcgactccaccgtctttagcttgttaccagaggaatgttccttcacgtggatctggaagatcgagaagatcggtgaaaatgatgtgtagtcagttacaagtgtctggtttaagaatgcaagggtttatgggattacgcggtaacaatgctttagacactcttggaaaaagtcgtcaagattttcattcgaaggtgcgacaggcaatgaatgtgcccaaggggaaagctagccggtttacggtgaaagcaatgtttgaaagatttacggagaaagctatcaaagttattatgcttgctcaggaggaagctagaagactaggccacaattttgtgggaaccgaacaaattcttcttggtcttattggtgagggtactggaatcgctgctaaagttttgaaatccatggggattaacttaaaagatgcacgtgtggaggttgagaagattattggaaggggaagtggctttgttgctgttgagatcccattcactcctcgtgccaagcgtgttcttgaactctctcttgaggaagctcgccaacttggtaactcccttctctgtagcaagtcttttgcttctgtatctgaaatctcgttgttgattgattgtgaagtgtattatccactgtgttgattgtgtataattaagtattgttatcctgacttagtgcagtgtggggcgtaaaatattttatttacactttaataccttcctcaacttgttttttgtccagcttccctgcttctttttggcatgagcttagcatatgtacctattctaatcacttgtgtgaatatcaggtcacaattacattggatccgagcaccttttgcttgggttgctacgtgaaggtgaaggagttgcagctcgagtccttgagaatttaggtgcagatcctagtaatattcgcactcaggtaaagtagtcatctcatgtggtaaactgatattttcaattttttgtatatttttgaaaattttgttaaaaatgtctaaacttaattgaattggatggctaggtgatacgcatggtgggtgagaacaatgaagtaactgctaatgttgggggaggaagcagcagcaataagatgccaactcttgaagagtacggaacaaacttgacgaaactggctgaggaggtagttatttgttgacctgaccatatgagattcccttgaagagataagatcaattgagacttaatcatgatcttttcttttgaccttagggtaaattggacccagttgttggaaggcagccgcagatagaacgtgtggtgcaaattcttggcaggagaaccaagaacaacccttgtcttattggagaacctggtgttggtaagacagctattgctgaaggacttgcacagcgtattgccagtggcgatgtccctgaaactattgaagggaagaaggtaagcacaatgcctctctgtttttcagtcgttttaacaatttgcaattgaatcaatcaatggttatagatatgggtatgagtttcagtcttatctcgttgacttcaaattttctatgcacttcatacttgttcattacatgtaggcacacatttcatgagtcacggattccaatttactggattagttgtaattatttccatgccaaaagagtcaaatcaacatgataagactgcatgtgttgagaatgaacgaagaatttatgtagagaatgtatccactgaataatatgctgctctatgtgcattctggtttgtgtatattaaccttctgacacttgttttgtgagacattatccatactgatttgtttttgtaactataatagtatgaacaacgtacttaacagttcagactcaggtcacaactaatttctcatgattattctgggtagtgctacaatgatctgatggttcttgcctttacctcttatgtactttcaggttataacactcgacatgggtcttctagttgctggaacaaaatatcgtggagagtttgaagagagattgaaaaagcttatggaggaaattagacagagcgatgagataatcttatttatcgacgaagtgcatactttgattggggctggagcagca

SEQ ID NO: 17221 - DNA, 391 bp, Arabidopsis thaliana landsberg
gggacatcgcatggatgacattacaatcttttcccatgtccgttcttacagaagatttggtagaagatatactttctagggttccagcgacatctctagttcgattacgatctacttgcaaacagtggaacgcaatattaaatgatcgtagattcatcaagaagcactttgatacagcagaaaaggagtatttggatatgttgttaaggagtcttagggtttcttcgatgagtgtcaatctccatggacttcatgacaacattgatccttctatagagctaaagcgtgaacttaacctaaaaggtctcctttgtaattcaggtaaagtcgagagttttgaagtctttcactgtaacgggatattgctattcaccaacactaacactataga

SEQ ID NO: 17222 - DNA, 1563 bp, Arabidopsis thaliana landsberg
agagtttgatgttagtgatcaaacaaccaaaccaatctaaatgtatgagattaataagagatagaagttggttatggggaattctaggaagtatatgtgtcttctttcagtaggtacacagctccaactgtaaaatggcccattaaacttgtttgtgaagacctttgtgatcttccgggtcagcttaccattgtcgtgaccaaacctacaagtacataaaccaattagcatatacaaacctaatcaacttagcatatatacacacattactcaatattaacgcttaacctaatcaacttattaaatatattacacacctaatcaactttgaggatacacacacacattactcaatattaactcttattctaatcaacttattaaacacctaatcaacttaataaactaagcttaccatagggtttcacacacttaacacacacatattacacacctaatcaacttagcaactctccctaatattctcagcttaccatacggttagaggctcaaatgtgggagagatgaccgttgtatacttctcacggcctagctgggcaagcatgtcatgtagatttgcaagcaaagcttcagggagagttgattccctttcaagatcagccacaaactcagcatcatcatcttcatcttcctctgcgtgtgagttttgagcttgagagctgtgatgagatgcataggctcgaggtagaggatttgaggcttgcggaagtagaggattggatgcttctcgttgaaccagcgctatagactgattggaggcaatcttgtgaaccgccgctggagattgtctcgccgtagaggctagacgatgaacagatcctccagatctaggttgaatcgagccggatgctcaaaacagagtcgatccagatccacgaggagaacaagatccgcgaggagacccttcgcctgactggaaaagttgcgtcggaggaggatagtccctgacggatggacccgttgaaggctgtgcagtcggatgatgttcagaatcttgaagcggggctggacgaatcaccggtgtgaactcgtactggctgggaagaccactgggccttcgatttgatgccctagtcttcggttcaactcgaactggttgggaagaagtgggtcgatttgagggaatgtttgatacacttcctcttcctctcttgcctccaccacatgtcttcatcacttgaagctaagaaacgagagattgagaagattgaagatggtttgatgaagtttaggatcgaaaggggattagggttaggttagggttcgtcgagagtgagagagtgaagagaagggggattagggttagggttaggcgtaaaatcgtttatatagtctgggtttagggctaactttattggatcgttactaaatcaagcatgtgaaagcccaattaattgcccaaataaaacatatgagtcgctaaatggtagctgtacttggtgacctattagcgactaaattaatgagtctcacattcaagactgattagcgacaattgtataatatagactaattagtcgctaatacgtcgctatttagttg

SEQ ID NO: 17223 - DNA, 1104 bp, Arabidopsis thaliana landsberg
  unsure (1)..(1104): unsure at all n locations
caatgtctcaaaattagtagcattttaaagattaggaatttctttcaacttcgcggaaaagcgccaatctatattcttgagatttgtaagggactgcatgttaaacacaagaaatgagaaacgtcatatcaaggttgaagcatatttaaatatataaataccaacctggattcctccccagagcttctctagattgctgtgtggcatatggagtaccacgagacgttctggctggaatctccgaggaagactttttcttgggtaatgttcccaatgtagtaaccttagccgaggtagatacttcatgtcttctactatccgtaatgtaacctttttactagaacttctccgataaattcttaagaatcgaagattacgcattgcttcaaaggctcgcccacttatagagaactcactgaccttagacatgtcaaatgatattcctaatacagatccagtaccctaaaaattattccaaaagaagactggtgaaattattatcgcaacaacatgctaaatttattgagcaagatctttagggaatatagtaaaaacttacggtttcatttgccaacacatcacgaatctcttcggcctctactagaaactgacgtttctcgggctcatcggactgttcaagaactatgtatctacctaattgttgaagcaaaggatgcataaatatccggtcaaccctggatatatgtacaagacatttatcggctagggtcttcaacccatttctgacgtccaggttactatcagcaagtaacgttttcacaacactaatgtatgtattgttgaagaagcatgcaatgtgaagaaagagaacttgctctttcttggacaatttttcatatgccgattttaatacgtcctcaatctttctatcaagactagtttctagcctatccgattgtagtttccatctatgcttgctctggccacgcaaagatgaacccacaacagaaaggcataatggaagattaccacaaagataagctacttttcttgcaagctcttcaaannnnnnnnnnnnnnnnnntttctgaaagcatacagacagaggatctcaagagctacccttatggttggataaccgac

SEQ ID NO: 17224 - DNA, 1061 bp, Arabidopsis thaliana landsberg
  unsure (1)..(1061): unsure at all n locations
cggttgatcttttatctaactcacccaagtctgagttcgaatcccgcaatatactttttgacgtttttttttcttttttttgtcttaatttaattgaagaatggagctggtggtggtgaagaggacgacggagatggcagagcaacgggttttctcaaccaccagaatctgaaaactttttctatgcacaaccttgacgaaaaacttatacctagattttgagatttgatttgatatttctaaggcttttattttcttctctgtagatacatgtttaggatttgtatccaaattgaaatttattaaaattgaaattggatttgttttccaattcgaatttgttgcctgtgttgtgttgtagatctagataatttcttctttttcatattggaaaatgaagtgttgagagatgaaagatagattttgaaacttttgattcttctgtttactgattaaaaagtttgtcaactacaaattacggtgaaaaagggagattaagcaattgtgaacaaaacaacatcaaaagctttaagaaaattacagcgaatagagaaaagagagtttggtgaagaagaagaagtcaagttaaaaagaagagaaaaggaaaaaaaacttcttttggtggtggtaggacttgaactcgggtatagataataaatcaacctacatctaaccaccagactgagacaacataatcgaaatattattaaaagagcttcatatataaatgcgtaaatactatgagttatgttttaaccacagttagtggttcagttaccaatactaacagtcgttaactcagaagcaggaaatatccaacatttaaaagatcagggttttagtagacaatcgaaattaacttatgtatttttcttccaattttaaaagtacatgtattaaacggccaaattaaaaataaatcatgatattattcttttataattttttccatgaatttctacanagatggtaagaaagtgatatctgggaaatatcacgaagggctttactatcttgaaggcacggttgttaaggctgaaaagagtgtaccacatgctgaa

SEQ ID NO: 17225 - DNA, 1506 bp, Arabidopsis thaliana landsberg
aatgacatgttttatttttttggttacagatgttggtttccagaaggagaagatggccagtttgatgggaagattgagtatgtggtagagaactaatcatggagtcagattagttcttccaatgatttgtagaatcaatctactttgctctaaaattcaaaattattattactatctctatttgctttatctcatgaactatggttggaatatttgtttgaatttcatacattgtcctattttgactttacgtgtttcagcttagagttctcctatttcattttgcaagttactaatttattgcactctagcaagttcataaaattatatactctaaatgaatataatagctatttaacaagtaccataactgaaatagtatggaatattacctatcgttaacattgttgatacagatccatccgtggctccggattctcagttacatatttcataactaatacaaaacatatatattttagccttaattaaaattattttgattgtcgattgattaagtaaagagtaactgaatcaggaaacaatatatatgaccaaacgtatatgagaacaaaaaatgaattacattggtcctatatccactctaacaaaataattcaatctttgttgacgactattttcaagggattaccttggccatgttaaatgtctctccttgcaattttatcttcatttttgacatagccgagtgaagcacaaactaactggatcatgagtaaaaaacatacatcaaacaatgaaaatattgattcttcatccaatccgccaaaaagaagcagattcgatcacttatattttcaaagcattaggatgtcatagtggaattcaccttcgtctcatggttctgtccccattagttctgttttgaacacagtgcagcgtgatgtaagcaacacctctcagttacacatttcacccaatgttagaggtgaggtgtccacccctaatctatctgcgagacgaagacaaatgtcaaaaggtataaaacttttagatgtacctcataaagaccaatttttattagtatatttcaactcattgtattgaacattacatctcatttaaacaggaatgccacttggatctcagattccgtctgcatctcaatgtcaagcataagtatggcaggttctactccatttgtacttagagatatcaccaattcatcagttgggccacatggcagaatgggtggcacaccgcttacgtgtccagagactgaaaaaagatagagaaaaggttagtaactattattcaaactgtgaatattttaatacatgttatttatgctatacagtttttgcttataggcaaacaaagtatcaatgattcggagtgcttgacccaagagcaatcttcatgtgtcaacaccattagacttaacattacaaggaaaaatctgcacatagactttgctatagcaagttctgaatctaatggtgaaggtgaatgattatctataagtattcatatataaactaaaac

SEQ ID NO: 17226 - DNA, 1116 bp, Arabidopsis thaliana landsberg
gatgaaagttcatacaaaaggacgcgccagatggttggtgatgatattcgacgaggggtttactttgctcctgtatttgccgatgagactgatggaaaagatgctgctagtctgcgtgagatgcttatttcaactgtagaatctttgaagcctccacctgctggacctagtctgtcacagactgaaagttcaatagtggcacttagcatgctcaccaatgcattttgtttctgtccctggactgacatgactcatcgattgtttaaccagatgtatgcctggattccctggatagctgggcaggtaaccagaacctccccagtcccaattcttttactagcgttttcatttccagttttgtttttgaaagactcgtatgtaggttgaggaaacaaatcctatcatgttcgatatttccatttacttggaaggaattcacaatctgctgctcgttggtaactctccttgtccatgaagtcttgacatgtttttccatgccaaataatgtgttggatcgcttgctctataacagttttggatttatcatcttttactgtattcccctttaagcaggtgtggatccacagtatgaatatacaagtaaagggaatgatctggttgccatacaattcttgctgaagcttccttggacgcacttcatgctgtttaagaagcctagctctctagtaaagtctaagtgtttatctgtggggatatggacaaagcttggtttacaagacgggagtgattttgatatcttcagttggtctctttctgatgattttgaacaagtgcaagctgtcgctgctatctctatgccactcaaagttcttttctctggtcttggtgcccttcttcatatgttcccaaagctggagtaagttgatgagaaaaaaacgacatataatctaagttcatatcgctgtttttgctcagaattccttttaaaggtgctcctgaagacatagcttaactgtttttttgtcctacattcataggcatttgttggaagaaaaggaattgatggttaagaaggccattccccagtcccttggcttcttatcttgtctttatagatcaagaactactgactcagacaaaactgcatgccattta

SEQ ID NO: 17227 - DNA, 1955 bp, Arabidopsis thaliana landsberg
acatcattttgtcattttcttatgaagttcgaatatttataatattgaaaacttcaaaaagtttttagtatcaatccaaacttcataattgtatattgattttacatctaggatttcacctgtactatatcgtcccatattttttttttgtatttataaatgtttaaacttcttataaagttcaaatatttacaaaatttaaaacttcataaaatcttaaaattattaaatgtaatacttaacttttaaaaaagttgaaatatatataatatcttaaaacttttaaggttttaattatttaaaataaaaaatcggagtaaaccgaataacacttttaattttagatgtctgatatatcaaagttcctgctcattcatattcagattcattttggtacttgtttatagtatgtctctaaatgatatcccaatttttaatcaatgtgggatcttgtacacttattttttcatcgattgagtattatatgtctgttttaaaaaatatgaattacataagatgaagaaaaatcaaatattttattaactatatggattttatatataaagtcaaaataaattagatataacaacaaatatctttattgactttttttatatttatatttaatatcgatatagagattttaggaaattagccttaatcaaatatagttcaataaagaaagatttaattaaggatgaaaaattaggaaagagttgattaaactatttaatgaaaattaacgatttgtaagtttttagtcataaaatatttggttttgatagaatttgtaaggacctgaatgttaatagtaaatagtatagggatttttggccaaaaagtctaccaaaaatgtatatatagatgtatatatagattgattggtttcacaataatttgtagttagatagtttgaaactagagatgtcaatcgggcctcttatccgcgggcctggcccgttttgggatgttgcggggcgggttcgggcccatgtagggaagcccaaaaaaatgtgggcctcgcggtcttagcctgtttggatcgcggaggaaataaagctgacccattaaagaacataacatagaaagtataagcccatgttaggcttatactttctatgttatacttggctaacatagaaggctgacccatgttgggcttatacttgtttcattgatgtttatattcttggatttacttagattctttgtttcttctaaaatcatatatgtgcagttacattggggatagttcaaggagtcatgctccttaacaaaccattttttaaaagaccataatcaaacttttactaatcaaatttttagatagttctaaaaagtgttagcaaaactcttcttattagtgatttgtttttgaattgcagtaagaaggaaagatgggttgatacaaattggatttcaaaaaaaagttcaaatgcggccgagcgattcgaggagaagaccatcaaagggtcatcactcatcctccgggctcaccaaggctatgacccacttgttagtcattgtttaccatgtacatgcgttatgcataatatattgggtttgattggtaacaccttttaccaaaccggcttaattttaacctatattgtattgatccaagcaatctttcttgtcaattttttcctttggttttgtaacgattcagacaatgtaaaactcttttccgatcatccactttgtggactatttgatattaatattttatctaagcaaaagaaagaacaaaaaagattttgcgttagattaatcatttacttacatgccctcttgatgtgatgcaagttttgaaaataacatatttctctttggaaaagctaaagacgtaccatgaaacgtgctgtgtcatatatttagaatagaaatggctcctatttatttattgtaattgtgataattaaaagagccttctcgtcacaatttcagagtctaat

SEQ ID NO: 17228 - DNA, 779 bp, Arabidopsis thaliana landsberg
aacattacagcgaataatgttacaacaatgatacaaatttacgtccaagaattttacctctttggccagaaattctacaaaagacaacgaataatatgaacagacaagaaactcatcactgcaaagaatcccaagaactgttagaaggaaaaaaaattccctgaggactcgatcaatctcacaatgaaatcctacaggcgcgggtgatcggatcaatgtgatcacagaagtagaagagaggcgaaaaccgtagcgaatgcagagagaagaagagatagagcgactcgggtttgtccgttgggagacttttcacctgttgattgaggtccaggggtggtggttggggctctggctgagactggaggtaatggtggttcagtgacatcagcatctgtgaaaactgggcttggtgcttcggctggaggtaacgaagcaggactcacgatggttaagaggccagcgggctgaactgggatcatgtaaggaggcacgtctttgcgggtcaagcacgagttccctgagaaggaacaacaaaaaaaaacagtcaaaaactctaaaatgttatgaaaacagaaaagctttaaagacattcttttggttttcactttacttttgtatctcgcggctgtgagagggaactcagtgatggttccattgataccagctccagtaacatgcgagtttatctcgacagttgcatcagcgaagaaatcccatggttaggaaacaaactcatttcggaacacttcaacgtaaacggggagctgagacttctgcag

SEQ ID NO: 17229 - DNA, 2431 bp, Arabidopsis thaliana landsberg
taacagagctaagttaaactcttcaagtgttctaaagcctatccccccctccgaatggggtttacaaagggtatcccaagctatccaatgaataccgttactgttttcattggttttccaccaaacattggcaatggcactacttagcttggagcgaattgcttttgggagaaggaagcacgacatgacgtatgtcggaagggcctgagctacagacttaataagtacttctttgtcgccttttgacaagaatttagccgtccaagtattcaagcgtttttgaagacgatctcttacaaaagagaagacttgaacttttgaaccatggatcttctctggtaagcccagatatgaacccataccgccatccttatggatcccaatagctactttaatgttgttacgaatagtattttccacatcatgtccaaacaaaatggaagacttagcagagtttaactgctgacccgaggcctccccgtatgtccgaagaattttaataatttcctgcccttggacaggatccgctctacagaagaaaagactgtcatccgcgaacaataggtgagaggttgaagggctcgcacgagagatttgtaggccttgaatccggccgtgccactccgcatctttgaggcttgctaccaaagcctctgtgcacaagatgaagaggaaaggggagattgggtctccttgacggatacctcttgatggtttaataaagcctctcggggaaccatttacaaggactttataagtgaccgaagagatacaaaaggttattaagtcaacccatttttgggaaaaacccattttcaacataagcgcttgaagaaaagaccattcaacccggtcataagctttgctcatatccgtcttaatagccataaacttttttctgcaagccgggttattccggagagcatgaaagttttcttgtgcaattagaatattatctgtaattaggcgacctgccacaaaggcagattgcgtctcggatatcaagtccgcaagtagcttctttagccggaagtagcttctttagccggaagctaagaacttttgagataactttgtagctcacattacacagactaatagggcgaaactccaccattttcctaggtcgttctaccttagggatcaagcaaatgtttgtctcattcaactgcttgtcaaaagcacctgaagaaagaaagttttgaactattttaactaaatcagggcccgtcaaatcccaaaacttttgatagaaaaaacttgtcattccatctggacctggagctttatctgggttgagagaaaaaagggcgcgtttgacttctgccggggaaatatcttttgtgagatttttgtttatttcttctgaaattatcactggcacatcccgaatggcggaatggaaatcttgtggatttgaggtggtgactaaatccttgaaataatccacttctagattttcaattcccacctcgttatcaatccacagaccgtcttgattcaataagccaataatcttgtttttcgctcgtttttgcttagttatcgcatgaaaaaaatttgtatttttgtcaccctctttaaaccaaatttcccgactttttaaatgccagaaaatctcctcttctctaaacgcgtcgcaaagtctccatttcaaagctagtaagtcttcagcggagatacactcgtcttcttcagcaagatcaatctgattctggagttccaagattttcttctccgaatttgaagaattagattttttccaaatagaaattgattttctacaatttttaactttatgaaaaaacagaactccttcattagaaggaacatcccaccctccatgaacagattctttaaacccaggcttatcaagccatcttttatcaaaaataaaaggtttaaagaaacgttgcgggctatcttggattgatgctaaaaagggtctgtgatctgaaccccataattttagatactccacaatggtgtgggaaaaaatagtatgtcattcctcattcgccatagctctatctagtctagatttaatgacccgacggactttcctacccatatttccattatgcttcttataaacttgtaaagggagatacaaatatctttctaaccataatggtggtacagagaattaattaactgagcctttttagataagatgtccgcagctgcatttctttcccaattaacatgtgctaaggaagagaacggaagcttcgccatccaataccgaatatcataaagaagagtgatgatcttattatgatcactctgcgtattgatcgaatttactagctctgcattatcgctctccaaccacacataagtacataatgtagtcctcgggaccaagtcacttgaagggcatgaagaaatccgagagcctctgcttaagagataattgtgacgattaagt

SEQ ID NO: 17230 - DNA, 1358 bp, Arabidopsis thaliana landsberg
aatatcctttacattctttttatttttgtgaattataacgacatcattttctctaattatctcccaatttttgtgttaaagtttcttgaaacgttcagtaaaaagaagggattgttgagtagaactccacttggccgtgttggagagccgaataaagtttcatcactagtggtcttcttgtgtctacctgcagcttcttatatcacaggtcaaaccatttgtgttgatggaggtctcacggttaacggtttctcctatcaaccacatgcttgagaaatagtcttgtcgctctcaaagttctatatctaataaaagttctcattctatgagtttataaacgtaaacatcaatgagtttgcaattccatattggagatactaatctcgcacatatacaagattcggttacacccgctacgccaacaactcacaccaatgtgatctctcattctctctcataaatgaaatgttatactattttttgagaattgtagcattgataggatagattacagtctatatgtctctgattttaaatgttaattgtaacacaagatgattatattgtacatatttttgttgttgttgttccgtctattttgctgattatacttgtttattgttgttcttccgtgtctgtcgtgttttatctgtttgtcttaaactttgtattttatatcttgtgatttttgatactacacgacaaaaatgaccttgtcgtgttttatcttgtgaattattttattctttcgctattagattaatccattttgtgaataatttgcgagcaaggccctcacacacataattataccttttgagtcttgaatcaaaaggctgtcaaaaaaaaaaaaaaaaaaaaaatcttgaatcaagttgatagatacatatgagcttgcgtgatcttgagtcttgaattcataataggcgaatttgaatcttgaacgactaatcgataacaaacaaacaaaaaaatattatataattggttagagtagttaactctatcacgcttaatgagcattttatatttgtctttgaatgacaattcaagtaaatactttaatttcaaaattgatggatcgttttttcattgtacttttcttcgaataatattagagataatcttccacacttaaaaaagattaatctcattgtctctcatcccacataagcttcttactttaatttgtctacatcccttttggctaaattaaggattaatattaacgcttaagctttttactacctaaaccacggaacagtagtcttttagtagtcttctaatgtgcgagtgaaattaatgaaaaaaatacaaaattggtagttctggtcaaaatttgactattaaaataatat

SEQ ID NO: 17231 - DNA, 1880 bp, Arabidopsis thaliana landsberg
tggagtttatccagagaaagcgaatccaggaagagaaggtgttggactaaacatgagatccatcggtaaaaatgttagtcccattgaggttaaattcactgggaaacaatcttatgatttgtaagattttaattcgtattttatataataatgctagacaaacaaaacaaaattaaaaagggatcacactacatgtaaaatcttgcggatgttataacaactctttgaacttttcaagcagctttgttttggttttgtcgatcgagtgataccatatcatgtggtaagtgaaattctctagtttgagaaagacaaaaaaaaagtccattacttgggacagggtttactaatggtcagccatttttatatcacgaagtaaaattcttgcaaccagagattatatgagttatctgagaatttctataaacatcataaaggagccacttgatagagaaaacacctctcttttattccttcatgtacaacttcattaatgtcccaagaaacttagctagagttgttgattgagccttgcccctgccgacatggaatctgcgacaccaccaggagttgtcttcatctctgaactgcttctaagttccgctccaaccactgcctccgcatcttcacttgtcaccaccttgtctccgggaagcctctccgccgcatcctacacaacccaacaatccgaatgcaccaatttattggacttttagaatgaaacgctaatagaaacaaacaaaccaaaaactccatcatattgaatccatctcgatgttagcgatagaaatagtcacaaatcatttccaacaatatctgttgtacctagactagctactctgaaattttggaccggaacttaaactaatctatctaggctaatatgaaatttacaatcactacattgatttcaatatcccacaataatctctcctctaccttatgtttctgcagttatcgaaataaagcaaaattataaaaatgtcattactgtgagaatatctgctatagtcactttgtcttcctccgacaccgtctgttcattagtagtagcagccgcctgagccgctactgcaagaccaccgggtcgacccttagactcaccggtggctctagtttcggcggcttgaatcgcagctgcgtctctacggtcgacaggcttatctccaagagacaaagctgtagcctccaaagcctccccaatcgtaaccgtgtctacggatcccatcgtcgcaaccgttgggtcaggttgagagaaactatcgccttgctttcttgccacgtcatcaccggagacgctgaaaacgatgccgtattgatcatgtggccgtgtgttgtcctgatctcttggcctttgaggagaatgctgatgctgtgccattgctttgttttgtttttattcgaggcttcggagcttctttggtttgttattaatgggattttggatcttgaaagtaggagcttctctgtttattttcgatgtctgtttgacacgtggatgtttaactccacacttgtctttgccgcatgttgatgacatggatcgacctttttggatttgaattaacaaaaaaggtatttttgattttgctaatttttcttttgattggttagttaaattgatgtggaccttaaaaaattatatgagccctacttaaattttattttgagatttttttttttttttaattaaacacaaaagtcatcaaattgtactagtacatgcttgaataaataaaatttttgaaatagtaacagagaaattataacggtaacataatgatcaagatacaacgagagagtcacagaaaaacagaagataataagcctaaaaaaaaaacaatttggcaaaatgcaatcatgcgtgtggttttctaatc

SEQ ID NO: 17232 - DNA, 669 bp, Arabidopsis thaliana landsberg
  unsure (1)..(669): unsure at all n locations
tgttttgcaaaccaaatttttgccatcatccctttcacctttgatggctcttacaaagtgcaggatttgattgttttcacgaaattccagaaaacatatactctgaggtgtttccactaggcgacactcggtagtaagagtatgctcagaaacttcaaattgtgcaagatgcttaaccggaaactgcatcatccagtctcgaatactacaagaaagaattttaaggtcccaaaatgacacaaggagcaacttgatttccttgagtaacttactgcgctcttcatctatagctaaaggccagtctttggaccatccattctcatatgcaaacgctttcacatcttggagccgattcttaatcatctcaacggcagctgcagcatccactggatcccaacctccaacggatatcttacgaccccagactttacttaccgtctggggcatatcctttgtcgaagacggtttaaattctgcagcatgttcttgtccaagatgattcttacactcctcaggactagagaagttctttgaacaagttcgacacatccagaatctccattttctgttctccctggcaaaagtgagaacttgatccaaagcatctngtccctctttcccatacattgcctagacgaaacttaataagcttgaaatctccattttcag

SEQ ID NO: 17233 - DNA, 1970 bp, Arabidopsis thaliana landsberg
tgttgaaacgaacctactgaattaccccatccttaggaattctttatctgattgatttattatttactctactgctgtgtactgcatcctgtcatctgttgcttagtttctgcaattctttactgttactcgacctgatactcgaccacccagttgtctggcaacagactgtgcagtcgagtatcactgttacattatctgtatgttactcgacctgtcactcgaccacacccagtgctctgcaacgagctgtgttggtcgagtgtttatttgtttctgcttgattttctgttttctgcatgttcacttaggactgctagaacacaccaaaacctgttattgtttggcttgacttagtgacttctgatcacatcttgattgttagcatcacacccatttggattgacaacctaaaatactacaacgacatgattggtgttttaggataattgactaaaaaacctattttcaatttggcgccgttgccgattgggtgtttgtttgttacttttgagatttcaaacttgcttagatcaagttctttttcaatttatttttcggttactaactgtgtgtttttcttgttgtcttcttgatccaggtacacctctggtgtatgcgaactcgatcaacagacaattagaacctccttttcaacgacaacattgaccgcatagctcgtgaactcatagaaaggagaaacacagtcaaccttgtaccccagcaaccactcgatatggctgacgaacagaatcaataaaatggccgtgccaacattggtgctggagatgcaccacgtgatcaccgtcagaggaaaggaattgcacctcctgctattcagaacaacaacttcgagattaagagtggtctcatctcgatgatttagggaaacaaattccatggtctgccaatggaggatcactcgaccatcttgatagctttgataggctatgtagccttactaagatcaatggtgtccctgaagacggattcaagcttacactatttcccttctccttgggcgacaaaacacacatctgggagaagactctgcccccagactccatcacctcatgggatgattgtaagaaagcttttcttgccaagttcttctctaatgctcgcatcgctagattgaggaacaagatctcacgttttaacaagaaaaacaaggaaactttctaggaagcttgggagaggtttaaaagctgcaccactcagtgcccccatcacggtttcaagaaggcttcattattgagcacactctacagaggagctttaccaaagatcagaatgctacttgacattgcgtccaatggaaattcctgaacaagaatgtagtagaagggtgggagttggtcgaaaatctagcacaatctgatgggtgctacaatgaagactatgatcgttcaatgagatgactgataaatgcaaaggcaagcattttatattgagtaaaatacaaatgtaagggacataccttcttgtagaagaagcttggtatggttcctgcttcctggcgttttttgttgcttctctttgtcgtacccaccaaatatctcaaacaaatccatcaacgacctctgaaaatacccttttacattcgatcctttcctgctatgacatctttatacttagaatctgacacattcgttaatgaaaactgtaaaactttttactattacctgattgaatgaagcactgcttcaatgtatgaggttagatactccaccctcgttgtgtcttcaagagatgagctgtgcatagtcatttgacgtgtatatgaagaatcaatcaccacacagagagagagcttaaaatacatggagaagaagcaaagtaaagtctaacgagaggaagagagagagagaaagagacccctctctaggatgtcgacatgaggatttccacaaaattcttcaacaaacaaaagtatttgtcgcagactccatggtgaacactcgagcaag

SEQ ID NO: 17234 - DNA, 109 bp, Arabidopsis thaliana landsberg
tttcattcatttgatttccaacttaggatttttttattttataggaatattcagattaataactaaataaatatattaaaaaaagggcgtcgaccaaaaacacgatggt

SEQ ID NO: 17235 - DNA, 2421 bp, Arabidopsis thaliana landsberg
atacctctctctgttgggtgagttcgtgttttgttttgatgtttctgaatgattcttttgtggtccttgagttataattagattcatacgttatgtctcaagcaattgtggtccttagacttcttattctaataattctaatcaaatgatctttcaggtaccagtgcccaattcctattgagttggtgaagccaatgggcgatattgattatgaaggacgaggtttgtcaacaacactctctgtgttattctgaatctcccttgtacttgctttctttataagtgtcctttttcacttttcttgcagagggttcacctggtggcagagggaggggaagaggaagaccaaacatttgctgctaatcatcaatcaatgcttcaaccacacttttgttaacaaacctcattaatccaacaaaagtttcaacattccccaagaagaaaagacagcaactttaatcaaagcttctcgagtttgttgagtatcaaaaagcaaaacaagaatcatgaagaagaaaggcaccaacaacaacaactttagccttctgtctttgtctctgttcctgaattgtttgattctaacaaacggatacagcattggagtcggagttggaatcggcggtggagacggtgacgacggcggagtttggataggtggaggaaaccctaattccaatcctggctcagctccaaaccaacaacagacaacaaatgcagcttacaatgctcttcaatcttggaaatccgccattacagaggatccatctggtgttcttaaaacatgggttggtgaagatgtttgttcttacagaggcgtgttctgttctggctcatctataacctccatagatctaaacaaagcaaatctcaaaggcaccattgttaaagacctctctttactctcagacctaaccattcttcatctcaacagtaacagattctctggtcaaatcccagattctttcaagaatcttgattctcttcaagaactcgatctcagcaacaacagattctccggttctttccctcaagtcacactctacatcccaaatctggtttacctcgatctccggttcaacaatttcactggctctataccggaaaatctcttcaacaaacaattagacgcgattctcctcaacaacaatcaattcaccggagaaatccctgggaatctcggttactctacagcttcggtgattaatctcgctaacaacaaattatccggcgaaatcccgacgagtttcggtatcaccggttcgaaattgaaagaggttttgttcttgaataaccagttaaccggttgtataccggaatcagttggtttattctccgacattgaagtgtttgatgttagtttcaattcattgatgggtcatgtccctgacacgatctcttgcttatcggagattgaagttttgaatctcggacacaacaaattctccggtgatcttcctgatttggtctgtactttgaggaatctgataaatctgacggtttctttcaacttcttctctgggtttagctctcagtgctcgagccttagcgttgggtttgatttcaccggaaattgtattcccggtaagggttatcaacggcctcagccggattgttcggcgattcctggtggccaattgagctgtcttagaattccggcgcagccgttaacgtgtgctgcgattagcttggggttgaaggtggcttcatctccatgaaaacataaaaagttcgaagcttttgtattggttatgcaattgtgacttgatagaagaaaatggtttttatcagtacattattaatcaaactgatttatattagtagataaaacttatttctgattttgaaacctttgtaatctgatctttctaaaaaaaaagaaaagttgggatcttgctaaggattttttttgtttgtttactagaaagagcaaatattgttgagatgaaatttattatgttcatcactaaattaaatggtcttcaataaataaccaaaaaggaattgataatgttgttgttggtccaaaactggtcctgtatttgcctaaccaagtaaagaattctacaatgagtaatgatggctaagaaagatccataaaacatatgaaaaatgaaatgtgatgaggattagcaaaaataaaaaagaagacatgagcagaaacatacttgatatgcaagcccaacggctaaaaagtgatgcaaacaaatcaatacaaagatagataaccaaacggatctttaaagtttatggggttgagatagataaaattcttaaattctttttagacttcgcatgaatcgacgacattaagcctgacagatgctaaagagagctacgaagaagagaaatgtgtttgcatgcaaatgatgtgttgtaccgcaacgtgaaccactagttttgctcatttttatttgttaaatg

SEQ ID NO: 17236 - DNA, 1029 bp, Arabidopsis thaliana landsberg
ggtcattctcatgaatgctcgagatgcatctgttgctcagtccctgtcggaactgtgtaaacgccttcaatcaaaccacaacctaaatgttaaaggtcagtggttttggtatagctttggtggtctggagttatgatatagattagattgctgatgaaactgttatatgtgtttggttttagatgatttgccatttgaatttaaagcgttggagctggttttggaactatcttgcttgtctttagatgcacaggtatgccacattctcttcatcattcttctatatgatttattgcatgactttaagctaattgttaagctcaaaagttttggtgaacgtgatttttaggtgaatgagcttgagatggaggtgtatcccgttcttgatgatctagccacaaacatcagcacccttaatctagaacacgtgcgcaggctaaaaggtcgtcttcttaccttaacacagaaagttcagaaggtgaacacaaaagactcttcaaatttgaaaaagccctactaccataatttgattttggaggtcaaaacttgcaggtttgtgatgaaatagagcatttaatggatgatgatgatgacatggctgagatgtatttgactgagaaaaaagaaagagctgaagctcatgcgtcagaggagctagaagataacattggtgaggactttgaatcttctggaatagtttcgaagtctgcgccggtttcacctgtgggctcaacaagtggaaactttgggaagcttcaaagagcctttagcagcattgttggctcacataaaagcttgttaagctcctctagcatcggagagaacattgatcaactagagatgttactagaagcttactttgtcgttgttgataacactctgagcaaattatcatcggttagattcttcttaatctttcttttaaaggcagggacatgttgtttcatcattttgcccatcctcttgtgtttgcagctgaaagagtaaaaagaagatacagaggatctgatcaacattaagctggtaagg

SEQ ID NO: 17237 - DNA, 2245 bp, Arabidopsis thaliana landsberg
ggccccctgcatattaaaaaatgtttacttgtttacagtgatcatgtgatcttacaacaatgaactatcaaatctttaggatacgtcttcaactttgaaaaaagaataagcaatattcatttctactcgttatttactttttcttcaaccataagagagtgcattgatcaagagatttttttctattcataatcgtagcactaagacttaaaagttagacaagtttattatcagttttaatcataaagtccccattccaaaatcaattttaatggatagctagagaatgcaattggaaagagattttcaaaactttggatgtgaatcatcatcaatatcaaatagaggaggagcatatcgtcattctctcgaaaccaaattcgaaacagcaacacaaaattgtggcatatgtcaagaaatatttctctgataaaccttgaaacacttgcaaatagtaagattaactggtatacttaattatgtgattatgacttcattagttgatgatgataaccatatcaatctgtgaatcgaggagccatgattcagtgtaatttacagattatgaatcttgcataaactgaagatgatcaaactcgagacaaatattagttcaaatggttgaagtggttgaagtggttctgatactttgaagatggttggatgatcaaagtgaaaccaagtagccccgagaagttagaatctttgatgggtccaatggaatacaccaagttctgcgaggatgaagacgctgctcactaagagggtttctctctgtcttttatgttccaagttctatcagttctcatgcttattttctaaatttgcatacactctatgaccaacttcaaaaaataagagttcaagaagatgaaacagagatctaacaaacacataaagatttttttccatcatataacatatctttctaacttcttgatatcctcaaaatgcatctaatatcaccccaaaaagccagtccagtaagaaaggtgatcctaatcaaaaattactaataaaaattgggtaaccttaaagatgtaaccattactttaaaataaatagttggtcataagaaaagaaattggtcgtccaaatatttagaacaagtgtaaccgatatggtttatcctatcaaagtttagaaaattgaaacacaatgagctgcgattgtttacaagactttaaacatgcaattaacatgttgtctataattaatactattgttttttaaaaggttacagaataaaagttttttacaaatgtaaattacatattgatttttttattatttttttgttagtttgtacatatttagtttttatgtgtagcattataatacagaaatagaaattttcagtttaaatttaaattataattagtagaattacataatttcttcattattaataaaattaactatatgtaatcaaaatattatctctaacacttgacaaacatatattataatatataatactatccaaaattcaaatataaaatttcatccaattaattacataaaaaaaaaatacactcaaataatacaatcaataaatctaacatttcaaccatttgctataacacttaacaacacatatattataataaatttgtattaagaatttgacaaaaccataatattaacaaaccaaaaaaatttactccacaatacaattaaaatatcatggtacaatatcttcaaaaatccgaagtcttgtatttgtttatcaaaacttaacaccaaattgcattcatgaccactttcggttcgccgtcaatcagagatggtccagcgttttcgaatagccaatcagcattaagccacgtgttacatatgcgtgtggatgttttgtcacgtgcatgggagctacaaattagtgtcattaactaggcctagagtttaattccattggacagtattgtgctttactgggcctatagcccattaactatcggaacaaaaagggaatctgaatatactctttactgttgaagcatactataatgttgggatgccaacaagtagtgggtcctacttgtgttgtcgtcactgatgagtgatgagtgatgacaaattgacgagtgacaagcgtagctttcttcatctcttgttagttgctaggcttagtacatggatatttggatatgccaaggtagaagaaacatgaccattccttcaatatctcctcttatgataattatggaccctaaatgtagatatacgtaaacgtaccttaagaaga

SEQ ID NO: 17238 - DNA, 2453 bp, Arabidopsis thaliana landsberg
tagccaccagtccttggcgcggtcaaaggtcggtaaacgcccggctgagcaaactttgtgataagcaggtttttacgcctacttatatatgctgaatgctgtgtgagttcagttcaattcccctaaaacacaaacatgtcgatgcaactatagggggtgtcaatccagtccattgtattgctagcaatcaagatgtgtacaaaaacaactaagtcaagccagattaaaaagatggtgggtttctagtaacaatcctaggtcaggattcaaacaagtaaaaatgagaacttaagagccctactcgatcattgggtcgagtagaaccaacaggtgacaaaatcaagaactaaaatgcaatcaacaggggatgcaaatagaggatacaaataacaggtaaataaaagtgcaatcaacaggggatgcaaataaatctaatagaagttctaaggatggattcattgataagggtaactctaaggttcatcaaatggctaataggcgaaaggtagatacccatgacgatatattcaaaaaccgggtcaatccactctcgtgacagagacccccataactctaccacttcctaatctgaactctcgttgatgaaacatagcagagcagggtttaagaaacaatctaccaaagccaataggcagacaagccaaccccttggtcgaatctacaaatctctggaattcgtaggtcaaacatccatttgaacgtcttttggacactggacgtctatgattgaatctccacattagccagcgaaaaccgcataggggccaagcgaatccagaagggtataacctaaacactaaccacctaactaacctagagattaccctaatctaatcaatcctccagaaccctaatcactactcatgcaacattctcaaaaacacaaacccagaaattactaaaatcataccaaaaggtagatctaaacaagctaaacaactttactaaaacaactaaatgcaaaaacgaaatagattaagagtaattaagttttgaagattcaagaacacaaagaaaacctaaagataaagcatatatcctttggacaaatcccaaagtgatctatttatactaaaatattggaaaccctagatttactagaagacaagtgacttgaggcggtttgggctaataatcgatcttggggatcgagtaaagagggtgctgcaaagtctgcgcctttgtgtctatgctccgagtgatcaattagtcgagtagatgattcatcttctcctatctgtatgcgcagatgtctggttgagtggggaatgaggaggatccgaagacgctttgatagctcaacaagtcttgtagagttggtcacccttggtcgagtaaatgggttgagtagaggatcgagtaggaggggcgagtagatcaatctgctgcttcatctaaggctgccttgatcgagtaaaggggtcgactgaattgatgcctcttctgtagctgccttgatcgagtgaatggatcgagtagagtcctttttagctccttctacacctgaaaacacaccaaaacaagcgatgcgtatgcaagatgatcctagatgcctaagtatgcaaaataagcttaaatggtgcaaaatgatatgatacaatgagcaaatgcacaactaaataatgataaacatacacctaaaatgagtaaaatacagtctgggggagagaaagaacaccaaagaataaaaaatgagaatggtcgatttatcatggtatagtacaggaatgagtctagaaggttcttgaatattagcttgcttgatcagacccagcgatgaaagcctagtggatatagttgtggaatataggtattgaatctaggatgttgtgtaagattgtagagaagtacatgttggttaggatttaattagacttgctaggcatatggatttggttaggatgatcattgcaatagactagagaatgttgggagttcctttgttttcaaaacctcttccacgggttcagcttttgtgttttgcttgagggcaagcaaaaactaagtctgggggagttgatatatccctatttttaccgtttgtaactatgttttaggtataggttttagagtctatttgttatttctacagtcttttctagtccttttcaggtctttacatgtttgggattcatttggagataatgaagcattctggaggaaaacagagaatttatgcttcagaagaaatccggagacgaaaatgcatgtaggtgtcgaacgacaccacctctggtgtcgagcgacaccaatacttgacggcaatttcgagatgcaacttattgatgttttgaagatttttaaattcggatcagaactttctcttatgtctaaagaaggcccatcacatgttttaggtcatatatatagtttttaaggtcattgtttagacctaaccttggagacgctattctcctcatctcttttgtact

SEQ ID NO: 17239 - DNA, 1893 bp, Arabidopsis thaliana landsberg
tagaggttaagctgctggaaacattctcctcttctgcttaacaggtttaaacgttgggtaaacgttgagcttgtgtgctctgattttgacgctcaccccgagcaagtcttccggggaccaggcgaaggtgttgacgttttccttgaggaaagaagttagctcgactgtcagctcttcgcctaaatccccgccaatttccacgcatcacttgcggttctcgtcatcaagacaagacaaacagagaataccgggtcaggaactggtcttgttgattcccgagcctcatcgatctttaattgctataactgctcggagactgctttttctttggctcgacccagcttagccttcttgtgatttgcgtcggctgttgattcggtgacgggctttctaagcttgtgtgcttccatgaagcaaattcgggcatttttcttcacgccgttgcttgtgggaaatttcaggcagaggtgataagtccaggcgaaggcttggtattgatttagccatggcgtgccgataatggtgtgccggtcggctgatctgtaacagagaaatcaacgatttttgttatccctttggctaggactggtagtttgatggtaccgagggtcatggaagtctctccagaaaaactgagcacaggtcgtggagccggtacgacttgtgccgtgtcgatcttcatttctcgcaaggtcgtcataaaaatgatgtctagtgtgctccctgtgtcagttcgacgttgaaatacccaatagttagtgtaatgaccaagggatcattgtgcggacggtccaagctgttagtgtcgctctcatgaaaagtcacttcgtcatctggtccgttaaacggtcgtgtcgaattacgatttgagtcggccttcctctgataagctttgatagatgtcgttgtgtcttgacagaaagctgaatctcctaaaattgtgaagatccttccccgtgcagcttctggttcgttgtcatccacctcgcgattacctctgcctctcttgggttcttcgaggttcgccgcaaggactatctgcttgggattcgccatagcattgacctgctcggttttggctttctctgcttctaagtcctcgatggttaggcctccaccgatttcaccggctaggaacttagctgccacctttgccccaagggtagcacatgtgcaagtatcatgaccatagcttttatgtaattggcagtattcctgctcgttttccgcgggttggtcctttttacaggtgtaggattcttgtatgagacctcgacggtgtccttgtcctcgaggtgtatcagcttgataattgtgggctccggagaaatattgtccttcatggtgaacgaatgtcccgccttgagcgccctttttgtggttcggagcgctgagttgagatttatcactacgaggcgtttgcttaggcggctcgtgtctttttgatagtagttccatttcttcttcatgggaaacgtaatctgaggctcggtgcaaggcatctcggattgtctgtggtttggacaagtttagctcctttcgaaattcggacttgtaccatagtgcttttttcagattagagagagccgctacgtcgttgattccttcgactttggctagggtagatcagaattttacgaggaagtctcgaagtggctcattcggctgctgagacaatgaccacagatcggcgtctaatgtgccaagatcgattagcaccgaatattcctttaggaagagcgtcgatagctcctaaaaactgtccacggaatttccctcgagtcttgagaaccaatccagggctggtcctttcaagtgttcgacgaacaggtgacagagaccggcgactctttcgtcgggtctgaatttggctcgggccactagagattatga

SEQ ID NO: 17240 - DNA, 2394 bp, Arabidopsis thaliana landsberg
aacataaacacacaatggtgatattggctctcaaactcgaaatattaatattgttgccacgagcagccgtgatctaaggccagacctaaataccttagaaaacgtagcgctgatatcttttgcgatgacaatctccgatgagaccatgaattcaagccaatgatcataacggaagtcgaatcgcagaaaaaacttagcacctccgaggagttaccaaacccgacgccactgaagaaagaattaacagttttaccatgtaaacccaccacaaaaattaaaccaaagattcgcagcaatgcaaatctatcaacactagccacttagatgaggcaccacggaaaagatcaacaactttgttacataagacccacagaagaaatgaaaacttatcttcgccgagaaaatataaataaaaatctaccaacattagctacaacgagagagacaaaaagcacaatgtaattgtatcaataatagaacaacataccagaaaagacaaactcgaagaaaccactgaatcacgattttactgaagccttggttgtcaaaattgcagccacgacaacggctaaactaaataaaccacctcgcaacagaggcatacaatggccatatttgaggaggtagttcaaaactaacccacgattgtcaccacactgaacaatgttaagttaccagccaaggaagaccaccacctgagtgataagagacgatatatcctgggaaaccactatgaacttcgatttgaacaacaacaaaaaaagcgattattaaaaagtctttgcgtgaccaatcacaattgttgcacctaactgtaggagctaaaattatcaaacactatgtaaagtaattgaaatcgaaaataaaatcataaatggttaagaaaagacaagagaggagtcgagttgatgaactctttccttaaccctttgattcacccatagtgtggtggtttctgtgtgattcaaggatcccaagatacaatctctataaactgatttcgcaccactcgaaacacaactctaacgaacaagtttctacgatactttcgagacttactttaagacagagagagattgatggagatgttttgcttttgaaagatgtttgaacgttcaagtgttaatctgctagtggatccacaaatacttgaagcctaaccttcttatatagagttgagatacttaggttttaatttgcttcttcacaaaatcaaaaccaagtcaaatagaaatataggaggtagtgggtgagttccacacttcaacgactcgtattctcaaggagttgaagaagcgaagaggacctattctgtagggacgtgaagaacagagtgacttgtttcctcctttcaagaccagacccgacaaccaccggagctccaacgtgagctaggccatctcttaagcccatttcttttccaacactttaatttaattaagcctattagcttcaagttgccacgagcatccggggtgtaaggataacgttcgaaaacttatatcgtcataacttacatattttcagcaagcaatcgacactatcaaactgtaaacaagtgaatcatccaaaattgagaacattgtgatctcagcactccgacactactagtcgagatcccgtatcatctggcaacattcgtctaaaactatcttcttctacaagcttcaagctgctaaaagagactcatcgatagaaatttctccttttaagtcatatgctattagaactaaccaaagacccaatagaaaccgctacaacaaccaaagagaactatcacacgtcgagcaagatctcgaactgcaaataacttaaacgtcgagcaagatctcgaactgcaaataacttaaacattctgtcatttaccgctaaaaacgatatcgttgaatcataaaataaaggaagtttcctcatgacactagcaagaaatgccaaaaatacgagaaaggcaaaatgtcgatatgtttctaaaaccctaatctgtttttggaaaggagcagaaaacacatgtgtctcacacgcccgctacctgaacatcatgctactctactttcatctttctaagagcatttgtaagccatctgtatactttatttttgctttcactttacttcaacttatctctatttttatttatatagaagaaaaattagagatttctaatttttttaagaaccattaagaaaatagaaaaaaaaaatagagacaatttcaataatttaaaaataattagttcattattcttttatattattttatttatgtagtttggttccatgtttgtagaattttttagttgtaatctctcttatatgaatacaacccaccataagataaatacgagaaattagaaaataaaaaatagtgtccttgttgtgatttccttaaaatttt

SEQ ID NO: 17241 - DNA, 1066 bp, Arabidopsis thaliana landsberg
  unsure (1)..(1066): unsure at all n locations
caactctgagagactctactgaaaatgagcagtatgacaactcgagttcttcaagtggaagtttcacaactgcttcgacaaatccatcgtctgtaatttgagaacaccttgtaagtctaaggcttctcagattactcgacctgcaaataattgtgtgtaacaaagttaaaaacaacatctaagatagagaagaagaatgacaaagatccaaaacatcttttttctagcatcccataaaaacctgaacgtaaccattcatacctcagaagcataacaatcttataatcaagtgactatttactactccaacatagaatttagatacaatgtaacacaacacaatcataagctacaaataatttccccaattctcacaagaaatagtaacttccacaaccaaaatctgttctaaccctagaactaacatattgaaatcaaatcaatccaagttctctaaacaaggaatcaaaaactccttttgaaggaaataaaatttggcgagattgtgagtggtaaaagagagaacctatgggcgatgtaattgaggagatcaacagtaccaaagtaccaaataccgatatcaaccaagcctccctggctacgatcaacagcgtgacggcacatgatctcgaggttgtaatccatgtcgtccaaatctccgaggttatgcatgtcaattttacgccacatcgatgggtctttacaaacacgacgccaagatctgcaaactttctgagcgttttcaagtatctcaatcgcgccaagacggtgcaggattgctgaagtcagttccggtggaagctccgtccagtttgtagattctccgacctccatcgccgccgggggtgaagacgaagaagccatttctaagtatcgaattgtcaagaattatcatcagtctctaattttacaattagatccttatggtatcacatatctacgaaaccagtttgggccaagcctagtttaatattgggccttggcctataattatattgtacccacagcaaaagttggcaagagcaacaaaaaacaaatgttctctccattgtttctnagagcacgt

SEQ ID NO: 17242 - DNA, 1531 bp, Arabidopsis thaliana landsberg
tttcctcttacaatctaaatctcacagccaatgaacaaatccttatgattctacattctacattatctttccttttactgtttcttacattctgtgtcttgcttatgcttgtgaggttaaattttccttttgctgtttgcttcttatgattttatatttagttttttttttcgttggacctcattttgctatagaaacattattgaacgaagcttcttctcttgctagttgctcatgtaggacccgttcttgtaattttctgtgagaaatatccagaatttggggtatatatgtaatagtttcaacattctcagtcaatggagattggagtcaacgtttttcactgtatacagagcctctttaaagctctgtgatagttgactgcaagaaaagagataagaaaactgtgatactgatcctactaattttatggcttcttcgtttttccttaccactgttgcagctgcaataggcttcttcacccttttgagaaaactcagattccatcatgataacaaagaaaagaagtcaacttctttatctccttcatcatctccatcttctttgtctccttcatcagttcctccaccttcttcgtcttgcatctggacacaccaagtctttcccagcttcagcggggaagatgtccgtagagactttctcagtcacattcagatggagtttcaaagaaaatgaatcacaccatttgttgataacaatatcaagagaggagaatctatcggtccagaactcattcgggcgattagagggtccaagatcgcaatcatcttgctctccaagaactacgcttcttcaagctggtgcttagacgaattggtggagatcataaagtgcaaggaagaaatggttcaaacagtgatagtcattttctacaaagtggatccatctcttgtaaagaagctgaccggtgatttcgggaaggtattcagaaacacttgtaagggtaaagaaagagaaaacattgaaagatggagagaagctttcaaaaaagtagcaacaatagctggttacgattcaagaaaatggttagttcttttgatctttaattgaccactcttaatcgtttgcgttatagatataggtaaagcttttaaaccagaatagtactaataatgttttcttgatatgcatgcaaaatcttatgatgtgtatgtaacatgttgtgtgttgcacctccctttaattttacacagggataacgaagcgaccatgattgaaaacattgccactgatatttcagaaatgctgaatcattctacgccatcacgtgattttgacgatttaattgggatgagagctcatatgaaagtaatgaaaccgatgttatgcctacactccgatgaagtgaggatgattggaatttggcgtcttttctaatctaagtgaggcctcccatttatactaccttatacttcccccaaaaagttctgattcttattgagccctggttttcatcttttataagcaccaaactacaccttttttaattcaccgtccgttaaaaaacata

SEQ ID NO: 17243 - DNA, 1635 bp, Arabidopsis thaliana landsberg
ttttgggctattgcttacagtgtaacagaaggggattaccatacaacatggatgcgctgagatcatatgatccagatgtatgtgataatttgctgaagacggatccaaccacgtggtgcagagccttcttcagtacacactctagctgtgaggatgtaagcaataatctctctgagagtttcaacagaacgattagggaagcaaggaagctcccagtggtaaatatgcttgaggaagtcaggagaatctctatgaagcgtatttctaagttgtgtgacaagacagccaagtgtgaaacaaggtttccacccaaaataatgcagattcttgaaggcaaccgcaagtcatctaagtattgtcaagttctcaaaagtggagagaacaaatttgagatattagagggtagtggctactactcagtcgatctcttgactagaacatgtggttgtaggcagtgggagctgacaggcattccttgtcctcatgcaatatatgttatcacagagcacaaccgcgacccggaagagtaagactttaatctctttctcttctcttttaccaatctatgttattatgtgattgtgttttctgaattggagtttgcttgccatttagctatgtggataggctcttagaaacacaggtctggaaagctacatacaaggacaacatagaacctatgaatggagaaagattatggaagagaagaggcaagggacgaattgaagtccctgataagagagggaagcgagggagacctaagaagtttgcaaggattaaggagcctggagaatcatcaactaatccaacaaagcttacaagagaaggtaaaactgtgacatgtagcaattgtaagcaaattggtcacaataagggatcctgcaaaaatccaactgtgcaattagctcctccacgcaaaaggggtagaccaagaaagtgtgttgtaagtattcttaaccattacctatcttactatcatttgcaatattatagcattaataattctgggttttgtataggataatgatgatccatggagcatccacaatgcaccaagaagatggagggcagctcaaagccagtccacaccacctgttgctcaaagccaatccactccacctgttgctcagagtcaacccacacagaatccgcagcattcaagtgctccagctgctaatccaagtggtagaggccgagctcgtggacatcctcctggagttaaaaatggtcaaggcaagggtaaaggcaagggacgtggtaaagtcaccgatgaatctccgagacctcctgtgttttttatgtccccttggactgataaggtcttcgatgtttggagacctgagaggaaataggatagatttaagttctcttttgtgttcttattgactttgtaggatgttatttatgtaggatgatgtgtatgattggtaggatcccgattttttttgggtgggatctagaccttactctgatttttcggctcttttgactcaatgaaagtaggatattaccattgatttaagagttttacaacaacaacacagcaaacaacaaagaacttctaaaacaactagcattagaacatccataaaacaatgcaaagaacttcctagcatccataacttcctattacaa

SEQ ID NO: 17244 - DNA, 1829 bp, Arabidopsis thaliana landsberg
ttagaaagcaatataatgtactgttaatataacgcaatttaattaataaagaaaaaaagaaagaattgatctcgccgacatttggtagatgaagaaaggagggatgttatggtccaaaagatcctttggggaataacaaaatctccaaaagctggtcacatgtggctcattcttgtccaagtcaaaccttcttcacatcttttttattttattttattagtacaataacttattaatattactcttaatttccgttgcaatatgcttttaatgctctcattcggctgactaattttcacttttcgactttacaaaccaaaaaacctttttatttcttcccatgaagtgatatggaattgatactcatgataagtttctcaaatttggtctcaaccaagaagacttttttttttgtcctcaatttaactcttgtattattcgcattggatatgaaatttcttttgtatgtgcaagatcttggattcttttaatattcttaattatgcaacgtatccaaaattccaaattgattccttcaatggcatcaatgcctatactaagaacctcggaaagcttatttgaaatcataaaacgcttgagttgtcaaaaacactcacataaaactctatatatatgtatgtaatatagttatatagggatcccataaatacataagaaattattatttttgttcaaattatgaaaatagtttttgcatagtaatataaaagatgtgcaaaactagtttatctagaaatatagttgttataccacaacaaaaattgtgatggatactatttgaaaccactgtatagtatctcccagacctttattagggttgtattaaaagactacaacaaataacagactaaattgtctctcttttgtttaacaatgttcacacatatatattatcggatgccaacatggctccatgatttgatgcaggaccggcccaataaatatgcctccgttgacgtcgccgggtcatgtctccagacccgcaaccttagatcacgatggaaagttagatgatatctatttgaaactccgagaaatcggatcccaagtccatagagccagcagtttggccccagaaatcgatcgaatgatcgaagaaacccagaagactcctttcacggatcgggttacacgtacgagaatccctcaagtgaagcttagtaatccaacagtcgccaaagctcacttttcggacgaactccgagatatcggctgctggcagctcttcatcgagggcctcttcggaaatgctttaacctggttttccagattagaggcaaactcaattgacaacttcacccagttgtcaactgccttcttgaaacaatagagggtatttattcaaccaggtgcctctagttccgacctttggagcatgactcaagaaaatggcgaaacactgaacgactatcttggtcgtttcaaagaaatactgtctagagttaccatcacggatgaagccgaggtggctgcttttaggaagggactgctccaaggatccccgctgagaaaagaccgcaataagagaaccgcgaaaaaacgacgcattggtcgtcgaactggtaatggaggatttcgacctagaacgagtcctaatcgataccggcagctcgctcaacctgatgttcttgaagacccttttaaaaatgggaatctctgagagtaaaataatgcctaagatccgcccactgacaagatacgacggcgaagcaaaaatgtcaataggggagataaaactcaaggtccaagtgggcggcatcacgcaaaaaaacaagttcgttgcatcgactcggaaccaatctacaatg

SEQ ID NO: 17245 - DNA, 2135 bp, Arabidopsis thaliana landsberg
tcattgaaccaagacatgcttatcggtttgaaatcatcattatcccctatgcaaatgagcaatcctaaatgtaaacactatatacaatcctaaaatgatatgcaatctacatgacactctttttttttgtgaaataattttctgaaattttttcaaatttttatggtttttctatgccttagatgatgcaaaatttgaaataagaaaagagaacacaatattaaacatgtcttgaaccctcccccaaacttaaattacacagtcccttgtgtaataaaaatttgaaagagaattcaagaccaaagcacaaaacacacaaagaaaaataaaaagatgctatggtatatacaatggttgaggtggtgttacctcagtgatcaggtgaagtagattgaaacatagtcatccatactctcttgggtataggcaggggctgaagttgagcaagagggtgttgctcgttctgtccggtctagcgtgtggatgctctcctctgccttctccttggactctcaggtcggagatcacttctcgaggctcaaatgatgaagctcggggttggtcaatcctgtcagcccttcttgcagttgaactcgtggatccgcttcttcttacttcgggaatgggagacgggggccttggcttgctctggaagtctttgatttgagcagccatgtccttcagtgacttctatatggtcttcatcttcttcttaaaacccttcatcgttttgctgtgaagattgatataaccctatttttactgcttttagctatgatttaggataggttttagagtccttttgttatttctagagtcgtttctagtcattttcaagtctttacatgtttgggatgcatttagagattatggagcattctggagcaaaacagacaacttaagttgcaaaagtagtccgcacaccaaaatccgcgtaggtgtcgaacgacaccacccctggtgtcgtgcgacactaataccacacggcaattggaagacgcaacttattgatgttttgaagatttccaaattcggcccagaacttttccttatttctaaagaaggcccatcacgtgttaggtcacatatatatattgttttaaaggtcattgtttagacctaaggttggagaggctaatctccttatctcttttgttcttgggagcaaaaccatgtggagactctttttagagaagatctttcttactctttcttttgatatatggactattgatttcttattcaaattaatgatttcttattcagactatgatttgtgtttctatgttcatgtttgagaaactttcttgttagggttagggtttctcattagggatttagatgatttagttggtttccccattgctaggttatctttaggattcttcatcttaattgatcttaatgctagttctagattgatcacctagaacttgatcttagataatatgtatacccaccataggtacctgttatcagaactatcatagatgggcctaagtatttaagaaagaacaggtaggctcatagaagagctctggtttatatacttagttgaactaatccaacttgattataatgcatgctttaagtataaaatttcttggcttctccggttgtcttaattctaagtatagagagtttcgcgaaacaccactggttactctaaaaatcatagtttgagtttaagaatggttgataacaacttagctatttctagatctactatcatatatttcctgagaataccctaagcctgacgcttttaatatcttattttacttccatccaatcgattgctattgcttacttttgtttctctttattttatttactattttacttagcttaattcaaaaccttagtctattgcgtgatccgagagctttgtgaatttgatccctaagtgctgcaactgacctctttatatgagagagtggtcttaggattaatttgacctatatcattacacataatcgttcgaagagacggtctatgaaaataagtagaagtttagctacatgaagaaacaagattaacatccaaagcactaggcggcttgatcaggggattcaacaaaagtgacatatgtgtccatcgcatacactttcgtaaagctcgagacaccatcatca

SEQ ID NO: 17246 - DNA, 1641 bp, Arabidopsis thaliana landsberg
tcgcattcgcgaaaagaaagaaaaaatatatatatatatatatatatattaaacaaacattataaataatattaaaattttcttaatgacttttatgaatatcacttatgaaagaagaaactgtttattttccttgatatagtttagtttttccattcttcaaacggttgcatagtttagttttttcattttatttttttcatcaatagtttagtttttccatgtatatctcaattatgaattaattcaatatatagtccaagtactaagactatgtccatcagtatttctaatgggtttcttatctgaaatcctaaagaataaaagcccaaaattaaagaaaaacccaacaaaattattaggatcgatcctaattttaggtttcttagaagtgtttagaaactcaaacgtggctgcttctaaggatgaaaatttaggcaaaacaaaaaaaaatcatgctccgcgtgtttttctttcgtcttctcctatctcttttctttggttactctaacgacgaaatcaggcgatttgaatcgatttgataagaaactatggtgtatcgatcatgaaattgggagacagtctctttgctccaatctctttctcatggtaagaatctctctgtattcatgtgaggattatttgatgatggtttcgagtcatctaatcagcaatttagggttaatatatgtggttatatgcttgaaatttcactcgattacaagtctgttttgatctgagacttgttctactatgtgttcaagtttgactctgaaattttgttctggaatgaatcttaagtatacaattttgttttagttgctaaggtttgatgatgaggatgtggaagagagctatgtaaggtctgagggaaagatatgacgatgttgaatcacatgtatatttctcctacattttatcatcaaacttgctactcttttccttcgatttcgttaagctaaattttgttctgttttacagcttggcaatggaggagatggtgtgtttaatggaccagatgaggctcctatgtcgtcacttaacgatcacgtgcctgagttaatggagaaaggtgggtttgatgagattgttgataaagagattttgaatgatttgggtggggatgatgatttggttctgagacggtcacatgttaaagtgttctgaaaccctcttaattagttttatttttcttgttagttaatgtattcttgaaagaatgataacctctgagaagttttagtgatgtctcactgtgtttgagttcttttataatgtgatcaatgtaacattgctttaagattttctatgtggaaatgatgccttaagctcaccattgtagtgtacattcctttgaagcttccttataagaatgtgtgatggaatcaagaaactagaatctttctctgaatttcttctgctctcactatggtagtcattgtagtgtggcgtcatgtattacaaccactctactgctttttctgtttttgaaattgtttacagttgaatgtccgcaagtgccatgaatgtatgcaagttctacctgaaacctatgaacctccttatgatgaaaactggaccaccggcatttttggttgtgctgaaaatccaaagaactggaagtttttcctttttgttttg

SEQ ID NO: 17247 - DNA, 1677 bp, Arabidopsis thaliana landsberg
gtccgaattttggattggctttggatgttatgatacgagacgaaaagaaaacaaacttttgatacgtaaaatagtatctaaacaaaaacatttatcattgggataaacagtttagtactcaaattcagagtttggtatttaatcctaaaatattaataaaactttgattttttttgtttggtttgaatttaaattcaaatttttggataaagaaaaaggtgaatgtattcataccatattaatatataattcgatttgaattcggatcggattatttagaataaacaccccttgatatcaatgtagacacttatagcctcaacccttagttaggttagaagttatcgactctcacgtcatcgatacacggaagggttatgttgtaggagatttttcagattgtggtttaatttgtatttatttgacatggaggtttatcttgaaaaaaaaattatattgagggttttttacacaaaatccttatgtattcaaacggagttatcgactgccacgtcatcgatatacgggagggttgtattgcaggtgatttagagtaggtggggttgacttgcataattcggacttggagggtaacttgcaaacgagattgatttggagggttattttgcagaaaactcttcttttaaaaagtattaaaaagttttacatccaacagtattaaagagttttacatccaactttgaattaaaggaaaaagcctaatgtttagtgtataaatttccaaaaacaaaaatattaagtaagactttgatcttcaatacattaccatttcatacatttatatatagaatagactaaagtatgtgctataaacaaaccaataataataaaaactttgtaatcattaattataacaaagataaatgaatactcagccaaaacaacatcatgttcgggtgcaggagaagaaacgacaacaaaatcttcctcgttcatctccatttgatgaactctcggcaattttctatcctcgccacaaccaaaaacgcagagttttggtgattccaccatcgattactcttttatttctgattcattttcaaaagtgtcgaacaataccggtttactagaaaacatcgtgaaggaaggaataaaagaaagaaaataaatgcagttgatctcaacctatctatggagtttgatttgaattttgtgtgttttatttttccatcaaaaataaataaaatgctaccattgtaatttttgattaagaattacaatggtaagcattttattttatgtttatttactcttttatttatgtttctttgtgttttatttatgttttccaccataaacctgtttcatgattttgtaacgtgatcattgacagaagaacacacaaaatggattcatgaccctaatatccaaacatagatgacatgccaaatacgtctcacttttgatatctatctctcctttatagatgacaaacacccacggtattcctctcttccttgctaaacaatacttatgcacactgattagtatacaaagtttacagctttatactaacacatcattatggggaatccagaaaattgatcccactttactatgcccgttagattttatcacgaggaatggcgttataatggaggtatgtcctgtttcgctcattagtgcacataacgctcccccaaaggatttatcaag

SEQ ID NO: 17248 - DNA, 1486 bp, Arabidopsis thaliana landsberg
  unsure (1)..(1486): unsure at all n locations
aactgtaaaagatatttgtatgcatatgacagttaaaaatctacaaagaaagaacaaaagcctttcatgacaaaaagatctcaccaaaggatttcaacgttggaaaccaagtcctgatgttcaactcccgactcaagttgtttccaggaaagctaaagtccaggtggtctggacctttcactatcaaagagggattgccatatggggcaattactcttactagggatgaaagttctaaattcactgtgaatgggcagagggtcaagcgttatatggcagattgccctattcctaaaggaactacaattgacttccagaaacccatcagtgcctaaaatagtaaggagtctagcttaagactttaaactatctcacttgggaggaaatcccatgtctatctctatacatatttaattttgatattttgatatgctatttagtgtttttggaattcaggaaataaatcatgattccgagagttgtgaaccctgtgatcaagaaatatctgcaacaaaagcaattttactttatcaattggtcgagtaaaattgggggaccggtttgctccattaattggtcgagtatagtgactaggcgaccatgcatgatgatcgagtggcccacttgctcccacatgcactctattattcggcggataattcctttgcccattgaactcaacattatttggtcaacacccttatcccaacaaaagaagcataggagaccatcctccttcactcattcaaatcgcaactaaaaaataagagattactctctctctctctctctctctcactttcttcttttaagcgcacctaaccatcatctctctcactcgattcgtttagcaaaaatcattccccaaaatttcaatcttcacttttcttcaagaaatcgcccatcccctattttactcgatccaaactacaagtgtgtttttgtttgagacttatctactaagctttagttttgatttctgagagtttagcttcaccatgagttcgaacagcaacgaatcctcannnnnnnnnnnnnnnnnnnnnnnnnnngctgaatcttggtctactaggcctgagagggagatggaagtgtataggcggttcagtcaacacgccaccaaggtcctagctcgtgatagaagaagagcggaaattgcaagacgtaagagagctatggccgaagagagaagtctcgtcgatgaagaccttggtggggatgaagactatgtcccttaaataactccaagagccaataaatccttgatgaagaagactaagctatcaccggatggatactatgagcttttggcagctcacgaattccatggcactcgatacccccacaccgaaaccatgaatgagcttggcataacagaggatgtcgagtacctctttgaaaagagtggtcttttgggtctcatgaccaaccctcacttagcctacaaacaaaagcgcttcagtttcttgctttcactggaagtgga

SEQ ID NO: 17249 - DNA, 1876 bp, Arabidopsis thaliana landsberg
  unsure (1)..(1876): unsure at all n locations
cttccaatagagccatatgagtggtacctagacatgcgccgttatggaacagtgaagcattgtgggtttggacttggcttcgaacgtatgattctcttcgctactggacttgataacatcagagacgttattcctttccctcgctatcctggaaaagctgatctttgattcctcttctttacaccatttacatacacaatttcgcttttannnnnnnnnnnnnnnnnnnnnnnnnnnnnnnnntagtttactttttaagttggttaaaggaaaattgtattgacttttgattttttatctctatggatctggttttgttcggttatcccgatttggctattgaatgataggagaaccaatttgagatataccacaaacatataggagaaccaatttgagatataccacaaacatataggagaaccaatttgaggtataccactaaccgttgttagttgttactgttcacatttttatccggatttggataaatctctttggcttgttggaagttctttttgaaaaatgcatattattacataccttcgaagttcgaaactgacttcaaaactgcagctagaactttagtatcccttgaaaccaaaatgcaatgaaaaaaaaaactgaagaacgctaagaatgtgtaatcgaaacatagagattaacaacaatgtaccttgagcccaaatagcagagccatgaagacgatgaagaatgttacgagaacaagcaagtgatctcagctgattcgttgaattctacaattttctctatcgatctccattgtagcaaattaattactttctccagagtaagtgttttaggaattaagcgtcttcttctctctctctatcttagcttcaaatctctaaagactaaaaccctgattcggctcggcctaatataaacgggtcgttaatttcaataatgggttgaactatttgaagtctgacttaggcccggcccactagagatattgatagttacttgcgttttaggatttgctagggttatttaggggtttgtctttgttgctctttttgaaagctatggctgaaatcagcgggctgcctgatgacttgctggtgaagatactagcgtttcttccaacaaaagttgctatatcaactagcgttttgtcaaaacaatggcggtttctttggatgtggttgcctaaacttaagtacgatgattacgatgacattactgatggtttcaattccgtgtctgcattccagacatatcgggattttattgccaagaatttgccattacacagagctcccatcatagaaagtttgagcctcggatttcgttgtggaacacttcaacctgaggatttgaaatcgtgggttgaagttgcagtttctcgtagtgtgcgtgagctaagtatccttgcatattataggaatgattatgcattatcgtcgtctagtttgtatacctgaaaatcgctcgtgactttgaaaggctttaacattcgtgtggatgttcctccaacagtttgtctcctgccttccttgagaactttggaacttaaacgtgtgagatacttaaacgaagattctcttcgaatgctcctatccttttgccctgttctggaatatctaagtatagaacgacacgataatgacaatttgagagggttagttgttgatgtcccgtccttgcggcgtttatctttaacttcatatactggatgttcttctgacgattatgtaatagttacaccttctttgaagtatttcaaagcttttgattacagaagtgaaatttcctcctataagattgagaaaattccagagcttgaagaggcagatatcagtattgagcgaaatcccgagaagctttcgtatatctaaatctatcaatgtct

SEQ ID NO: 17250 - DNA, 710 bp, Arabidopsis thaliana landsberg
ctttatcccttgccgatttagcactattatcgatcatgcccaggaatgtggtttccaacttactgaattttgattcagtgagtatgcttttaaaaatctccgggtaattatatttagctgttgattgttttctaaaatattccatcaggatttccaaaacgattgagttggagaaatatgaaaggtaaaaacatgttaagagaagttgtggatcaaggaaatcgacataagcatttaactcaaatgatattgttacattttgttgttattttgtttaaaatacaaattaaatgaatccatcaaatattcgtaatgcatatgtgtatatatagtcactttactctgatgttctacttttggatgaattacgtaaactggaaatataaagaaaaaagtgtatttccgaccaaaaccaaaagcaaaaacttaaaaagaatatgtgtatatatatatatatgatatttttattaattaatttttatcttttaattgacaacatattgttgaacgttttcaacaagtctcatggtttcatctcatctatatatccatggaaaaacagagtcacttctcccactatcatcccgacacatatttgttgaatccggatggatcgctcaaatacaactttgagcatctaaaccattttttagtgaacgagagcatgattcaagaggaagactgcaagtgtatcgtagaaagagaaaaca

SEQ ID NO: 17251 - DNA, 2358 bp, Arabidopsis thaliana landsberg
ataactcagccagacgttacagctgagttgtaaaatgttgcttgagttatagtataactcaggcaaccggtatggttgagttaaggaatgtcggtcgagttataagaagttatacgataacccaaacaacgttatggctgagttatgagaaaacggctgacttatttcctcgacacggccgagttatagttttggacggcttagttatggaatgatgtgacggctgagttatgatcgagtgttataaatcagccgtaaagagctcgattactaaataactcagccttgttacggctgacttatgtgcaaaagattaattactataatagcatgcagttacagccgagttttaaaacgttacggctgagttagttgagttacgacattacacggctgacttaactttgttttttttccttttttaattactgtaatagtattcatgttgcgactaacttatagatttgcttgatggctgagttatcaaatgttcgtttggtggcttacttgccacctcatcaattcaaaacgacgtcggctgcaatattctatgtaaatagagccaaattttttcaactcgtcttcttcacctgagtttttcacatcaccggaacttacaattcctcatcgtcttcttcattcttcttcaatttctttcatccttcttccgatatggttgatccggttccggttgttgttgtttccggtaattgagtatcgaaacacaaatacgtatttacactgatgaagagggtgtacagttgtgcatatagatgcggaaataatgcacgacaaacttgaaaagttggtgctcgatgataaatttagacgaaatgttgcgtctcttgttgtttgcgggcaatttaccatgtcatgactgagttatatgcttaagaaaagacgaaaagtttggttaatttacatgtcacgactgagttaaatattctaggaaagacgaaaagttcgataaaattacattacggttgagttatatgtttaagggagaacgaaacgttcagtcaatttacatgtcacggctgagttatatgttacagggaagacgaaaggttctgtaaaattacattacggctgaattatatgtttaagggaagacgaaaggtttggtaaatttacatgtcacggctgagttatatgttcaagggcaaacgaaagatgggtgtaaattatatgttacggctgagttatatgcttcagggaagacaaaaggttcggtaaattacatgtcacgactgagttatcattcagggaagacgaaaggttgtgaaaaatatatgttactgctgaattacatcacgttacggctgagttacatcactttacggctgatttataatacaaatcgaaaagcaacatttttctggggaagacaatatgaaatttattggccaaataacaacaatcaaattaagaaacgtaagaatatgtttgagggatacataggatgaagacgaaaccatatgaatcaaaacattgatagaagtagaaatatctctaaatagatcgattgagaggaaaactaaacgagagacataaaatcaaagtaaatgagtagttattcttgattcaactcaaacttgtaacaaatcatataaaatttcatagatcttctttgatttgggttttgatttttgatgacttgaaattcgacaccaccgaaagagttttggccgaaagagacgagataagtaaagaacggcgacaaaattagggttccgtcgactgaacgagagaagagagcgacaatttttttttttttttttttttttttgcgcggatgaacagtgagatatgctgaaaaaatgagaaactgaaagttttaagagaatttttggtttcggatgacgtggattagggtaaatgacatggattagtgacatggataatcactgttttcttatttattttttaattaaaaacgaatttaatagtaatatttaattaaaactaatcaagggtgttaactgtaattacacaagtactgaaaacatgtgaataataaaaaaatatgtgttctattgtaggaataaacatacaattgtgttctattctagtaattatttcaaaaataaattgtttttgattgtttagagcagactagattgaagaatgtttagtggactcggttaaaatctagttgtcctgaatccgattcggaaataaaacataacgctttatcctgttattcggcaacaaaagagttttgtacatgttttatgtttcacatgttatcatcctgtgttacctgtttgaggagttgtatttcccaacatgaataaattatattgaattgaaccatctttctacagttcacatataggctataaaacatatagggtt

SEQ ID NO: 17252 - DNA, 1008 bp, Arabidopsis thaliana landsberg
ttgaaggctacatatcttgactcgtagtctgtctcgccttgacgacaaacaaagggaaaacttctaataggataaacttttactatcacaccaatagcgtctgaaatttaaagttaagcaaatattgatatcaaaaactccaaaataaaatcagtctgacctatacctaagataaaaacagttacctgtcacgcaattaaattgatcatctgtagcatacttaacttcatcgggagccacaaagtcaaaaaaccttcttgatgatctagatggaacaggccacatttgggtatggaacagacatttgatgtgaattggtctgagggcgtatttgacttcactttgagacaaaacaacttgaaaatcagacatgtagtaccacacaccaattctcagaacatctcgaaacttgtaaagatatgagccctctggaattttggcatctatacggctactctacaaaacagaacaatcaatagattgtcactctgtttaacaacaaagatatagactttataataacagaaaactaataatagaagtaggatctaagggaaccttttcatcaaccaatagcatagtcgtctcatcaccattaagggttggattatggttgtatagcgccaaaatcttaacataaaccctccagttagtagagtgaacatgtaagtctgaaagatggtgcattgtctccattgaataagccagaacttctagatttttagtttctcagaaaagaagttagagaggaagagagacaaagtaacgtgtgttttgggtttaagtttttataaaaagagtgaaacggcgcagggtttgtataataggtacaaaaaaagtaaaagtgaatcgtcaatttttttatggtttaattactgaatgttgaaaattattataaatttaaaatagattagagtttagtcatacgggttataggttactaaaaattaatggtatgctcttaggactcattatcaacctttgttcacttagttatagctcataaat

SEQ ID NO: 17253 - DNA, 796 bp, Arabidopsis thaliana landsberg
agacttttcgacaaatgcttgattcctcaggtctttttgacatttagacgataggaggaaaatttacgtggacgggccggggatctcattatcacatcaaatcaaaaattgaccgagcagtggctacttcagattggcaagatctctttccaagagcatatgttcagttgatgtcatggggtggctctgatcatcggccccttttgttggatacaggaaacagaaaatggagaggatataaattgttccgttatgataatagatggagatttgattctgctgtaaagcaagaaattcacaaagtctgaactacacaatgtcaagacattcagagcacaaactttcatcttgcgctcaagaaatgtcgtgttagtctgtcccgatggaagtcgaagcacattaccaactcccagaagaaaattcaagagcttaagagtaagttgcataaggcttatgagactcttccaataaactatgctcatatcaatgatctcaaaaatcagttggttaaggaatatcggctggaagaggaatattggggaactaagagtagagttcaatggcttcaagctggagataaaaatacacggtacttccatgcgaaaacaaaacagaggaggaattttaatcgtctcacttcccttgtagatgagcagggtaacgtttgtactaaagaggatgaaattcacaacctggtggagacttacttcagcacccttttcacttcgcatgaaagaaacaacatggaagaggtattgacgtctattcagcctagagttacggaggtaatgaacaa

SEQ ID NO: 17254 - DNA, 1002 bp, Arabidopsis thaliana landsberg
  unsure (1)..(1002): unsure at all n locations
agctcaaggtggatgagatcgattcccatttattccaaagtctgaagaagattgcatctgcaaaatcactatgatatgggagaagcgcaacgatgatttctccgaaccaagcagctacatgcaactcctcaagagcatggttattgatatggaggaccacgtccttaaagcttaatcaacatcaccatcatccctatatgtttattaagttgttttcaattatatctaataaagtgtgtttcctttcggaatgctatattttcaataataaagtgtgtttcctttcggaatactatatacgtaccatgtagtttcttaaatcaatatataagaaaatgggtcttgtggagttactttctgtagcatatacctttagatgttgacatcttttccattcaagatacacttggagactaaattttacggtttcaagatgatctaaagcttaccaattgaagggaactgaaatatttgtaatatataacaaaacttctcaaattcttttattttcatgtcgtatttattgtaaaactgttttttggggtaaaatataattttacattcataccaaaaaaaaaaaaaaaacttaatttttctgaactagaaggatgatggaccaactgtacacattaataacgtggtccggaattattttatcaaataaagaaaataaatttctatgacccaataatgtaatgctctaatattttattttataatttgtaaaattaatgctcactaaatactttaggttgaaaaatgaagaagagaagtttctagcatgattaaaagaaacagtattcnnnnnnnnnnnnnnnnnnnnnnnnnccaaggcaacaagtgttatttcatcgaccaaaacaaaacaaaacaaaaaaaacacgagtggaagcttttaaacaaaattagaaaaagagagagagaaatggcgacgtcgggaacatacgtgacggaggtgccgctaaaaggaacggtggagaaacacttcaagaggtacaggaa

SEQ ID NO: 17255 - DNA, 1330 bp, Arabidopsis thaliana landsberg
gttggtctttttatattagcgttcagtagcgatcgtgaatataattcatctaactttcaataaatcataagaatctcttaaatgcacgaatgtgctatcattccgtcagttccatgtcgatcaatatatttctcgctgttcgactgacgaagttatggactgatcaaaaacattatgtttgttagatagactctcacacccaaagtgagagccatgctgccatatcaacagcccaaataaaaagtgatttctgttaaagcatttgtttgctcgtctatcttatggtcaaagagagctatagtttctgttgatctttagctggaagtttgataacgaccctcttctttttggtgcagctcattcttggaaagtctttcagcatgctttttggatgactctggtatcggaaatcaacagatttaagttatctaattcatctgatgcaagagcaaaggtatatttcagatcttgttctatttgttgactttgaaattttaatagtggaaacttaacaatgcgttgtgataatttgaccttactgcaatttaggtgatatgcatgatcacacaaatttgacatttcagatatttaaatttgttgaaagtggttgtgcaaagtcaagtataaatatacttatcatcctgctgagcttgcttctatcacaaaatgcaaaaaaaaagtcaaacaaatcgggggcattccgagaatcgaactcgggacccctcgcacccgaagcgagaatcataccactagaccaaatgccctggtgctgaatacttgagttatagatgctataaagaaaaacatatcaagacattgtcagatctagctcctgtagttgacttttctgtgatgaattttttagtcttaatggaatttccctagatctgatctgtgggatctgtttcacaactgagaatccagggaatgaccattggaaaatgaatttgtggttcacaattttagtggctggaaatactctgatggtatattggttagattgttgaagttgtttggtaaggcttgaatcagaaggcaagataccttgttaccttttgtttcagttggccatttgcactgatgatgtgaacatattaaattactctgaccttgtttatatgaacacctgcacatgatattcatgccataaatgttatgaagtaacctgaattaagagattcccatggtatttaggaaacaaagataagccagaagcatattactagacctaatgcccagttcttgatgtaattaggttaaaaagctaaagggaaggcttgtgcgtagatccatcttctagatgctttgtttagctctttcatgttctaat

SEQ ID NO: 17256 - DNA, 1305 bp, Arabidopsis thaliana landsberg
acagttctccaacctaatttatacagagataagggtaaggaaagaggccgttgttgtgtttcttcgatgattaatcacatacaaataaaggaaatgcattcaactttgagttttaatattacctttggaacgaggacatccatggcagcaactgtcttctcatcatcgttaagtctcatgtaaaaagctttgattcctttcgggtagttatagacaataagtggcttttgaaacagaacctctgtcaagtatctgtaattgcaagacatgtttcattagcaaccatttcttaaaactgtttaaagctgaggaatggttcttaagggttatcacaaacctttcatgctccgaggctaagtcgattccccactccacattgttatcaaattcctttcctttagccacagcttcctcaagtagctctattgctttagtgtatgttatacgcccaaacggagtagaggcaaccaattttagcctgtcaatgcatcctgagtcgaaattcttagccataagttccatgtcagcgtaacatttctcaagcaaccagttgcacatgtatttcacatacgcctctgcacagttcatgtcgtcctgcacaaatttaaaagaaggtttttaagatactgagtctacattaacgataaagaagaaaaccaaagaatatcgtatgtttattacctctagatctgcaaaagctaatctcaggctcaaccatccaaaactcagcaagatgccttgaagtgtgagacttctctgcccggaaaagtcggggcaaatgtatacacatctcccatactacaagcataggtttctgcatgtaactaaccagaaactgtcaggtaagcttgacgtgcaaaagaatcttttgaataatcagtttctccatctttttttaggtaattcagtttatttgagcaaggtattcacttggaacatttcaatcactttttgtgatgataggattctgaatgtgacaaatatcatgtttaacacagaaaatgtgggtcgcaagaccaatcttatgtcggattcttgtaaatgctgcaatagtggtggttcttgcacgaaagtaagtatggtctttcaaatactctatagtaagcttctacttatgaatagagtatgaagtttcactgtgtaagtcttttggattcaagtaacaaatatttaactttagcaagtaataaagaagattaaataacttgcaagttatcaaattttggaagaatatttgatctaacaaatacttgtgttggactcatcgagtgacaaaataataatgcaattactttgttttttggt

SEQ ID NO: 17257 - DNA, 1207 bp, Arabidopsis thaliana landsberg
  unsure (1)..(1207): unsure at all n locations
caacattgtcttccaaagcttctccaatccttctttggggattggttttttgacataatctgatttacttttgaaaaaatctcctggactcgacggtctatctagaagaatgctcgtcggggtaccggctggataatctgcccaaaacaacgttgagttaagccagctcatttcttgacaatcttcatgttttnnnnnnnnnnnnnnnnnnnnnnnnnnnnnnnnnnnnnnnnnnnnnnnnnnnnnncccaagaactgagcatagaatacaacagtgatggttctctccccgcgttttgttccatttgctacctgaggcattgctctcacgaaaagactttcagggaatttgctagcgacaagctgccacttgtagagaacatcagtgcctccttgttccagtgttttgttaaccttaaacactgtcacgatctttggaacatcgacgaggttgatttttcaaaataaaataactccaaaaccttaaccccccccccgaattggccaaaaaaaatttttttccatggcaggctgaatcaaaaagctgccctttacaaccattaattggggggtcaatgcatgatccactgtgattccgaattttctcatcagatttccataccctccaccgcttatgtgccctcctactcctacagtagggcaaacgccagctggaaatgctagcgtttggcttgcctcattgatctttacgtatagctctcccaaggttgcaccagcttgaacccatgctttcttgctcaatacgttaacagtaatagatctgagattgaacatatcgagaatgacaaatggcacagacgacctgtaagaaaggccttcgaggtcatgaccgccgcttcggatacgcagttgtataccattggtctttgcgcagaccactgttgcctgaacatgagatacatgtttcgccgctacgatggctagtaattttttgaagttagggctcgagtacctcttgtttttcgtgtaggacaagtaagaagacaagaaggtggtggtgttatcggcaatggagatggaatcggtgattggattcttcgaacttgtccgatagcgaaggcattcaatgaaattttagaatttggttttgtacttctgctttgaaccgaaccaaagagcagacacaaatagaagtgctttttatagtttattaatttggctacgctctattagattagttttgatg

SEQ ID NO: 17258 - DNA, 891 bp, Arabidopsis thaliana landsberg
  unsure (1)..(891): unsure at all n locations
caaacttctctcatctattgaatgttatcgaagacttgcacatattaaagcaaactcgactatcaattccatgggttctatgggcaatttggaagaatcgtaatcataccgttttcaaagtaaaggtatggaattttcatgttttagttcaaaaagcgtatgaagacacaatgcattggaaaatggtgaacacgtagccttcaacagtattctctcggcaatcacctccaatttggatggaaaaaaatggaggaaaccccaagaaggtattcttaaatgcaatttgaattctttttggataaataaacaatcgatgtgtggaggagcttggattgtaagagatatagggcaagctaaacaccatgcacgagatgcgtttacgccaattcaagatcgaacaggggctgagctgcgctgcattctacggtcgttgaaagcatttcaagatattcacgtctccaaggtgataatagagttggaatatccagccgcagtaaacgccgttttgcagccgtccaaatggcctttctacaggaattggttaacacaaatccatgagattgctggtgcatttgaatcttgtacattccgtcatattgccacaaacgcaaatctgatcgctcgatccatttctcggagtgtgattgaagacagaaggtttcagttttacatagcacttggagcgagagccttcatggcttcacaatcaagtgtttgagaagagtaaagtttaaatttcattttgtatatctcgttgnttcactgatattttgnttctgtttctgttataatttggcttttcgatttaacttcggactttattactttatctctttaataattatcagatgacaaaaaaaattcaatatattaatattttatacctaaaca

SEQ ID NO: 17259 - DNA, 1637 bp, Arabidopsis thaliana landsberg
tgctttctgtgcctagccctttaaatagaagcttcctcaggaacttctcacgagctctgcctttccttccatttgagctcgcccttcttctcacaccagccaacggcacccgtaacctatcaatgctccggcgcagaagactgaccttgtcctcaaggtcaaaatttggaaactgctgcaccaaggtaagaagaggttcccacgtagcttcgagctcagacaacccggaccattgcaccaacacttcagcgccatcgttgctgtcacttttgcggatgtccagcaatttctccggttctgtagcccatttcaagttcggactcaatatctgtggaagctcttgaggtttgaaggagggtggaactgctcttttcagctgagaaacgtgaaaaaccgggtgaatagaactatgagccggcaggttaagtttgtaagctacccgtccaatgcgactcacgatctgataaggtccgaagtaacgctgagataacttctcgttctttctgtaggccacggagctctgtcgatatggtctcagcttcaaatagacccattcatccactgcgaattcaacatctcgcctgtgcttgtctgcactctttttcatctgattctgagccacttccaagttctccctgagctctattagtatcccatctctgtccttgagcaattcatcaacgtttgcattagcagaaggtgtatctccataccttaacaaggctgggggttctctgccataaacagctttaaatggagtcatcttagtggcagtgtgataagaggtgttgtaccagtattcggcccatggaagccattggagccatgaagacggtcggcgacctgcaaagcaccttaaaaacgactccaaacacctattcacgacttctgtttggccatctgtctgggggtggtacgcggtgcttttgcgcaactccgtaccttgtgatttgaaaagctctgcccaaaatccactcagaaagaccttatcccggtccgaaaccattgtctttggaaacccgtgtagcttcactatctcacgaataaaagcatcagccacagacttagctgtaaaagggtgttttagagcaatgaaatgcctgtatttactaagtctgtccaccaccacgagtatgcagttgaaccctctagagtgtggaagcccttccacaaaatccaagctcacatcactccaaatttcttgtgggattggcagaggagagagtaaccctgctggagatagtgtggaatatttgttctcttggcaaatactgcacccggatatgtattttaccacatcttttcgcagccctttccaataaacctcgcttgttaatcttttaaaggtttttagagcgccttcatgacctcctataggacatgtgtgaaacttttcaagcagttttggaatgaagggagatccattagggatcaccaagcacccttttctgtaaaccaggcctgcagccactgtgtaatccatatcctgctgtgttccctgcacacatgcctgaataatatcactcaacgccttgtcctggttaacttcctccttcaacgcttctagatcaatcgtgtggggagctgtgagtgttaactgagtgaaagaattcatctgcggtctcctagatagagca

SEQ ID NO: 17260 - DNA, 1720 bp, Arabidopsis thaliana landsberg
  unsure (1)..(1720): unsure at all n locations
aaattttatccaataatcatgcacctagaactaatccactcttgttggctacaccaattttttttatattcaaaactcgctttatattaatcactagatcgaaagtcaggactatagtatataggctaagttgaacctgtcgaactctaaatttacaattgcattctgaatattcttcaattgcaccaacatttccaaatttatacgtatgtttataaatacatatcacatatatactttgacttaggtagatgtctcatgttatgagtatttattgctttcgttatgtcatgcacaaataataaacatatacctacatactttgacttacatagcttatagctatgtataaaattaatgttataatacttcaacttacagctaattaggagaagtagtatttgatttgactagtccttccaaaggaaaccccccttaattaagcttattaaattgagtttcgaaagcgtcaaggaaatttaagaatgtaagactagtagactttgcatgcataatccttttaaattaatcaccgatttgacattttagtctcttaattttgcatgcttcattatgtctttgtactttactacttttgactttatacatgctcatgtcattatctacgtatctaatacaatttcttgtactcgaagtagtcatgttaatatgggctaacccaccccaattaaacccaccccatttaaacccaccccatttaacttcaaacccatataaacccatttatatttgaaccccatttaaccttacccatttaaatttagtaaacccatatgaacccatttaaacctattaagtgagatattgtcttttattaattcattcataaacttgatagataaataacaatagcccataaacattagctaaatctgaaatatttataatccattaaaacatagatttcaataacattgaacaaaacaaaaaaataagagcaaatgatgagtgatccataaatcttcaagagcattttcaaagcgtagtgtcgtcattatcttcaactgtacctacaattcaacataaaaattagtgataacaatcacttaattataaagtagtttctgtaaatcttaaattattaccttcatattctgcgaaaccacgtaaccagttacgtgtacatagcaaagcccgaacgttttgtggaagtaaacggttcctannnnnnnnnnnnnnnnnnnnnnnnnnnnnnnnnnnnnnttccgaagatactgtggtaattggaatactgagaatatcaagtgccattaaagctaaatccccaaggcgatgttggttgtctttccaatacctcaaaacatctaaatnnnnnnnnnnnnnnnnnnnnnnnnnnnnnnnagccaaatagatatccaagtgactctttgtgttgttcacaccagcttcaatgcttctttccaactcaaagagatcctgtattacaaagatttacatcagttaacaatatggatttctaatatggaattttaactttgtatatgaagatacttacattatcgaaatcatcctcaagtggagattcactaagtaagtcatgtggatttgttgtccctgaaacacctggagaactcgtctgataaagcttaaaaatcatttccaaattcttctcaagttctttaatcttcaacgcagaagtagtgggatctactttctgataagctacttcgagcatctttactttaagtctggatctaaa

SEQ ID NO: 17261 - DNA, 697 bp, Arabidopsis thaliana landsberg
aaacgctttctgtagtcgaaacacaataacacttacaaactcacattaaagtcaaaatgacaataaaagttcttaataagctccgagtggtaggccagtcgaaacacaaaaacacttacaaaatttttaacgacaaaactcaaaatgacacaaaaaaaacttccctacaaatccgaatggctagtcggaacattaattatacgacaacactcgatcatgtaaacaaatagtccgaacgatccatacaaaaaattatacgacaatactcgtaagaaaacatgaaaaatatgtcaaaattctaacgttagctcgttaaaaattctaacgttcgatagttgaaacattcaaaatacaacttgcttaagtcataagaatgttgaagaaaaaataaaccaacggtagtcggtgaaaaatacaatgtcaaacaagaagctaaaaattgatattacgaactatcaaaataatacgttaaaatttgcctatacacataagctaaaaattgccaaacaaaaaagcaataattagaaacactgaaatgtaaatcaatcccacattaacaattaaaacaaagaagaaaaacataggaacagaaatgtacaatcaatcccacaactgcttagccgtgacgatgagacccatcaaagaacaggagttaaaagaggtttattggagaagaaagcttaaatattccctacta

SEQ ID NO: 17262 - DNA, 568 bp, Arabidopsis thaliana landsberg
gaggagttaactcaccaaaagaagaaatcacatccacaaatccactaaatctggttaaaattgactcgtcgagtctcctagtgtacgatattaatcttcttgtcaacctctagaataaaaagatttaaagaagaaattttgttagtggccaagattagacttctcgaacccaccaccaaagatcacagctttttcttgtcgatctaatgagaacgcagcgcgtgtccgaggattacgatggaccccgtttgagctgatataattttgtttaagaataatatcttgtcgttatctctttcattacaagttttatatgtcggttaaaatggcgaaaagtctacggtgacgaagaggaagaaacataaatatcagaagcagtgattgcaaagaagaagatgatgtgttcttttctttctgacctaacgatcttatcgtctaaaagttttaccatttagttactcagaaccgacactgttcggtgggtgacacacaagaaaacaacatgcgctgtttttattgatagacaaatttattattaccacgaaaaataaacatgccttatcgaacc

SEQ ID NO: 17263 - DNA, 1876 bp, Arabidopsis thaliana landsberg
agcgtatgtttaaaaagttaattaaattgactaacaaagacttttttgttatccgcgtatataacgtaagaagagacgggcgagaataatgccggtgatttgctaaaagggaaataagccaaaaaaaaccatcatttaatcatttaatacttgtagttttaaatttggaataaaaatatctcacttattttttgttgttttttaaaaccatcatatttttaattttgctaattttgaacctggtacttaacagccgtcaatgaacataacggaattatttgacagtgttaaattttaaccttacgtattttaattatataataacaggtttacaaaaagttttgtttatattatcttggtatagtggtaacgcacagtttgagtaatcccaatttctcggttcgagtccacatcccactcctattaatttttattttttatttttctgattcacttcgtcttcttcacgggttttttttttatctccggtcactgtaattgattttatttttcaactctcatcatttatggttatggtgacggagagagatgtgattgactgggggaaagacgaagaaagagttagggattttggttaaatgatatagattgatggggaagtgaaggaattgagggattttgaggaggaggaagtagcagcaggagatgaaatcgccattgaaatatgagaaaatttagggtttttggtgaattgaaggaatctttgaggagagtgtgagatttgtgttgttttttgtgaaaaatgtgaggagataaaaggaaaaattaattgccgggatggtgaagaagatgaagtgaaaaacaaaaaaataactaaatgggaaaaaggcggggttcgaacccgcgaactgaggattatcctacattattggtaccaccagaccaagacaacacgcacgtaattttctgcaaattcattgtttataaatatcacaacatgtagggttaaaatttaacgctgtttaatgattccgtttcggccatcaacccctgttaagtggtaggttcgaaactaccacaatttaaaagacaatggttttaagagacaattaaaaataattaagggttttattttccaaattaaaactatggtattaaacggataaattaaatataaatggagattttttcgggttttttccccttaaaataatagtccgaagatcttctttttcttcagagtgtgcagatcgaattaataaaacattaccatagatatctacgatatttatgaagatgcactagatagtcaagttctataggtgtacttctaaaaataatgttttgcaaatctgtaaataagcaagtgtttaaaacaaatgtcatgatgtctagctctattaaaaatatataatctctttcttgtttgataaactattttacatgatatcacacacctattttaaagatgcgaaaaaacaatatccattatttatgattttagccctgcctttttatacagataaattgcaatattgggctatctagctagtaaatgaactctaccaaacaaacattgcagtttgctctttcgaacaatatctagttaagataagacatctattgaaaatatcatcagtgttaccttaccttacttcgaagaaaagaggataaaaacatagaacttttatcaactaattatctcatgggaaaagtgcagtcaggctcttggttgaagaaagtcaggttcttggttgtggagaaagagccagaccacccttacgggttttccgattgacctagggctttaaactaaaaatattgcaaatataaataataagagtatatcagaatatatttatatgtatttatagcaaacaaattgtaaaaactattaatttgattagagtagaat

SEQ ID NO: 17264 - DNA, 1962 bp, Arabidopsis thaliana landsberg
tttatcctttatatctgcagaatctttcacttatctagatcttgaacgtgttctacgtttcactttgttttcctcatcatctctgggggttgacttaacttccttacgtcgccttggtgatcgtgaaccagcacgagatgatttcttctctccacgtgatgagctatctcgtcgaagtcttgacagctctgaatcttcttgtccagattttctctttttagggcttacactcctacttctccttgaactagaagaatggtgttcatctgatctaccgtatctcctactttcagaaatatccctagaatctctatatgaccgccttctcccttcataagttgatcgccgttgatatcttaatggtgatctcgatctgtgacttcttgggcgacgaaacggtggtgaataggttggagatctccgtcttcgcctgtaacttattggtgattttgactttgatctcgaccttgcaggagacttagatggtgacctgcacaagagaggtgactatcagttcagatgaaaacgttatcaaaaagagaaaggagcaagccataggtaatagagagaaacgtctatagatttttattggatgcccacctagacttctgatcagcttctttttcatcatttccaactccatcaggtctcagtttcctacttatctctgcagctctagctgctgcaagctcagtggcagacttcattgtggcagctctatttgctgcctgctgagtagccacggcttgttgcattagtatagcctgctggaattgcatctgctgcatcgcgacggcctgttgcatcatcagtggtagtgaggacgaagaattatttgaagatggtttgtgaggtagcgattttgcaatctcaacattcaatgctctaccaaagacttccgtattgtttaatgccaaagcagctgttgcttcttcggaattcgagtattctatgtaggcgatatgctttgaatcagttatactacagtcaactactgtgccacagaagctaaatagctgcctaagttgttcagttgtaagcgatggacttaggttgctaacttggagaaatttcttcaaatccccgttttctcctttttctggggaacctaaaccaaaagctagtagaactcatgagtatcgagaaaactaaataaatatctaatgatattcaacttgagacccaaagaaaaaatagagatgaatatcgagagactagcaacaaaaggtacagtacctaaagatcccttgtttgattgagcctgtgcttgcatctgagaagcatgagcttgaagagcctgtgcagcaacaatagcctgcgcagcagccattgcagcagcagaaggagccataggcacctgactaaggttacccatacttgtcgttgcagctatagcagtcatcagcaaattctgaggagggtggtttaacttgcacatagagttcacacatctaccattaagatattcccgacaaacttccccaagtgaagctccaactccaggcaaaatagcaccacctgaaggaccagatgcaatccctggaaccatccccaacaaccccgggaaagcacccgaaacagaaccagtgtaattaggcatgtttggcattgtttgatttataagattcgagtatgaagctggagcagaacccatcagtccagtagaagaagaccctgttacaaaattccataaagacaacacctttaccatcaaacaaagcctatatacataaacgaaacatcaatggaaacgataagattcattaccttggctaaagaagacaggaaagggacttcccatgatagcattcccattgcattcaatattaaccatatagtttcctctcttaggcacaacataagtaacagcataacttccatcaccaacatctttaaccacaccttgttgatcagtaccaccaacaccaacaccaggagacactctaactctaatcaaagctc

SEQ ID NO: 17265 - DNA, 2159 bp, Arabidopsis thaliana landsberg
tcgcatccccaactcatgacttaaggcattgacctcgtcattcaccttctgagttaaagcattaagtccttctagctcggacgtcgcaatcttcgcacctctcttcatcagaatgccaaccacttcttcagcgccttaagcttgattctgggaatccaccttgggcttaacgatgttctcttgctcgttgagataggccttcatcttgtcgaaacgagcttgggcttttctagtggtgcgtgcaaccttcgcatctcgatcagtctgcagcctgttgcattccttctccccgtgctctttcaccacgacaaatgcgatctgaagatcactgatctctttcaaaagatcaaccttgcgaccattaagtctggcgacctcgtcattcagcgagcttatctccgccttgtgggtctccgcagcatccttcaaaggggccatctccttaatgtccctcgcataaatgagtttcgctttgtccgtgcatttcttcaggttgtcgaaggcatctctgtctgcgagcttcaacctctgcttatgatcgtaggtggcaataaggtcgttcgccaaagcagcggtctggagaaataattttgttgttagaacggagtacagagtaaaagtagaacgccagtggaatcggcacatacctctaatgacgatctgacaaacttcttgtactcctctctcaggatcaattcatcagggttggggaattctctcaccccgggaagcatcagattgcgcaggagatggctggcagcttcgcgatctcgtacgaggaatttggctccagtatacttgaatgtaaactggtcagggttacgagcttcgcccctataaatacagaaagtctttgacgcgggggcttcatcatttagtccggcctcagaagctgatctcttcttggactgattgtccactcctttccctttttcctcgcgggatcttctcaaagtcccgatctcagcatcagtgccatccttgtttgaatcaaggttggtcaggtcgacatcgaccttctcgcctcccaaagtggcagtctgaactgcagcaggctgttcgcttgtgacaatttgaacctcatgcttgacggcctgagcaggaataggttgattcagatcgtcaccgacgatctcttgagcttgaacacctccagcctcttcaagacatgtcctatcttgagaatctaggtcgactaggatctcacgagacacctgatcaatgtcaaaagagccgaagttagcaggagggatcactggaaccgccacatcgtctgaaggacgagcctgttcttgaacgggaggaggaggaggcggcatgttcaggagtcttgaggcgaagctaataaaggacttcctgacctttcccatgatgttgttgactcgcgacctcgtgatgtctttccacgtacgacgtcgagctcgaaagattgcctctcgaactcctacaaactcaacagaaaattctgggctagacttgtaccgagctgcaatatacagaaaaattatgagaatgcgatcaaagtcgaaacttttttagtccaatctatttaagagaagtctgccgggatcctgtgcccacatcctcttccttcccgagaacggacgctcgtgggattcaagatcaaccttaacgtagaaatagtactcctcccagttcttgaaattgctgaccttcaggccaggaaggatgttatacttagggcgattgtttaccaccctgtatctaggcgacctaacggattttaacgtcgtcatttcttcaaaacaacgaacattcacccggtaaccctcttcagcaccaaaagttaaggcagcaacgaagttgcagatcgccgccggagtgagctgggagattgccatgcaacggcgagttaggaaagaaatgattaaagatgggattggaaactagagatggcattgtctgaagtaggcctcatataaacacacatatccccgttgaggactccaaggacgatcatcttcaccaggaatcatgtaaatgatcgggcgatctccagacccgcagagagcaaacagttccgcaatagactcatccgtggagaggcttttactcgcagcgatctcagtgttccagtcaacgatcagatcaagatcaaaatgagcggtctgctagcgaagtaacctcgcctcaacttc

SEQ ID NO: 17266 - DNA, 2621 bp, Arabidopsis thaliana landsberg
tcttcttcatattttccctatgatttggatctctaaaatcttcaatccccatgttctaatttaaaaaatcacaacactctctttatcatataccctattataaaccaaactttgatcctcgaatatattttattaaaaagataatattcgtgtttctcatgttggagtcataataaagaaacctttgtgttttaatttaatcccctccaagaaacctgaagattctaagaagctgccattaaaactaataaaggaagagagtccaaagaagaagaagaagaagagaaaatgtcacgtcttgacgacataccttcaagcccaggcaaattcaagatggagaaatcttcctacttgcatcgtctcagattccaatcttctctcacaaagtttgcatttttctccttcttcctcctctgtctcatctctctactcttcctccgatctccaccgtccattaacccttcttcaccgtccgatccatctcgccgttcactccgaaccaacacctacggaggaccagcttgggaaaaacgtctcagatcctcagctcgaatccgaacctcaacaaacaacggaatcacagttttagtaaccggagcagctggtttcgtcggaacacacgtctccgccgcattaaaacgccgcggagacggcgtaatcggcctcgacaacttcaacgattactacgatccatctctgaaacgagcaagacaagctttactcgagagaagtgggatcttcatcgtagaaggagacataaacgacgtcgaattactccgtaagctattcaagatcgtctccttcacacacgttatgcatttagcagctcaagctggtgtacggtacgcaatggaaaaccctagctcgtacgttcatagcaacatcgccggattcgtcaatctcctcgagatctgcaaatctgtgaatccacaacctgctatagtctgggcttcgtctagctccgtctacggactcaacaccaaagttccgttctcggagaaagataaaacagatcaaccggcgagtttatacgccgccactaaaaaagccggcgaagagatcgcacatacctacaaccacatctatggattatctctaaccggattaagatttttcaccgtgtatggaccttggggaagaccagacagggcgtatttcttcttcactaaagatattctaaaaggcacatcgatttcgatattcgaatcggcgaatcacggaacggtggctaggcgatttcacttacatagacgacatagtgaagggatgtttagcggcgctagatacggcggagaagagtacagggagtggagggaagaagagaggtccggcgcaattgagagtgtttaacctcggaaacacgtcgccggtgccggtttcagatctggtgaggatattggagagacaattgaaagtgaaggcgaagaagaatttgattaagatgccacgaaacggtgacgttccgtttactcatgctaatattagtttagctcaacgtgagcttggttataaaccgactacggatttgcaaaccggtttgaagaagtttgtcagatggtatttgagttattactccggcgacaaaaaagccgccgctagatgatctttttttctggttgatgatgatcttttgatttcttgtttttttaattgatttgagtaatttttgggaatttgttgtaacagatttgaacacataacccatttcggtaattttatttaattcatttattttacttcttactgttgtctgttctagttgatttgatcaaataaaagagattaacgaaagaaaaaaacagagttgtcatcgtcaacaatcagaaatcgtatttagttcttccactacctagaacaagacacaacatatctggaatgtttgaagtagatttgtagaagttccatgcctcgagcattaaacgttttcttgatcctttgaagtgaacaatctgcaaaaaaacgagtaatgagactctgatgatgctttgagggtttatggttttagggatttagagtaccttgacatctaatggcatgccatgaaactgaccagcaccttcaggaggtgtccagttgtatagagcacatggtagaaataacactgaagctccagctatttcttctgtgaaagcttgtggctttgtgaatctctttgcgtcaaaggaaggatgagatttaacaaccgataccagagccaactgatcaccaagcatgcgcgaagctttcatgtatttggttttgtaagcttttaggacttcttcaagaaaaactttggccctgcattgggatcacatgtaagacaaagtcatcaatatgctgagacaagtatgtcttttaactataatagatttgcttcaagtttacgaaggataaatgcaaaccttaggatcccttcacgtgtgcctctcactgctataaatcctgaattcaacggctgatctttattgttcctgaatgtgagtgctagatggaagcttgaatgcttgtcaaatatagtcccgacgtcgtcaaccacagctatatcagaatcagtgaagatatagtggtttatcccaccctcatttttctcgagcttcatctcaagaaaggtctgcagagacaaattttaacaagaatcatga

SEQ ID NO: 17267 - DNA, 487 bp, Arabidopsis thaliana landsberg
gcggcacagactatctaacacaagatgatcgaggggagaatttgcaataattattctgttttgcttgcaatcgaggagacaacatttattctgttttgcttgcaatttcattattgatgtctactttggtactactttctttgatccttctgtagatctagtctagtagtattacatgcaacatctaatctgttattattcttatcacatgttcatttatctttaatacaaaagataagagtcaaagagtcttgactgcgatcattttgcgttggtggttatttgagagctaaaacttgcctgaccaagagagacgctttgttctttggtaacaagtgttcgaaccaaccagtcctacagatgcaaccaaaagcgcatcttcgttatttttgttttcctccgtcctttagataaagaaggctgtattaacatgaatgtgatttttaaaggatgaaatattaactgtaatgttcccatttgtttttgt

SEQ ID NO: 17268 - DNA, 945 bp, Arabidopsis thaliana landsberg
tctccacttttgtccattggcatcacgaaactacccaccctctctaacataaactgtccgatgatggctttgctcaagttaaattccatgatctgcccttttcattcatcagacaatctttcagatccgactacaccattttccctcacaaaacccattggaaaaagctgaaaaattcattataaaacaacatgaattcatagtttaatttggaattcaaatttaagagtagaataccattaagtcataacgtagactcgaaggcgccacattagccgaaaaacaagaaggatctagtgaagaagactttgcttctccatttggattcttcttcttctctgaaaaagaatagatactaagtgttacatagttaaactggttctctctactaactgatccatattccaaactcagaccacatttcttgaagagtcagagacagaacacaactcaccgtcaccgaggttgttcttttcgactgaacacgaaccatattgaatcccacaacaactaggtcccaacagtgttacatggaaagccaagtcactctcttgtctgaaaacaacaatgtcaccgattcgaagatcatgtgagacagcaaactctttccaaccgtcggtgagtctctggccatctatcttcacttcccaagttctctttgacgcgtctgatctcagcttcgccgtcttctgctcatatcttccttctatatacttcaagaagaaggctacaggaattgtctgaagcaacatgcaaatacaaaaccagactcatctttagcttctcagagagacatagacagagatagaagaagggaaagagcgagaaagagagtaccaaggaagcgtggtagccaagaagaagaggcttgaagatatgtgattgcccatttcaaaatcttgagaagtcctaaatggctaatttgaaagcgacgtacagttcttg

SEQ ID NO: 17269 - DNA, 805 bp, Arabidopsis thaliana landsberg
agatgttgcatatttagtggaggctctagattttaccttctttttgccgtcctttgccatgaggcacttgtggtcgacgttggggaagaggaggcccttgttgatggcgatgtttgcggcgtcctcgtcggaggaggactcggtggagctctcatcggagtcccattcccgacacacgtgggcatcgcgcccttcttcttgtagtacttcttttctttccttcttcccttcttgtcgtcgcccctgtcactatcacttgacataggacattttgcaataaaatgaccgggcttaccacacttgtagcaaactttcttggagtagggcttgtaatctttcccctcctttgcttgaggatttggcggaacgtcttgatgatgagtgccatttcctcgttgtcgagcttggaggcatcgatggggagcctacttgacgtagactcttctttcctctcctccgttgctttgaaggcaacgggttgcaccttgggtattgaggtggcgcctcgctcgatgatttgtttggagcctttgatcatcgatgcaaagctggcgaggtgtctataacctccttgggagacattactacattagcttgtatctaggatcaccacgaattaattgaacttgtgtaggattaagaaaaacgagtgatcttagaataaccttgaccatttcatggtcatcccattttgtgctcccgaggttgcgcacttgattcaccaaggtcttgagccggttgtacatggcttgtggctcctctccttggttaagcatgaatcgactgagctccccctcgatcgtct

SEQ ID NO: 17270 - DNA, 854 bp, Arabidopsis thaliana landsberg
cagcggtaaacgagttagatccgatatagaggagtatgccgcctaaaaaaatgaaagcctgagcacgggaatgaacaacggatttcctattctgaaagacggtttactctttcactctttctagggtactccaataattgaagataagaacagataaatatagataaaaggcgacgacgcttcgggtttctagtaaagttcaattcagttcattattaggatattgcttctacaaaacaaatctaccaaaaaaactatgttgtcgtatgggacaatactagtctagcggtaatgaaattttcaaaaatataatataggggtattatggtattttccataggaacaacgtcagataaacagtcgaataacgatcgacttaatttctgagtcttccgagtacaaataatgataataccctaattttgtattattttttaattaaaaatattataaacactatcctctataacacctctttctctatatgttattcacaatacatcatacaatattcttctctacgttcaaaatactcccttatcatcttaccaaaaaaaaaactcattcaccaaatacaacctatctatctctttgcacatggttcttctctatcaaatacgcattcaccaggtacaacctatccatctctttgcacatggttcttctctatcaaatacgcattcaccgatccatttgtttgcatcggtaaatttcttttttaatacacatatatatacatatatgttttatttcataaacattattgggaaaattgtcaaaaaaattgccaactttcaaaaatgggccaaaaaaataaccaactcctgaaatgtcgttttaataatatatttttg

SEQ ID NO: 17271 - DNA, 1951 bp, Arabidopsis thaliana landsberg
aaatgccaccaagagaaaaaaaaaaaaaaaaaatagttaccttcaaagtgatgttttctcaacaaaaccagatttgacagctactggaagcttcagtgaattaagagcttccgcctttaacttcaaatctttaagaacaacatcacctaaaaagtaatgaaataaaaaaaagaaaagccccaacatcaaaacaacaactgactagacagccaagggattacatctctacatatatcactgttcataaaccatgagcagtcaagaatttttaatacgctcaagatacatctatataaaaatactaacaaaaatgaaaatccaacctttccagacactaattctcagagcctctgtggagagtccatgcacatattcacccaaatacctccgaagcagatgcagtacctgaataccgagtcgcagcaattattagatacttcattcaattatttaaggagacatgaagacctctacataagagcaaagatttcctgcaaaacatatcactacaaactgcagaaattgatatctgaaacagtccaagtcgctaacttagaaatttgttctattcctcatttttattctaatagtcaatgcactattcaactaattacttctccagtaacagctaccattgctgctctcatagatgctaaactaaaaacccattttcataatccatagataaattccaacatacgacgagacaagctaatcaatcacccagaatcacaacatcgaactaaaccaaacacataacttctaaaactagaaacaccagaaaaaaataaccggtaaagaagacatcacaatccccaaaattaacaaagagaaaaaggcttacatgagcttcaaacatggcggaaacaagaaattaagctcggagcgaaaaatggaaaggtttttcttcaagtttggttgagaaaatcgaggatcatcgagatccgagaaacgaaccgattcaacattaaagagagagaagcaccacgatctcaaaattacaaatcaaacaaaggttcgtcgaatctcagtaatcgatctagcgagagagagaggattagagaagaagcaagagactcgagagagagatagagacggtttgtgagaaaacgaaacgaagtgagagaagaagaacgagactcagggatgaatttcaggtaatatacgtgccggtcttatgctatttgtattttggatttttctacttttttccggtcaaaatacactttttaattttattttaatattcaaaattataacacttttgacccctatttttcttaaagattttacatttatccataaactttttgtactttcagaattgttgagattttgaacaacataatgaattgtttttgtgattgattgttacatgagtctattgttaatggtcataaatatatccacttcgaaacaacatatcattttgtaagattccaagatatttagacaaatgatgttactacgaatcttttcgttatcctaattatgaggttccaaaacttcaatagatttaattgacaatttgacattacatatacaagaggttataaactatttttatgctagaataaaatctagaaaaaaaaaatacatgggatccattaatatgaattagcatataagaccaacattattggtggtatcttacccaaatcttagggtaagatttgtgaaaaaaaaaggttttatataagcctaaaagctcttatataagagttctttttcacaaatcttaacctaaaagcatcttcaatggtagtttttaagcctaagtctcttaaacaaaattaaagtgtaagtatagataaataatatttttaattatgggtctcttaaatttggtgaaaccaagaccaattatctcttaactaagagacaattgcctaggtttcatcaaagttaagagacttatgaatatttaaatcatataatttttttgttcttt

SEQ ID NO: 17272 - DNA, 1190 bp, Arabidopsis thaliana landsberg
  unsure (1)..(1190): unsure at all n locations
gaggtccttcgcggtttcttggatttcttcatgtcgttgttcattcttatgttcttcgttattaattatgagccggaaagagcaaaaatggaaatgaattcttcatactaaaattcgtaaaacacacagagaagcaaataaaannnnnnnnnnnnnnnnnnnnnnnngtaggcattcggtttcggttcggttgcgcatggtttcggttatttcggttatagtaatataagaaccatttggatatttgaagaattttggttcggttcggttcggatatctttcggttcggttcggtttggatattaaacttggtaaccataaataaactaaaaccgaaataaccgactaaaaaccaaaacaaccaaaaattttgaccaataccgatatagaacgtacgtaaaaaaaagaaatattcacaactcacaaagatggtccatactctccataatattaaaacaccttattcacaactcactaatttcaacttgcaaactaataaagagaaaaacatagttaagtgtcaatacatacaatatatgtgatatattatctatcatacatatatgctttggttatcctttggttatcggttacgaacataaccgaaaccgaaactgaaatctaaaacatataatatccagccagttattttaagctatccaaacccgatccgaaccatgtttttcggttcggttaatcggttagcggtttttttgcccaggcctatcgttgacaatctcaatagaatttcttgtgatgatttttatcaaacctggctggtcaccagttctcaagaacagtactaaaaggtgattgtattcgtagaatttctatcaaacagcatgtcctgtgattgaaagttacacctttactgcaacaatttttttttttttttttgattcactcatatctcaaacaaaactaggttacatagatcaatgcatctgaggaggcagcacattactactgtcaatattctaaaacacctattggcagtttacttcactttttcttgtattgaatagctttttgtttgagaacacaaatatgtcctttagcttgcccctggattcactcaaatattgtctactatacaggctagcatttgaaatataattcttggatcttgtaatgttttctaatgctcttagtggtggtttacatatgggacatgctaagaatatgagact

SEQ ID NO: 17273 - DNA, 994 bp, Arabidopsis thaliana landsberg
  unsure (1)..(994): unsure at all n locations
gctagctgccctaatcttgaacatttggtcctgcgtcgaggtttcttctttgatgctgtagtgaatttcatcattgatgcgccatctttgaagacacttttgctttccgatccctttagtgcgcgagagagtagtaggggatatgtgataaaagctccttctttgaagtacttgggaattgaaagtgtagaaggttttgagtattttctgattgagaatgtaaccgagctagttgaggcaaatattagaaacgtttctaagatagtcaatgagaatattttgggatctctcaagtcagccaaacgtctttccttggacttatcacctttgaaggtaacttcgcttttatcgcacttgacttgtttgttgtttctgtatatactaatagttgtctcatgaatagattacatatcctactgaagttatgtaccatcagctggtatatctggagatgcatacacataaagtggagtggtggaatctacttacgcacatgcttgatagctctcctaaactacaagtcctcaagctcattgatgtaagacatttcattattagttagctagctattgttgatggtctctcgttggggttagttttgaaggactaattctaatatacatttcatttcccttttggtagcgtgagactcgtcatgaaaatctagaattcgacaaaaaatacaaggaccaagggaaatggaatcaaccaaagtatgtccctgaatgtctcgaaacgtttatgtggagaaattgcaattggggaagagaagaagagaaagaagtggcgacgtacattctaaggaacgcaagacagctgaagaaggcaactttctctacggatcccattgaagcgaagaggctctgtaaattggccaaagacgtangatgcgcgaggaattggatggtgtggtcatgacttccaattcatgccccttgtttttgaattcgatgatcttatatgtgtagaatctcttatcaagcgagctttacta

SEQ ID NO: 17274 - DNA, 1253 bp, Arabidopsis thaliana landsberg
gggaaaggaatatcgaccctgatattgttactttcagcgcattgatcaatgcatttgtcaaagaaggaaaggtctctggggctgaagaattataccgtgagatgcttcgaaggaatatatttcctaatacaatcacatataactcattgatagatggattttgcaagcatagccgtctagaagacgcaaagcacatgtttgatttgatggttagcaagggctgctctccggataaaattactttaaatactctcatagatggatgctgtagggcgaagagggtagatgatggaatgaagcttctccatgagatgtcgagaagaggattagttcctgataccgtttcttacagcactcttattcacgggttctgtcaagtggggaatgttaatgctgctcaagaccttttccaggagatgatttctaatggtgtgtcccctgatatcgtaacttgtaacactctgctggccggtctctgcgagaatgggaagttagaaaaggcgttggaaatgtttaaggttttccagaaaagtaagatggatcttgatactgctacttataacatcatcatcaatggaatgtgcaagggtaataaggtcgacgaagcatgggatttgttcaatagtctccccgtcaatggtgtggaaactgatgtcgtaacttacaatatattgatcggcgtatttgtcaaagaagggaactttttaagggctgaagacatttacttggaaatgctctgtaaaggtaatatttatattgtcacatataactcaatgatcgatggattttgcaagcaggatcgtctaaatgatgcgaaacgcatgttagattcgatggctagcaagagctgctctccggatgtagtcacttttagcaccctcatcaatggctactgtaaggcaggaagggttgatgatggattggagcttgtcagcgagatgtgtcaaaggggattagttgctgacacaattacatacaacgctttgattcatgggttttgtaaagtgggtaatcttaatggcgctcaagatatattcgagaagatggtttctagtggtgtgtcctgataccattcctttccatagtatgctggctggtctatggactaaggcggaactacaaaaggcattgacaatgttggaggatttgcagaaaagtgtggtatgccctctactcacttttgtactttcgagttttggagatgaatatacacagctttggctggagagcttctagtgtagcatccggagaag

SEQ ID NO: 17275 - DNA, 1380 bp, Arabidopsis thaliana landsberg
taaatctgtttttcttttctttttagatattaaattacatatagaataaaagtcagttactatttaaaattcaaatatcattgataagattgagtgtgtataattaaaataaaatgcataagatagaaattttgtttaaaacaataattattaaattaaatatcaagaaaaatatattgattactatacaaattcaaatactatcgataaaaatatatttttgtatcttatacccgcctaaataggtgggccttatctagtagtataatacaatgatctattcagtagagaaaaaagagacaaacccctctatttatacaagattatgacggtttatcatgaaaagttaaacttcctattctttagggcttggatcttcttatttcctgcatctccgagattctcctttgtctaaaacgaaaactttttctttctttgatttaggaagtcggccaggcgacctctttacaccaggttgatcggacgatctcttctttttggcctattaacaagctaaatcagagtacctcggtttgactgaattctcagtttaattcttaattcttctggtttaagccgatattgtcggatgtgctaatttttgcatcaacaattagtcttcccccattttcgggaatttccgaattaaggaagtgaatattggcttatacattaggaagatgcgaattaattataatataattgcgtgtcgttccacattctcggacgcatcaggctgcttttgaaacctgatatcgctggagatttcactgtcctcgtcagattctttgaccgaactagagtaccataatgatcaagaaggacaaggccagcgtaagagatctttaatgttccaatggatttggaaagaggattgtatctattggcaacccatacataagttctctcagagattgacttgtaccaaatcccatgataccaaccatatccatttcgagagcttcgctgtggttttgaagaaacctagctcgaagacgttaccgtgagacacaatagttcggttgcttgagattgtcagagtttctgtacatgacaaagtattgacatggccgtaactgaacagagcgaggagatacaattgattgtcgcccctaacaagtgattgtggtccccaaaattttgagaatattatctatacataaatgcccccgtttgattcctttagagaattgataagcccttaaaattttagggccgaccgtgagtattgttcgagaacacataaagaaacagagctaataagacagcgacgaagaagaagaaagtgtaagaacggtaatagtttggtgttacgcctctcatcttcacgactttctgtctatttatggtatggtatatccgatcatacgtagagtcgac

SEQ ID NO: 17276 - DNA, 2228 bp, Arabidopsis thaliana landsberg
agacaaacgaggatgaagattgttaagattgttccaaaatagacaaaagaggattgagaacttgatctagtccaactggtccgattgatcccattgactgcttctctgagtgagtgtgattgtatcagctccatgtgttgtttcttggagctccattgtaggctgagatgttccagcctcctaaaacagaaacaacattcaaacatgagcaccaaaatggctaaccaaacagcagcctaaaacagaaacaaaccttaatctcttgattcttcttcttgacagcactaataatcccctgtcaaatacaaacacattagcatctataaagcactatcatctatacataattaaacaatcagacataagataatactaaccttgcaacgatctgatatgaccacatagccactgccatcctttagttccaagtcatgcttcagctgattcaaaaaccagagccaattgtctgcattctcagactgaacagttgcccacgccactggatagatttggttgttcgcatcatgagctatagcagtgaacagacatcccttaaccgcatgcttcaaaaacgttccatctatcccaatgagaggcctacagaagtaaaacgcattcttcattgctccaagacaaacataaatccggttgaagacatcattctcgtttgcatccctaatggtatcaacaattgcagttgatcctttgtttgtactcaagatttctgccacatagcctcgaaggtgtgcaaactgttgggcatattcttctttcagccacttaagagctagaagtcttccatcttgcacttgtccaatagtactaactagcttccattgctccttgatatgcctctgaatgtcaagaggcatgaaattaggctgcaaccttagcttatccataaacaatctaccaatcactttcctcttcaacagcttgcattttccattagaagtacaagaatgatccagacatttggtcttcaaaacccacaattgcctctcgtgagagtatgaggcatagacataccattcacactccttcctttgagcacatctaaagctaattttatccttttcccacctattttgtttagcatttatcctatgcttcattgcataatgcaagacaacctctttgaattcaaaaccagtgaagaatgttctgcctatagctaacctatcatccgaagctaacctaatcttcttatctctagtgatcacaggatcttcttcttcattattactttctggtatttcgttccttctaatctttaactcatcataccacatagctactgcttcctctatctcgaactcaaacctctcggccaaatcttcttccggctcatccttcttctgttttctcttcttcttttgaccttcttcagcctcttcctcctttcttttctcttctctcgtcctcttcttttgactttcatctctgtctccatcgtcttctagattgacgtctccatcagacgctatgtcaccatcgtcttctctattctcctctccatcagattctctgtctccatctatcccaacgtcgtctccctcaactccggtggcttcgtcctcctcgactccgctatcaccactatcacttccatcgtcggcttcaatgtcaccctctggaggttcgaaatcggggtcatctggatcgctttggtaaatcaatccttcctcccaccaattcttcatttctccctattcgaaacccaaatcgaaacccaataattcgaatcgaagaagaaaactccaaatccccttttgtctttctctctcaagaaccctaatttcacagtgtcgagattaaagaagaacgaccaaatcgatttgagagttaaagaagaatgaaaacgacgtcgttttctttctctttttgatgagttaaacgaaatgaaaacgacgtcgttttcttaatgggtctgggtattagtcgggttaatcgcaatcgcggtacagtaaacgcagatttgttgttaatcccggttaaatgaatggttcaattgaaaatgtatgtttaagcatgaattcgaaagtagatgatgtaattttgaggaatatgaaagttgatggtggaaatttaagggcccaaaagtccgggagtgaaaactgagaatcgaaatagtttatacctcaaaaatcagccaatccaaagaaaataagcatggtaattaatagtcttgtaaattttttgtcaattatgcgaaatgaaaaaacaaa

SEQ ID NO: 17277 - DNA, 2210 bp, Arabidopsis thaliana landsberg
  unsure (1)..(2210): unsure at all n locations
atctaacaaaactcagtaaaccaataatttcttaatcactattaaaaaaacaagggtttctcaacgaaaattgcagttagctctctctattgaacaggatctgtagtcaaatttattgtctgttccaagtgtgatgaactcacaataatcaatagttcaaaacagctcaattaagaaaaacaccagaaacaagccaaaattgaacagaaaaccctaatcactagttagtcaacctagtcacctacttcgagcacatctcgacacacaactgaacaacgctggagagaagaagcagagagttcatatacttaggaactaataacagatgaagaatgttgtaaagatttagagagtatccatggaaagcaacttacaaagctaaagcacgcagacttcaataaaaaaaaagcaagagcaccagaatcagaatttatggctgtaactactaactagtaactagtaaatgtctatccggtttaacataaaaccgaaccggtgattggaacgtcaaaaattagtcactcaccaagtcagagaccacgtcgtttcattttagttaaatgattctcgcaacgtccgaatttttactttgaagtttgaagctattgctagtagcctagtagtattgaaaatgccagtgaattgagaaggattaaattaagtacaaccacaaaggaaacaaaaacacagatcgtatgagtctcacttcactaaaaagctaaagagagatgaaggatttgcacagtgtaagagacgaaaaagttgttttggttgtgtaaaataaaaaacagcacacaaacttttaatacgttacaaatgcttgggaattatgatacagtcgtcatcttctgaacatcccattgaagacaattgcgtcaacgtcagtattctcagagatctgtagtgacgacacagcttgagtagcaaacaaatcagctgatattcccatgttgttgttgttgttgttatcccatccccttgcgaaaggctcatatgagactgacgaccagttactgtctcttgttctgttgttatcatgaacngcgtagcttgagcaccgttgggaggaaagaatatgtttattccaccactanaaagattgattttggtagtatagtcccatggcttgaaacctgtttcttggtttagcgtgtttcggtatgagtcatcacaatcttcgccaagtaagacgtgcagagcaacagcctctgctatggcggcaccttcctcatccaatcgcctttgttcctcaagttttctaagcttcttcttctctagctcagccctgatggctgcagaagtagcgatggatttctcaatacgtctctttttcctctctgcttgtttgatacgctccagttcctctctctcctgcttcttctttgcagcatatgctgaatcttcttcaactgctgcgtctagctgtccttccttcttcatttgcttcttcttctctagctcagcgcggatcgctgcagtagtagcaatagctttctcaagacgtctctttttcttctcagcaatggcagcaccttcctcagccaatctcttttgttcctcaagttttataaacttcttcttctctagctcagcccgaattgctgcagaagtagcaatagctttctcaagacgtctatttttcttctcagcttgtttaattgggtccactacaccttttacttttttcttcctggcttttctaacaattggctgagcttgtttgcacatcgagctactgctatccatgattgctacaagtctttgtttgccttgcttttgttaactggcttcttcttttagttggttgtttccttttactttgattctaccaaactcactacaccaaggcgcgatgatctcaatgactactacacccactcaggtatgtaggtatacctcattttacggacaatacaatcccaaacagaaacaacaggagataagagaagggagacgttgtaggagtttgcagagttatcctttgaaagcattcgtcctaatttccaacatcccttaacttctcccattttctacaaaagaaaacaatactagattagacttgcgttaacagggatctcaaaaataatataccaaaccaaaccaacccatctgctttcttaacctaatgaaagctgcacggccacacagttatattttatatatggttataggcaaagcgattaagcaaataagctttttctcaacctgat

SEQ ID NO: 17278 - DNA, 2390 bp, Arabidopsis thaliana landsberg
ttgcactccctccgttacctgaatctggctttcaataacattagttcctcactttcttccaaatttggcaatctcaacaaattagaggtcttatctctttcttttaatggcttttctggtcaatgttttcccacaattagtaaccttacccggataacgcagctgtacctccacaataatgagctcaccggtagtttcccacttgtacaaaatctaactaagctctcttttctaggactttctgataatctcttttctggaaccattccttcttacctcttcactttcccttccttatcaactcttgatctgcgtgaaaatgatctctccggttctattgaagttcctaactcatctacctcatctaagctcgagatcatgtaccttgggtttaaccatcttgaaggaaaaatcctagagccgatctcaaagcttatcaacctcaagcgtctcgacctttctttcctaaatacaagctacccaattgacttaaacctcttgtctcctctcaaatctttgtcttaccttgatttttcgggtaatagtttatctccagccagtttaagttcaagttcgtacatcccgctgagcatggaaagcatagtcttgtcgctctgcggcatccgcgagttcccaaacatcttaaaacatcttcaaaacttgattcatatagacataaccagtaatcaaattaaaggaaaaatacctgagtggttatggacccttcctcagctaagcttcgtggatatttccaataattcgttcaacggtttccaaggttcggcagaagtttttgtaaacttatcagtgcggattttaatgttggatgcaaacaattttgaaggagcacttgctactctaccactctctatcatcggcttctctgcgattcataatagtttcacaggagagatacctctttcaatctgcaaccgaacatctcttacaatggttgatctatcctacaacaacttcaccggtccaattcctcaatgtcttagtaacttcatgtttgtcaatctccggaagaacgacctggaaggaagtatccctgacactttctatactgattcttctctaaaatcacttgacgttggctacaatcgactaaccggaaagcttccaaggtctcttctaaattgctcctctctgagatttctaagcgttgacaacaacagagtcaaagacacatttcctttctggctcaaggctttaccaaatttgcgtgtccttacccttcgttcaaacaaattctacggtcctatatctcctcctcatcaaggtcctctcgggtttccagagttgcggatatttgagatagctgataatatgtttactggaagcttgccaccaagtttctttgtgaattggaaagcatcagccctcacgaagaatgaagatggcggattatatatggtgtatgaatacgataaggctgctaacagtccagttcgctacacttatacagataccatagatttgcaatacaaaggtctacacatggagcaagagagggtccttacttcttatgccgccattgatttttctggaaacagactacaaggacagattcctgaatccattggtctcttgaaggcattgattgcgctcaacttatcgaacaacgcattcacaggccatattcctctgtctttcgccaatcttatgaatctcgagtcactagacatgtcaggaaaccaactctctgggactattcctaatggacttgggagcctctcgtttttggtgtacataagtgtggctcataacaaactcaaaggtgaaataccacaaggaacacaaattaccgggcaaattaaatcatctttcgaagggaatgcagggctttgtggtcttcctctccaggaaacttgctttgactctagtgtgccaccgatacaaccaaagcaagaagacgaagaagacgaagaaaaaggagaggtgattaactggaaagcagtagctataggatatgctcctggattgttgtttggattggcaatagcacatctcattgcttcatacaagccagagtggctcgtcaaaattattggcttctgaaaagcgcaaacaccgttagaggattgacttggttttacgtgtgatctttgaatgtctctatcaaaacgttgctgttttcgttccttatgtttatttgtatcttcatgtgaaactttgttctatttccttttcaataaagtaagaatgctaaaaagattgtagttggatcaatcttacaaaaatagaaggaatgagaataatcgaacaagaaaaatggcatggcagggaaaataatggcatctagaaagggcaaactaggtttgactcatcatcgcttcttttcaattactctgtcccaaaaagtaagaacctactctgttttgtaaaag

SEQ ID NO: 17279 - DNA, 2135 bp, Arabidopsis thaliana landsberg
attaacggatctcttgaaaatgctttggttgatacgacggataacaaaaactagagctgatatattcgcaagtaatccaaaaagcttcctccatgagctccttgtgtggttgaccaatgttgcaactatcataataacctcagattatatcttaaagaacttataataacagtaccatgttccccacatgttccatagatcaaaacataaaaacccaaaacataaagttctcggcttttcagtatcatcttaacttcgtcttaggataagggtacaagacacaaccataatctagagaagactagcaaaagagtgacgaatcaatcactggcttggtgaacggtcttcgtcatactggcccccatgcgggctttggctcctgcttctggcgggttcaggagtgtagcttctgcttctcctcggactcctgcttcttctagggctacggcttatgcttcttcttgggctaacgctcctatttctttttgggcttgggctcctgcttcttcttgggctacggcttatgcttcttctagggctggggcttaagctgcggctcttacctctgactggagttaaactgcgaccccttgagccatcagaggcaggtgagcgcgagtatgacctcctcccatcatatcgctcttccctgggcgagatagatctgtgacaatagacagtgagcatacaagcgtggagaagtttgtaattgagcttagacagaaacatatagaaaccttgggtgatgtcttctagggggaggagaataatagtcaccgctccgtgaccgagatctaccacgtcgagggggaggagaacgagagcgagagtagtaacgaggtggagtacgtcttctatcccgaaatctgctgctccaacgaaccaaaaaaagatgttaaatattgagtttttgatatttgacaataaccaaaatagttcaaaaagagaaagattcatgcaccttcctccaccacgctcccttgctctcatttcagtcggtttctttctgttctcttctgcaaacacgacagtcaactcacggccaagaagaagataaccatccatgtgatgttttgcatcagcagcatcagcagggtccataaattgaacgaacccaaaccctcgcggatctctgcattcaaaatgtagaacaaaaagatctcagactagaaaccaaacatacaaaatggcgaggaagatgtaccactttataacaatcctgttgaaggacaactggcgatatgatcccctgcaaccgaagatatcagtaaacatgaaaaaagcaagcacttgcctgctagccttgcaagtgtcagtacaaagatgacttcttgaagacttgattcatcttcacatagaatacaaactcaacttcacttcaattcttcactaccatatagaacatcttcataagaactctaattacttctttgatgtcttcaattctttagattcactgctaaacctcaacaacttcaattaactcactcatagtgtgttcagacatggaacatatcatcatgtatccttttccttaagcgactcgaagaggcgcaagttttaggtgtactagacttaagctgaaaacctaagtgtagataaaacaaacgtttcaaggctccaaatgtgattttgggaagattggatataaaaccggacatgtttgacatagacctttcagaaaattcttataaatctaacaaattcatgagctgcatacgatggaatgtaggattcacaaaaggtggtttacgaagcaaaagaaaacaataagaaagagacatagtctaattgaagtaatgtaaaattatgccctggatgtataaacattcaatgtcttatctacagagcatcctcacccagtatagtaatccctaggaaggtagatgtccttgacgggaccaaactgctcaaatggcctcctgaggtcttcttgcctggagaaaaggtcaagagaaaacagagtcaaccaattgtaaacaactgtgattttctagtaatatggatacacaagtttatgcatgcgctatctaaaaataatgaaatatacgttttacatgcttctaaatcagtttttgcacacaaaaaaatccccaaaccaatctttgatgatgagtcatcatcagctttaggaa

SEQ ID NO: 17280 - DNA, 4386 bp, Arabidopsis thaliana landsberg
aaccaatattacattaatttcattactatttaatttcagcaagacaataaaccgacatttatttacgaaactgccatcatcgattttgttaaatatgtggcttttgttgcgattgatttgttttggacaacatatttttaggtcaaacacatattttgtacgacatacttgttttgtaccaaacgctttactaaattaatttatgacaaaataaaaaaattcgcagatttggttttcgtgacagatttgttttatataatctccacaaattttcttaaaatttcaaaatttagagtggtttaaacaaatctaccacagatttgttttcaaaaccggagatttttatttatggtggcgtcagattttttattttaaccaaaaatctacaattttataacagatttgttaactcggaaaaatattatatagtcatgacaaagttgttttatgtacccacatatttaattaacttgttaataaagctgatgttttacaacagatttttgttaaaaaataaaattactacacagtcacatagtgataacagactctgtttttagtgatgacagttttgtttttcagtgtcaaagcataacagatttactcatgtcaatgttatggccgatttgtttataactagaataacctttttagtaataacagactttttttggcagatttatttttaaaatttcgaaattttttgttatatgagatttattagttagccctcaattaaattattttcggtttgattgtatgttaaatccgatttgactggatttttttttttttttgaaaacgttacgacagacttttattagccgacagatttttccgaaatattaccatatttgagtcaagaaatattctcgtaacgcctagggttttcaatgaaaaaaactgccattgtcggttttttttttcttctgtaacgcctaccaaatctaatttcaatacaatctattattcttctacctattcgagatcttagttgcttcatctttgatacaaattcgattcccttgtttattcgattctctctttggtatggatcaagtaattctcgtgtgtggtaaatgggtatatgagaaaacgagatggctttttgtggttgatagtacaaaaggttgtcgtgtacttgaaggtaatagtcaaaccagttatgatgatttcatccaaatggtgtatgaggattacaatgtcgagaagagtgtatttgaagttattttgagttacaagatctcgaaatcaaagcaattaccagcagatactccacctgtactcattggtaataatagacagtttcagtcttatttggggcaaacgaagaatgctacagttcgactttgtgttgaattgaaagagaaagttctatatgaatcagaagaggaaatcattgatgatttaggtagcagcgacttgccgaagacaaaaacagttgatgtatacggtattgtcgaagagaacattgaaaacgttgacgtatacacccctactgataacgttgttgaaggacaaaaatctgaagcagttgaagatggtgaagatgacgagagtagatttgattactgtgatgattccgacggaacagattctgatgatgagaactttagcctctatgggattccaccagaagaagaagataaaacgaaagtaccaagcaagaagaggagtttaagtgtatatgtagaagaagataaaggagatgctacatacgagaccttagaactatcgtcattgggattggccattggtcaatgttttgaaacgaaaggtggaaggttctgaattttacttacagcgaagtcgatacctccgttgttgttgtggccagagaagcttcttttgataaggagtaaatcagaaaggggaaaacccacaaccctaatactgcaacaaatctacagatctgcaacaaaaaatattaatcaccatcacaatcaaacgaaattcaatcgataaaagagacttcttcaaaagcggtggtggcgggtcaatagtttacctacacctccggagaagtgaatccgggccaccgcgactcttccctgctgtttgtgtagccggaacctacggcggctaaaaaagcttgtaccaaagaagagtgagaagaagcagcgaccaccggagaagagatatctcctagtcgagcagcgaccaccggagaaaggagccacgactggagaagagaagtcggcgttacgattagccaccaccgtagatttgttagggtttcgatttgaaatctaagaagaagaagagacatgcaataggggaaaagagagagtcgggaaaaaccccaaatcgattttgttttttttacatttttttattcctttatttaatccctcctttttattaatgattttatttcttctttttaatcaaagtatggtttttagtataattctggttgtagtactgattaaggttaaaaagtattttcattataaatgtgagtcattctagtcagccatcaattacgagagtcatttaagttattaatcctaagttatgagtcaatctgagcaaaattcagataatagaaaatgaaacagagcaaaacaaaaaaaaattcttgaaagttcaaacaaagagtttattgacttgactcagctatctatcgatgagcttaagaaatgttgttactaacaaggaaagaaagagattttcaaagaaaaattatagagcatgtgaaaagtttggaaggtagggtatatacagcttagacaaaatcataagaagatgaaaagagacaccgtaggaaagaagtatgtaaaagatttgttcacaagaaggtgaaatgaagagggattaaggtgtgtttggtcttgaagcgttaaagaaacgtaacaaggacgtgatttgatggtggtgcatgtttttaatcgtatcaatttgaatcaagttctcgaagatataaattgaggtctttcagtctgggaagcgtgaaggtgaagaggatctaaactgcatcaaaagagagaagtgatagagttaagtaccaatttagaaggtaaaacattttcttagaataacagaaaataaaacagagtacatcttgacgagcttgaaaaatgcttatactaacaagaaaagtaagagattttcgaagaagaaatatgaagcatgtgaaaagtttagaaggtatggcacatattgcttagacaaaatcataagaggatggaaagagacactgtaagaaaaaataaaacaaataaaacgagtgcttgcaaaaagatagagagagtgatagctctttgtaagaaattgtgaggatagtaattcatatacatattgaaagaatgtgagaaaaatatgagttgttaaaagaaagtgtagataagtttatgaatatacttcaatataatatcttatttttagaagagctatactaactaatacagcgaagataaacgaaaaacaatagtaaatttgcaggtaccaaaatgagaaaatcgtcaaaattatttttcatacaacaatttatttcatacgtaaaaagacatcgttatcctaaatatctaaaactaaagagagagtcatgaaccaaaaaaatgttcttttgataaatgttgtaaaatctaaaagttttattaaagtgtaactatttgtcatggtaattttaaaattcaaagagtttataatattaacaacaagtagacatataaaaacatgtctttcaaatttttcaataaaaacatttagtcacacaaaaattattaaaagttttacaaatagactaacgtgtagcgtgagttcagaacctagtatatatatatatttaattcagcaaaagaaaaaaatttaatgtttggcaagaaagatagtaaaagaaaatgaaacaaaattaataataaatttagaaaatttgttagcttgacaataaaaaaaaaaacttttttcaataaatagaggatgtttatgaactaaaacttaaacaataaaatgtttttgaagaaaaattgaattaggttggtattcaattttaaatcatgacagcaatgtatccacacatgttcacaaaaaatgaatctagggaattgtgtcaattaaccatatatgatttcattatctaaaatttaacaatgatgaaagtaaaaagaaataaacaagtttgcataaaaagaagaaacagaaatagaaagccaacacaaaacagtaatctctctagactacaactttactcacttcaccagctctcacttgatgacaatgggcgactctgacctccgtaaacctaccaatttcggcaccggacatctatctcgccgacgatcatggtgttgctctttcgccagtcctccagcgagtcctgatgctcgttcgatttcatctcgtaaccacattccagctaaatctcagcagcagagacttaactgg

SEQ ID NO: 17281 - DNA, 710 bp, Arabidopsis thaliana landsberg
ccggacccagaagcaacgttttcagtgctgtgcaaccttcaaggttcaatctttcaagatttagagcctgtgatagccctgacaagttttccaacttacttgagtgattgagatcgacccaccttagttttggtgcatcctgtgatggaaaggatccagcgacttaagttagtttaagccatgaacttactatgttaggccaaaaacaacgaagcaatcaagttttttatctagatacgcaccttctcttctctccaaatctgtctaatcttactgtaagggagcttaagatctacgagattcttggggatgaaatcttgtggaagttcatctttggggaaatttagccaatgcaaacatcggacctcttcaagtggaagctcaagttctccagggatgtgtatgttttccttaggcgtacattcctgaggacaatgagaactgtaaaacttgaggtaccggagatttcgcatgttcttgaggtagtcagtgcctaaggtcacgtccgtcttcatgacatacatatcgaggaaaaaacttctcacactggtgctgcctccctgtatacaccacaatgtcaacaaagagaagaagataaataaatgaaagctctagctggaccaataaatgtaagtgttttgggaatgtagtctcactggtctttttagcagcctattgagcctgcctttattatcttggttgtgatgatg

SEQ ID NO: 17282 - DNA, 2184 bp, Arabidopsis thaliana landsberg
gttaaaacactcctccgattgatctgtacaagtctttcttttattgatatctcatctatattattctcttataccaatcatattttttgtgaatagttacagattcatagaatatgtatgatataaggatgagagttttgatttgaactctttttcttctacaactttaaataaaacacattggaaatgagtcttaactatactaacaccgcagacaaaactagtaccacctaacacaaacgctgtcgttttcaagctacatttatatatctcccaccaactctttctcagatcttttgtctaagtaaaagcgaaaagggcaacaaacaaaaataaactcggagaatctcacaacaatcatggcggctacgacgaactctttccttgtcggaagcaacaacactcagattcctgctttgaaacccaaatcatcatctcaatcctttcttcacctcagcaaaccaaacaccgtcaacttcgccagcaaaaccaagcccgtcgctgttagatgcgtcgcttcaacgactcaagttcaagatggagttagatccggctccgtcggatcccaagaacgtgtcttcaacttcgcggcgggtccagccactttgcctgagaacgttctcctaaaagctcaggcggatctatacaactggcgtggatctggcatgagtgtgatggagatgagtcacagaggcaaagagtttctctcgattatacaaaaagctgaatcggatcttcgtcagcttctcgagattcctcaggaatattccgttttgttcttacaaggtggtgccactactcaattcgctgctttacctctcaatctctgcaaatcggatgatacagtcgatttcgttgttactggttcgtggggtgataaagctgtcaaggaagcgaagaagtattgcaagactaatgtgatttggtctgggaaatctgagaaatacacaaaggttccatcttttgaggagttggagcaaactccggacgctaagtatttgcatatatgcgccaatgagactattcatggagttgagtttaaagattaccctgttcctaaaaatgggttcttggttgctgatatgtcttctaacttctgttcgaaacctgttgatgtatctaagtttggtgtgatttacggtggtgcacagaagaacgttggtccatctggtgtcacaattgtgatcattcgtaaagatttgattgggaatgctcaagatattactcctgtgatgcttgattacaagattcatgatgagaacagctcgttgtataacacgccaccgtgtttcgggatttatatgtgtggtcttgtgtttgatgatttgttggagcaaggtggtctgaaagaagtggagaagaaaaatcagaggaaagctgagttgttgtacaatgccattgatgagagtagagggtttttcaggtgtcctgttgagaagtctgtgaggtctttgatgaatgttccttttacgttggagaaaccggagttggaagctgagtttattaaagaagctgctaaggagaagatggtgcagcttaagggacatagatcagtgggaggtatgagagcttctatttacaatgcgatgccattggctggtgtcgaaaagcttgttgctttcatgaaagattttcaggcaaggcatgcttgattcttttttgttttctagtcatcttgttgtttattatgtaagctttgatgcttatgattttgagttttcgttccttcttccggtacttgaattgcgattgtctgcggaattttttcagtaataataatttgagataatagatttcattttcaagcaagaatcatttacacttttatgtttgtctgagactcttgagttgagactgaaaacttccagtgaacaaaatcttttattagacaacttattgaggaaatgctgagattagcttatgatgataagcaagagcatacaagaattagcttatgatggtaagcaatttgcatacaaagatctcatgatgtgctgttagtgtgtcctttctctgtatctcctgctgaaagtgatggtcctgttttcaagacacgtaaataggtaattcagattcaaatctttcagtaaaactgtaatttcagattcttcatagcagagttcattgtgagtgtgcaagttaccgttagattgtgcccctttgtaaccatcagcaacatgcgaa

SEQ ID NO: 17283 - DNA, 651 bp, Arabidopsis thaliana landsberg
tccatggtttcttgttttaggttctttgttctactgaaggaagacaactaaacgctactggagtgtctttcttgtgtttagtccggtcatctattcattaccaacaatctcccaaggaccgagaggttccagagactgacaaatctccttgttccattcgttcgagagaacaaaaatctctttttctttattagagaaaggaagaacattattaagaaaaatctagatacatatataactagcctattagattattagaagagtaaaagtcggtgtctataagtattaaacagtattttttgccaaggatctatatatgatcttccaatgtcatgaagaagagagagtctgctagatttaaggacttatggaaaccggtacaagcattgacaacaatggctatgaaggaatcaagaacggttcatggtttatccagttccgtaatggctgcaatccatggatggctagatatgtgtacggcctaatattcctcttggcaaatctgcttgcttgggccttgcgtgattatggccgaggcgccttgaccgaaatgagaagtatgggtacctaagtctctaggatttcttacaatatttttttcagaaaattgattgattttaagtttattcattggtgcagaattcaagaatt

SEQ ID NO: 17284 - DNA, 5637 bp, Arabidopsis thaliana landsberg
ggcttcgccgagtgcctctaccaatcacagggtcataccacttatacttaaaaagtgtgattttcaaattgacgatgccctcatactgaagttctatgatatcatataaggtaccgtagaaatccgcttcatcagatgaatccacgtaattttctcttttaacacataccccatagttacatgtttttcgtctaacgtcatgatttttcgtatgaaacaaatatcctcgtgtgaaatacattggccaagttttaaccttgttcaaaggcccatgcacaatctcttgaacccaagtaggaaatggaaaagtagggttccaatatgttacctacataataaataaacaataacaatatcaacataatttaaatgatcacttttaaaaattactaaaatgatgtagacttacatattctttaacccataaatgatattcttcagctcttctcgcgtagagttctttttcgggcaagcatggatatttcgcagaaagacaatcctcgaacatactatatttacaaacaaagaaaataaatcaaagtgatcttagtgaaaatttacaaacgaattaatagtgattaaaaatacctctcaaatggtttaaaatagtcacaatttcttaaaacatatgcatgtgcgctttggtagtctttctctgaaagccattctacatgcatttcaccacttggacgaccgacgtgcataaatatgttaggtactccacggacatgatatacaggaactttactttcatcgaatcttgttatcctgattcaggtaattgaatgaagatcgaagtatagaaaatagttgaataaataaatgtatttaccttgattttgtttgtatatgatcggcaaaatagtgctctaaaaagtaagaaatctcgtcattgatataagactcaacaattgagcctgcagcatatcttttgttctttgcttttccttttaactttttgaaaaacctctcaaatgggtacatccacctatattggacagggccactgaattcagcttcgtgtggaagatcgataggtaagtgttccataacatcaaaaaatgatggtggaaaaatcttttccaagttacagatgattaaaactatgttctctttgagaatttgaacgcgacttgtctgtaaagttctcgaacataggtcccggaaaaatgttccaattcctgaaatatatgtgcaagttaaataattagataaaaaaatgttggcaaataaaatagtaagtattatacctgataaggcaaggtggacattccggtcaaggagatcaacaaagataaatggaagtagtcgctccataaaaacaagacaatcatgactcttcatgcctgaaaactttccattctccagatctacacaactagccaaatcgctagaataacaatctgaaaatctaacatcatgtttgacacattgaaataaactctgtttggcttcgtctgttaatcaatacgctggagatggagccttaccattactatcaatatgtaagtctggccgtgaacaaaatttctcaatatccattcttgacatgatattgtcttttgatttacccttaacacgcaagagagtgttcatgatgttgtcaagaaaattcttctctatatgcatcacatcaatattatgtcgaagattgaggtccttccagtaagacaactcccacaagatgctttccttgtgccaattatgttccttcccatagcctcgcatcttcttttcatgaccgttcccaccaacatccttcgtttttggtggatttacactagctaaccgctcgtaataaacttgctcccttgtcaaagactcgggtggatactcgctagaagcatctcttcctttcaaaaagtcttttctattcctacgggatggatgaccatgaggaagaaatctacggtgacaatcaaaccaacgtgtcttccgtccattgggtaaataaaaagactttgtactttccatgcaaactggacaagacaaattaccatgagtagtccatcctgataacatgctatacgccggaaagtcgctaatcgtccacagtagtactgcttttagattaaaattctgacttaatgaaacatcgtacgcatcaactccagtagaccacaactcttttaactcctcaataagaggttggaggaacacatcaagacaacctcgagaatgatttggtccagaattcaaaatggtaagaaataagtactctgtattcatgcacatacaagggggtaaattatatggagtcaggatcacaagccacaacgaatgattacgagacatcccaaatagattaaacccatcagtacacaacccgagataaacgttacggggttctttggcaaaccggggatgtaactcttggaaatatctccactccgctgcatctgaaggatgattcatttctccctcctttgattggtgctcaacatgccatcgcattgccgcaactgtcttatggctctgatacattctcttcaaccggtctccaataggtagataccacatatgactatatggtactttggttcttcgacggtcgtccttaggcttccatctttgtgcgccacaaaatcgacattgatcttctttttcgtcttctttccaaaatagcatacaattgttctgacaaacatcaatcgtatgatatggaagtcctaaattgtgcatcaacttctcggtctggtaatgtgaagtggtagcctggtttccttctggtaaaaaatctgtaaacatttcgcaaacggagtccaccaacttttcactcatattatactccgccttgttttgcaagagtctagatgctaaggataattgcgactgcccttcacgacaaccatcgtacaaaggattatttgcaccttctaacatgtcgtacaacttatttgaatggttacgaaccggttcttccacattctgataactatcatcatgacgatagttatcatcatatcccacgttaaaattaaatgcatcgttcaccatatccacatatggatcttctacaatattatccacttcttcatgattctcactaaaatacgtcctattcgtgtaactcgttcctatatccatattcatttcttctccatgcttataccaaacataataatcaggaataaatcaatgactaaacaaatgactactaactcttctacccgagatgatgtgtttttcattcttgcatacactacaaggacaatgaaatttacctcgactactctgtactattggctgactattagcgaatatcatgaattgctcaactcctgcgacgtattcggctgacaaattccccgtcactttatcaaatctcttgtacatccaatctcgatagaaaccgccactaccgccataattgtagtttcccgccattatagaataaactaaatttctattgttttctttttttttcttttgattgttgttttgatttgtttgtgaaagaagagtgtcgtgaattttgattatatagccgatatttatgactaatttacgactacaacaaacaaattaggtgtacctacttggcaatgcggaaaacgttttccaacaacttaatgcgactattctgtgactcagttgcgacaattttacgatttcagacatgtgtcgtattttagtcgccgattgggcgactaacttccgcagtcggaaactgtagtcgtccatttgcgactatgtaacgacaaacgtttttcttatataatataatcgttaaataatcgttactatacgagtatttgtcgactaacatatttagtcgtaaaataacgactaattgactactaatgttcatgttgtcgtatatgcgtcgtaaaacggtcgtgacgtagtcgccaaaaacgacgactacatctgttgtcgctttctgtagtcgttgtttgtctgttttcttgtagtgtataaactgcctcttagggttttcccgagggcatccgctattatccgttattatctcgcttttacattttcgcaactttgatagccgcagtgtttctcctgcaactttgtattttcactttcaagtatttgatattcagttttcgtttaagtctttcgtcatttctgttatcatgtttttaatcgttgctttgctattcaattattcaatcaagttctacttaccttctctagatctagtattaagaacaattaaagatgaagaattctacagataacctagcagaggggcgatttaataaaccatatgaatccctaatgagaaaccctaaacctaacaagtggattactcagacatgatcaaagaaacacaaatcatagtctgaataagaaatcaataatagcaagagaaagagtaaagaagattttctccaaaggcagtctccacagggttttgctcccaaagtacaaaagagatgaggagaatagtctttccaagcttaggtctaaacaatgaccgtaaaaactatatatatgacctaaaacacgtgatgggccttctttagaaataggagaaagttctcggccaaatttggaaatcttcaaaacatcaataagttgcgtctcgaaattgccgtcaggtattggtgtcgctcgacaccaggggtggtgtcgttcgacacctacgtgcattttcgtctccggatttcttcagcagcttaacttgtcttttaacctccagaatactcaataatctcaaaatgcatcccaaacatgtaaaaacctgaaaaggactagaaaagactctagaaataacaattagactctaaaacctatacctaaaacatagttaaaaacagtaaaaatagagatatatcaacttcccgaaacttagcttttgcttgccctcaagcaaaacacaaaagccgaacccgtggaagaggtttgaaaacaaaggaactcccaacattctttagcttattgccatgatcatttaaactaagtccatatgcctaacaagtctaatcaaatcctaaccaacatgttcctgtagccaaccttaacaaaaacatcttcaatgataccttcagggattcgcttggagcgatccgcgaaaaggagagtgatgcgagtaggtctgtagtgagtcatgcctagtctctcaacaacagacttgggcatgaggttgatgcttgatcccagatcacacaaagagcggctgaatctgcttgtggagatagagcaatcaaggacaaagctacctggatccggaagcttcgcagtggtctgaccaggagtaatggtgcggatgtactcagctatgtctactctctatgccttctccttcttggccttaggcagcatgattgcactgatgtgtctagtaagcagcttagcttcatctgaactttttccattgtcaacaagtcgcttgacatacctgttgagtgaggcggaagatgtctctgaagcatccttaggaagagtatggaggatcttctccattatggctgtgcacttagcagcgtgaatctcctgcttagaatgacgcctcctccgataggggacaggaggagtgtaaacgggctcgggctacataggtacttgcacctcacaaggtgcagtccacatccagtgtcgattgacactagaggggtatcgatcgacaccgtcatattgagtcgtttctgagaaaagagtcccgtatggtgtcgatcgaca

SEQ ID NO: 17285 - DNA, 1606 bp, Arabidopsis thaliana landsberg
gacccatgaatctgagagagaacgtagaacccactggtaaagacggtcgggacgttacataaagtgacttgttctttataagataaaagattttaccatttattttctagagaattttggtccaacatatatatttgttgacttactcattttgttgcgtttataatatcttttcagtatgctgtacattatctttattctaaaaattataaaaattcgaaaacgcgttccaaccagttcgatcagttgacaaatttaaagtatttgcaactatattcattatatttgtttctctctctagctcttgattcttcctacaaaactaccacttgtaactcctaaagattctaatggattgcttgctgaaaatacagccacgagacgctcaagatcatcaaagatgaacttttaaaactcgcgagtgtcttgtttctgtgtttgttatttctattggagtggtcgtggagtgtcaagtggtataggcatcacacatttgaacaagtggtattaagcgttagttattgctatcaaatatcaatcatgaaaagagaaagaagattatgaaatcgatcaaaatttaatctaacaggagagaataggtcgaaaggttcagcttgaagcgtaagatacatatcttaatatgtcattgactttcccaaattagatcaagttgacacaattttttttttttttttttttgttaaggccggttaggtttacaactattattacatgaaggagctctccctgaattactgcctgatgcaccgatgatctcccttaatagtgtttgatcccaaacttcttttaaaattttcttccctaaaaacaaaacaactattagctaatcaatttgaagaagagaaataaaacaactggtaaattgtgaaacatagaaccaaaaccaaaagatcaacgtatgaacaaaattgaagaatacttggtttgcgtttcaaattttgaactactacaaaacccaaatcgtatcaaaaaaatacttactttggcttggagattcatattgtactcgggctaataccgtatttgataatccagataacaaaagaaaactcaaagttagtatacaaagcgtgagtttgtacatattttagatttcatgcatatatgtagatatatgaagtcacgttacgtgttacgtgttcatttttctgttttggtcaaacacatcttcatttctttgttccccacaagtatttataataactaaaattaagctttgcccaaaaaaaaaaaatctaaaattaagctagttttcatataatagaaaaccgtaattgacttgaaaatgtatgaagtcttctgaattggtccaatctaattttagttattacacgacaagaaaattcttcagcgcaaaccatatgctatcttatatcttatgtaatacacaacaaattcataaatagtatgtttgcggcagctatagtaggtatcactcttatgataacattgtttagtaagctatggtatattttgatacgatagcaacgatagaacgctattatagtattttgatttaacacctttaatttttggtataaaatactaatgtttctaatttcgtatcataatatctttacctaac

SEQ ID NO: 17286 - DNA, 1613 bp, Arabidopsis thaliana landsberg
gacaaagccaggttcgactccacctcggctgcttgaccttccagctttgtgttctccttcttggcgacccacttttgggtgatcgcagccagcaacctcgaatatgcggtggccagtccaaccttagcatcgtgaaccatcttcttcgctccttacgcagtcgaactcaggtccatcacccttttggagagctcctccctcctctgcgccaagtgatgaatctggtttctcgccatctgcttgttaccctacaatccccaaatttccatctccatgagcccgattttctcagcataacctttctcgagatctttcaaagtggacagctccattttcaacatctcgatctccgcctgaaaccataataacttcagaatcaccgtatcatcgataaaatatatacaaacaagtcataacagaggcatacatggaacgaaacctcaagctcttgaccagccttcacactcgttgttagctcctggatgagggtcttcccttctttgagctcgctcgccgagggaaccttgctcagacgttgctcatagagagcaacctgcttgttcgtggcagctatcgcctgccaaaggcaaaacggagattagaactggcataagaatggaatttgaaggaggcagttatcgattgttacctggccctccttcgccatcatgtcagcaaaagccgcagcctcggccatgttcttcactccgggaatctggctgttcttccctttgatgtggcgtagcaggttcgccaacccagcctcgtcctcaacgataggatgatcacagtcgtgagtgtaagaccagtggaaaggcctacttcccgcagaccccccaccagaattggacgactgtctcacttcctgagaccgagtcgaaccttggaaggaggacctgccccaacctcttgatcctcggcctccgccttgggacctacactaaggacaagtgctcaatcttcttcttcttctcatcagcagctagggatttctcagcttcacgcaaagcaatctcatattcacgcctctgattgtaagaggcctgctcttctatcttgcgttgagcttcgagtaattgttcttgcaaagccacaaaagaagttgagtcacctacttgcttccgcttgccattgacaagagactctttgaggcttcctactccataaggaacgcctctcgaatccctctcagtggactacaaagtatgataaaagctgagattagagaatgaaaaagataactcgaaaacactaaattgggaacataaaacgttacctcaagaaatatggttgtacattcctcagctgtgagctcccgtgcccgcgaagtgccatctgaaacagcagaagcttcagcctcgagctcagactgcctcagttgcaaattcttctaatataactctgcaatcttctccgcctttcgatcaacatacgtcccatcaggttttgtatgtgttttgatgaaaacgtcaccaatactgacagttttgcctaattgctcttcctgtaatgaaaaaaaaaaacaagtcatagaaaagtagagaaacatcagattaaagttgcaaaggagtaaacagagagaagacttaccaattcatctcggatttgatgat

SEQ ID NO: 17287 - DNA, 1754 bp, Arabidopsis thaliana landsberg
tgtttaaaactgcgtgtccacgtgcttacagctacgcttacgatgatcagagtagtaccttcacatgtgctgaatctcctaattacgttatcacgttatgccctactcctaacaccaggtgattattccatttatacccttttataactattaacacaccttgcctatgagggtagttttgtcaatatagaatgtatcttcttcactgttgcaccaaattagcatggatagtagtttatgattatggttattttcgtcaattactgcagacgccatatttactaaccattaattaccttttgcttaccgtgcaattgaagtaacgcttaattatagctagaaataaattactccgaatctatagaattttgctttatactgcaaaaagaaaaatttgtttatttacgattttttttctttttttcttatcaatttgtttgatagtcccaatttaccctcgaatatgaagatagatttattgggatgtggatcgttaacggctcatcgagatatttttttatatgatctctaatctcgaggggacgcgtggcagaatcacgtacacatttactaagcggctatgtttttttttgtttgttgcagtcaaaaatcatctcaagatcagagcccagatcccaaaccgacgacaccaaccgggacgtcgtcgacaactcctgccggagatagtagtacgacgtggtcaccggtagatacatcaatgatatacgaaggagctttggatcaaaacaaaggatcaccgtccacgtgtcatctttcgttatgtggaatcacagtcacacttgcgctggccttttgtcggatgtggcggctcttttgacacctaactttgtctcccgcgtaaaacactgaagaatgtgggccctcactgacgaaagccttatctcgttccggcccatgtgaaccggttattcccgaacgacgtcggattgggtcagagttgagaaaaaaagttaacaacaccctacagttacgaaaatatccttcattcatgttcatgggagaattcttaatttgggtgaggaacacgtgggcaagaaagtgggctgctggtggagttcataaaagatgggaatgtttaattgtaaggtcagaatatttatttgatttataatgtaactaggattagaagaatattatgtacactatataaagcagtaatctatttagtttaaagctatatattggaaactattggtgggaatatttcatttaattgttatctgctgatgctgcgttggccattcggaacattgaaatgaataatactaatattcatttcatggtcttgtcccaactactgtatttaataataatttgactttacaagccgcatatgagagccataagaaattctctattataagtttcaaaagttaaatggacctacacagtaatagtgataccactagctgaaaaaagattaaagagataatcttaattaagtgtgagttgatgacgatgcctttgatttacagtgggagtaaacctataaatataaaccaagtgtctgtttcactgcatatgatttgccaaaaaaatatcataagattaaagccatcatggaatatgatgaagacatgccataatatctcataggaaacacaccactattcaaattagaagaactcttaatagttaataccaagatgggtctaatactggagcccattactgattttagaggcccgttagaaacaattactaagtccaaagagcatttatttttgagtacg

SEQ ID NO: 17288 - DNA, 1097 bp, Arabidopsis thaliana landsberg
cttacatctttagttgacggagttgtaatgaaccatggacaaacagaattagcccttatattatcactctcccactcgcatgctaaatttctcgccagctgattcatggctcctagaatgcgtatacatttatttaagtcgcgatagaagcaaagaatcataaattgttcgagtatgcgtataattatacctttggttgctccatagattgatgtattacccaaatttacaactccagccacggaagacatgagcacaatgttccctgaaccagaggctttcaataaaggatgcgcgagttgcgagaaatggaaagttgactccagatttgtagctattataaatgagaactcttctgctgtacactcagtcgtcggctttagtacacctattcccacattgggtacctatacaaacgaagcaaacaaaattcaacatgattttggtcattgtggatccaagctcatagacgaggaggaggagaagcttatatatatacacacacacacttacgaggatgctgagttttccttggaagagagaggaaacagtttccatgagtttctctcgctggtcacgagaagaaacatcgcaaacagaagtggtgacctgaaatccttttgcttgccattcacgtaagctttcttgaagctgagtttcgtctctggcacatgtgtggacttttgctcccaacatggctagttcctccaccacagcttccctattcatgacacacacaaacggagttagttcttccataactaaacatgacaatacaataaaagagcatagaaaatgggagtcaagattcacaatggggactgacccgatgcctttagagccaccagtgacaagagcggtcatgcctccaagactccatcttgagttctctcccaagcccccttcctttgccattccttgttaattatcaacctacgacgattcttttcttcaaccaagatcacagatcttatatagaattgatcaagactagttgtgatagttttgaactttgaaacctcgctcaattcaaaattccacattatgataatgactgctcgaccacacatatccgtgagaggggtagacgtagtacg

SEQ ID NO: 17289 - DNA, 1332 bp, Arabidopsis thaliana landsberg
atttattcaaatatttattaataatatttaaattttaaatagtaatccacagacttttttagtatttaatttaataatttttgtatttaataaaatttcaatcataaccattcaagtttacaatatattttaattatttttttatcataataaacaatattttaattatatattttttaattattctatatattccatatttcttttttgataatgtgtatagaacaaaagcctcgtatgatttattaacatacaaatacactcgaacactttgtcgaaaaaaatctcatgtgtatcttctaacaatatcagacttgtaatcatctgacaaacatcaaataaatgtagaataagcggtaactaaaacacatagtttgctaatccattcactatgcgattagttttcctatacacatgagtaatctgaactatttggtctctatacactccatcttatttttaattctataaactacatcttattgttagttttccattttagttaagaaaattaaaaattaactatatatataatataaattaatatttgtaaatatgtttcttttttagtttcctttattttatttaaggaaaaaagtggaagaaaaaaaatctaacacatgtcaaaatcttagattgataaaactgccacgtgtcatgatcttatgagttagtaactttcaaaaccatactttatataataagatatcacatgttgtttttttcttgttttttttttaaatataatcatatgttgttttcattatcaaagttcttttgtgatctatataatggattttgttactttacaaactcaacatctccaagaggttttggaatggttcgacgatcactcttacaatcaattctagatccaaatcgaatgggcctaaacccataatgggcctagaatcaaatatttcactcaaaacccaataacaagaaaccagagacctcctctgtttccgaatgatcaaatcagcaatttagaaacaaaaatggccgccaacttaaaaaccctaaaaatctcaaatttccccggtagatgaacacgttcttcaaactcggaagcttaatccaacgcactgcttctcaaatctcttcttctttcccaaaatctcgtttcttctccgatggagaaagtgctgtttatcaccatgcgcgtttgttcaagaaaccactatctaccaagcttaaattcaatcttgtgaactccgtgagtcttatgggtttcgttgatcgatctattcaagtcatgaacaccggacctgataagttcggtgttttcactattcttagaggccaagaccctctcaatcaaaccggagcttt

SEQ ID NO: 17290 - DNA, 1184 bp, Arabidopsis thaliana landsberg
cgactctagaggatcccccacaaaaatcatgtgattggaagctacatgtctcacatttgcaaggattatcatgtatttttgtcccacacatgttgcactttccttcttcctcaagctcactcatgtggattagtctcatcacatgaatatgactgaagctattaacctggagtatatatttgaaacaattttaggtgaagacattgtttgactagtgtactgattatattaaaaaggcataccagtaacctatcttcaaattcaatggtttcaagatgttgggattttgtgttgcctttgctgcaagagtacaaatctttcaagtacattggggaaggcacttcctgttggtattgagtacgaagagtattagctcatatcattttcgtcaacggatatcatcatcattattagaaaacacagagatgtaataaaatatgaattacctcacgtagaatgcattcagtgtgaccaagaaaatcacattcttcacaagaatatgcaggatatcctgaaattaccatcgtctcacaaacaccacaatactccaaaaaattatcttcggtttcgactcttttatgtctaagttgatggatgtgaaaagatttcttgaccaaatattcaggtatttgtagacacttgatatgacatctcaaatcacattcgacgcagaaataaaagaatttttcatagagcacggttttcttgcatattaggcatgggcattttattctataatcaacaggaccaggagtaatttctacatataacagcctgtgttcatgagacttgcacaacaaaccccgcaacaaggcatctgcacatctcagatgaaggtagaaatcacattctaagcaaccaaacggtacaccaacaaatatgtcttcacaggcattacaagatttctgaccgtcaaaagtttgtatataatcaaggcgtttgagagggtgcataggatgcacgggatgttgaatctctgtcggaagatcaaggcaacgctcgtgtaaaaacaagtaacagtgaacgcaaccgtaacatgttgaagtgaaagaagaaggttgctacaggagaaggcaagagcctctggaatctggacccggccgacacctttaagctggtgttcatggctgtaatggagcatttctttggctttccaacctgtggcgatgctctttggagtgcac

SEQ ID NO: 17291 - DNA, 1730 bp, Arabidopsis thaliana landsberg
gggcttgtgagtttccttagtgagattttggttggtcctcaaggacttcttgttcttgtttctcaacaacaagttaattagctaagaattgaatcattttgttctcattatagagaagtctccttgtagcatacaatgttcctacattactcgcaaatatgattgtttggctctaacattcttcttgcgtcataccgatcactattcattaggctgttcgtttcgtcgccgcaggtagttgcggctgcggcagacgcatatgaaattgttcgttttgttgccgccagtacttgcggtaagacgcggcggcaaacacagcattttgcggtgaataattttaatcgccgattaaatccagcatccgcttatccaaaacctgtgattaataataaaattaaaatgacataaatacccttaacacatttaggaaatcacaagagaacctaatacacatcaccatctaaaaccttactcttctctctttaacgcgatttcgatctgaagaagagatgggataacaaagtaagcttggtgattttgaagtaatgggtttagtttttgaagttctcttcttgacccttaagagcttttgaagttctctgtttgaatcgtcttcttcgatttcacttgcggcagcggcgacgaaacgaacatatgcacctgcggcaatggcagcggtagagtttgctaccgccgctgccgcctgcggtgatgaaacgaacagactaaaataatcgagtcgagattcttcaaagctatatattgatgacaaagttatttgtaagaaaatagaagaaccccagttgcgactttgaagagctattcatctagcgaacggacaccgtatgaagaaaattgcatcgaaaactaaaagataacactaatgtgtacaattgtcccacaaaatatacaacccaatatgtaaacttatttatccctccaagaccttgtagtcttggtgttatcaagacaagctatgttatatcgataagaagagattctagtttgcgaagaaagtgagcggattttttattattattatccatgaatcaacaaatacaatgaagacttgagaccaatacactaggatattggactaacgtagcaccaactagtgatccatatcaagtttcaaactagactcaagattgaggaaaaattcttatagggagacctttgtctggtattggtaagggatcaacaactattttattttcatttggaaacactttttcccacttaaatctattaacaagattgtgcataaatataagaatctctagacgagcatactctttccctggacatatcctggatcctcctccaaagggaacatatgtataaggcttcggaccacttccttcaaatcggcttggctcaaatttctctggttccggaaagtattctggattcttatgcgtagcggtggcactccaatataactaaatatgtttatgatcagcacatatgtatttaaagtatgagcatgatgatatgaatgtaaatatcttcaaatggttttgattatgtactcgtaccttccatcctttggggatgtaaaaacccttaaaagagaagtgatcgatggcctcacgaaaagtgccagcaagaggaggaacaattctcatcacttcacatgcaacattccatgaatatctcattttctcaatgtcctcccacgttaattttttcgttacgtctttgttggttagtatctccttttgctctgc

SEQ ID NO: 17292 - DNA, 589 bp, Arabidopsis thaliana landsberg
  unsure (1)..(589): unsure at all n locations
ctagtctatattgaacatcatgatgacatgatctatttggttaagtcatgctcttttcttatttaattgttgntgataaagactagatttgtttattgttgattggagtctaaaactcggttttctcaatttgttttgcagagagaatcaaacagcttaagggcagtttcttagttaaaagtaaccaagtttacatggttgagctagacattcagattccatcagcatacgatccatttgcagaagctaaagattcagatgcaccaggagctaaagagaacattcacatccgaatccagcagaggaatgggaaaaagagcttgacgactgttcaagggcttaagaaagagtacagctacgagaggattctcaaggatttgaagaaagatttctgctgcaacggtaacgttgtgcaggacaaagaactaggcaagatcattcagcttcaaagtgatcaaaggaagaaagtgtctcagttcttggtccaaactgggattgctaagaaggatcagatcaagatccacggtttttaaactgaacccgaattggatcgtttgatatatctatactatctatgccaaataattgg

SEQ ID NO: 17293 - DNA, 1340 bp, Arabidopsis thaliana landsberg
  unsure (1)..(1340): unsure at all n locations
tattcgtagtagtagtccattggagttgaaggtgtgaattcaacgaggctgagctgtgataaactaatccaccaaattgcgccagttaagtttaaggcacagatttgtcccctgtgaagtataatgtccatgaaatcttcatcttggtttctgatttttgtccgaattctactttcgtctccactcttgcagcaccattaaattagataagcattcccttgtatgaagattaataactaattgtttcggttacagttttgcactgaatctatacaatactttggatttctgaaaagccagtttccaatttagatttcctggaccggtttaactatagttttagtcttttagacaagatcataacaaaaccgaaccgttatatatagtaaagtactcagtaaacaaaaaatgcatctttcttcttcctcttcataaacaaaactaaacatgataattgcattatcccgtacatgatttctttctatgtatatagcagtagtggaagttattggcttcagatcaatggccctttactgtgtctgattgcttcaaaacgtgcagccaaaatatcatagtcaggcagttttgggtgaacctggtgaccgctcgagtcccgtctggactcaccggactgaggagcctgaggcggtgctcggtttggcgggagagaagaaacacgaccctgtgatggttcatctggctctgtctcttcctcgtagtagnnnnnnnnnnnnnnnnnnnnnnnnnnnnnnnnnnnnnnnnnnnnnnnnnnagagttgtagctgtgtctcctcctcattgtttcttttgcttctgcttcggtattggtatactcttcctcgtagtcagattcattaatacccggattgttgtagctgtgtctcctacccattcctctgttttctgcaccaggttttgcgtaataggaacttgtttcggagtctcgtgattgtcttcttgaacctggatgatgatgatgatgatccatgtactgtgaatccttctggtgtgttgaatgatcagaagatacagagaactccttgttgctgctgtctcttctggtagctaataaggaggctacttgtgctgctgcaactgcctgtttggctaattctgtagctgttccgctgctgactcggtgtcatgataatgcgtgttgatgctcatgctactagtcgatctgatgagcaaaacaacaataagacttcattgtttcagatcccttatttcaagctaacgactggaatggatacataccttggcactgctttggtaggatcaataggctcgttgatagctgcacgattaactggtaagcttgaagcgctaacaaacttacg

SEQ ID NO: 17294 - DNA, 1250 bp, Arabidopsis thaliana landsberg
aattccttactaggcactacccccgactattcagtggccatatagtgttaccaagaacaagtagtctcatcacttgaatcagctattcagataatcaaaatgtaaagtgatcaaagtaaattcaaggtgaattaaaattactatcagaattagctgattatcatatcaaaatcaagtaatttaaagcaattccaagatagttcaagatcatacacgaactaatgaaaatttatatagcatcaataatcagagatacatcataaaaaaaaggaacagccttgttggatcttcagcaactagaaatctccattgtttatttctgcgaacgaatcttgttgatttcagatttagcgtaatcaagttgtttctgcgcagagattttcgctttctcggctgatgtgaggaagaagaggttaccgtttttctggtagatacttcgagaagaagagagactgctcaattcatctaacgaaacctcttgcctctttatctctttctcaagctcgaattcgcgatccgacgaagttgtagtcgccattttttccaccggtgcggcagcgactgcgacggaaactaaattttcttaggtttctagaaaaataaattaaaaagaaaaaattggtaaaagccagagtcccacatcggaaacaagtataagatgataggttttggtcgagtataaataaagcggctttgaggtgagaaaaatttatctttgcgcttggggcaatgacgcagctaatgaggttctaaccgaggcgcgtctattgctggttgaaaactatttccaaaccccctcctgggcctaagcttgtcttgggccttcgagaatttctggaagggctcccttcggggtaaagccctacaatctcccagttaaattttttattttgtataatgattagcttattgcctgttttacatttatcagtaatcatcttctattttgaagtctacattttgtccatgactaataaaccaattaagtactaatgttatcagaacttggtgcaccgatgtaccgatttatgcaaaaacaagtttaaacagcttactgatttgttctaaaactcgaatgttaagctaacaataggtcattcttcgacattgttgtgatacttcctaacacagaaattctgtcaaataaagtacaaatatcaatagtccaaaaactttgtttttatccgagtttgaagaggcttcaaacaaacaaacaaatggccaagaatagaaaatgaagctgagtttga

SEQ ID NO: 17295 - DNA, 658 bp, Arabidopsis thaliana landsberg
ttgagtatcacacagactgagtaaaaagtatctacacacaaggaatacaatataaacaccatagggtcaccaacgtatcttcaaactgagcaattttaactttctcgttttgccagaaaactcataacatgtcaaaattatttgaattctacgttacatatcttaaaactaattagacaaggtaagattatgcaagtcttgggggtaatagaactcttagaatgtgatcaaacaaaatataagcatatgcagacattaaccaagagatagcaagcaatacctaaacaaatatgtccattgctgtaaatatgtggatgtgaaggtgccggagaaacaaacactacctgctcaacacaacatggaaaactcagtcattatcctccacagtgctaataaacaaacataaaactataactacctccaatccaagagacaccaaaacacaaaacaacaacctttatcacaataagttcgaattaaaacgtgaaacatccataacaaagtatctctacagaagcaaacccaagaattttatcagtgagagacaccaaaaccagagacaaaactataactactagctacatcaaagagacaccaaaaccaacaaaagaacacactttgattcaaatcttacgaatcagagaaaaaaacaaaactt

SEQ ID NO: 17296 - DNA, 1612 bp, Arabidopsis thaliana landsberg
  unsure (1)..(1612): unsure at all n locations
aacgctaccaaagagtgagtcggatcgagtcgcaaccgaaacaattttcatttatattttaaacccagatcattcacactggccctaaccaataaagcgctacggaattagcaagcaattctccgaaagaacgacacgattagattacaacaaacaaatagaatgcatcatggtcataggagcgaaaccaagttcttaaagaaaaataagtggataaagccatccaggcataggttctatagaaatatggataaaaccgtccaggcacaaagtcttaagataaaagccgtcctaccacgaatatttactcaagctgatcgatcaggagaatgcctacggcaggcaagtacaatccagactgatcggtgacctccacctaatccgcaagagtctcgatcgatctattacctcgagggcttagaggagctggttcaggagcaggggctttgagctcttccttcagttcagatgtgagacgaacaaggttgacctctgcatcggcgaaatccttcagccactcctcgacctgttttttctcggtcgccaaagatctgccatcttcaagcgccttgatcatttgtggattagcccacgccttggggcaaatacataaactggtcgttagcatcctcgaagagcgacatcttctcctcggccaccctgaacttggcggtgaaggcctccgaagttctcaccttgcatgtttgcatagcccgagccactttcatgttcctaagtcctctcgcctcgggagaagtcgcctacaacgaacaacctcagagtccatcttcaggtcgcgctcgaccatcttgatggcatatttcttattgaccatagctatatttttaacctcttctgtcaacaataatgactcgatggcctgngagaacaccacgtcactcgcctgctcgacctctttcgccctggcgtcagcttcaaccaacttattaaccgcctccagattgttttgcattgccgagttataggactggaccatcccattcatctaaccaacggcctgaaacaaaaagacagacatccacgttcataatagctcagagaacgcgccaagtagctaaaatgattaaggcacttacccttagaaaatgtgacgccgtctcagcgtactttctagactccagtagagtatctgaagccggaagtaggctactcgcgcactttctgaggagattcgccgaagcagccttatcctcaaaaataggaggcttgtcctcccttttcgctgtcttcttcttcttcttcttcttcttccttttcttctccttggagtcgtcaacctgtggacgttttcccgaggccttgtcgccggtcggaatcgcgacgatcgcttgactagctacttcaaccggcggatctgtcagagataagccggtatcacccacctcagcaggctccaacgcagcaggcaaaacaacctcaagagtaacttcccaatccctggctgtatcgggatcgacattcacactctcggcagcatgtttctctttcgcgacacgcttctcctttgcggcaagcctcttcctctcataaacctcccttattgtaggtttgctagtgtgcatgtcgatgaagaattggggtcggtgatcta

SEQ ID NO: 17297 - DNA, 3094 bp, Arabidopsis thaliana landsberg
  unsure (1)..(3094): unsure at all n locations
catgtgtatatcacgttatcggataataatgagaatttttgtttaatttggaattgttcctcatacaatatatttctcttaccaaaaaaataatcgaatatattatggtttgtgatttatcttcttgagaaggagaaagtcaattttcctaataattatgtatggattttgatttgaacatatcgtactcgtgataattatttagatcctaatttgattaagataaattcgattatattatgttttaatctgattagatctattaaaatttaataagattaactttctcgataattaataattttaatttgattaagattatctaaattgtttataatttaattaaaatatatattggatatgtattacttatattttatttacattggatacaaatttaaatataaaattgagttataaaattaattcctcatctaatatcaagtaagttgatgtctctccaattttattaactgttaaaacttgaattgttgtatggcgggtctgccaaagcagcggtctgcaattgcttaaaagtgaaacagatggtaacggttaccatatgaaataaaattggtttacttgactaagctaacaaaacggttttgggcttagagacatagggttggataagacatgagatgtcatccacaaccaagaattatattggatataattagcaaagtgttgcttacctaaataactagatattcaggggtggagccaaaactcacttggattctagtaaaatatggatcttggatcattatactcttagaggaaatttggttggagtatagtattagttttcttaattattgagaattctaaaatttatgaacatcatattaatatctgcttttctttttcgacaattatgtcaacccctcaaagttcctattcagttcgagatgtccttgagaaggacaaattgaatgaatcaaaccctcctgaatacttggaagatctggagaagaagaaaacattcaagatttcttcttcgggtatctatgttatagaagtaaatgttactaaatctggttctactccttgggtattggatactggttgtggtgctcacatttgtgtaaatgtgcatggcctaaacaacagtagaactttggaggaaggacaagtgaacctacgtgtgtctaatggagcaaaagtctctgcattggccgtgggaacatatccgttgtctttaccttcaggcatggttttggagcttaagaactgctactatgttcctgctataaataagaatatcatctctgtttcatgtttggacatggaaggttttcacttttcgatcaagaacaaatgttgttcatttgatcgagatgatatgttttatggtagcgctccattagagaatgggctctatgttctaaaccaaagcatgccaatctataacattcgtaccaaaagatttaagtctaatgacttgaatccgacttttctctggcattgtcgtttgggccatataaacgagaaacgcattcaaaagcttcatagtgatggacttttgaactcatttgattatgaatcttatgagacatgtgaatcttgtttgttgggaaaaatgactaaagccccgtttactggacacagtgagagagctagtgacttattgggcctaatacatacagatgagtacaagtgctagaggaaactatcagtacttcattacatttactgatgacttcagtagatatggttatgtttatctaatgaaacataaatcggaatcctttgaaaagttcaaggagttccagaatgaagtacaaaatcaacttggcaaatcgatcaaagctctgcgatcagatcgtggaggagaatatttgagccaagtttttagtgattatctcagagagtgtggaattgtttcacagctcactcctccggaaacaccacagtggaatggtgtatctgaaaggaaatcgaactttattggatatggttcgatcaatgatgagtcacacagatcttccaccatccttttggggatatgctctagaaacgtctgcgtttatgctcaacagatgtccatcaaaatcagttgagaagacaccatatgagatatggactggaaaggttcctaatttgtcttttctgaaaatttggggttgtgaagcttatgtcaaacgattgattactgataagcttggacccaaatctgataagtgctacttcgcaggttatccgaaagagaccaaaggttaatacttttaccaccctactgacaacaaagtgtttgttgctcgaaatggtgcctttttggaaagagagtttctttcaaaaggaactagtgggagtaaagtattactcgaagaagttcgagaaccacatggtgacgttccaacttctcaggaagaacatagattggatctacgaagagtcgtagaacctatacatgtggaacctgaggtacgtaggtccgaaaggagccgtcacgaacccgatagattcggagattgggtgatggacgatcatgctctatttatgatagagagtgatgaacctacgtcatacgaagaagcgttgatgggccctgattccgataagtgattagaggccgcgaaatccgaaatggaatccatgtcacaaaataaagtatggactttggttgatttacctgatggtgtaaaatccatagagtgtaaatggatattcaagaagaaaattgacaaggatggtaatatacagatatacaaagctagactggttgcgaaaggttacaatcaagttcatggtattgactattatgaaacctattctccagtcgcaatgcttaagtccattcggattctcctagcaactgctgctcattatgattatgagatttgacaaatggatgtgaaaacagctttccttaatggaaatctcgaagaggatgtgtacatgacacaacctgaagnnnnnnnnnnnnnnnnnnnnnnnnnnnnnnnnnnnnngcttcatcgttctatttatggattgaagcaagcatctcggagttggaatcttcgttttaatgaggcaataaagagtttgatttcattagaacgaagaagattttgtgtttacaagagactagtggagcatagtccatttt

SEQ ID NO: 17298 - DNA, 704 bp, Arabidopsis thaliana landsberg
atctctcggtctttaaatgccacgatttccttgattgcaaagtgaaaacgtaaatgactgagaaattttctacgaacgtctgagccgtggaagctcgggaagacatgatatttcctaacgtgggtcgaagaagaagccattagagatagggtaaagagaacttgaagaatatatcggagcgttgcattgactttgaaaggagttctaatgcagttatccaaacactaaatagatcgaggagaaactctcttagagatttgaatgctgattggttgattttttaagtcttcgtatgatggaacttcctcatcgccgtggcctccactacacataataaaaaaccaaaacacattatcagatattcttttgcaggtcacaatgaaacagcgatacgatattaaaaaagatgatagagagagagagagacttttctcttcttctgttgtttcttagaaaagcaatctatgggattcatgaaacaattgtgagtgcttgatattaataacattataaatcttgcaaatgggttttctgaaatatagcagacttaatcaattgacttgggtatttattatctctttctactagtataacaaaacctaatcagaatgtatgtcttttcaatagttgcataaaatatattcttaatgactagacaactattctaacagtcaaagagaggatagacgagggagcaagctcaa

SEQ ID NO: 17299 - DNA, 1138 bp, Arabidopsis thaliana landsberg
atacgcaatgctcttcttgagtcttgactctgatccaatgttaagaaaacatttcagcttccaaaacgggtcggtgaccctggaactagttgcgccgttgccttcatcaaaagccttcatgaactcttccccttctttgctaaacccatctagacatcctaactccacaccgaatccaactttaaagatggagtccaatgtacatttcatcaacatatcctacctcaaaacaaaacatataacaaaaagacatcattagagtttccaaattcggaaataatgagtttggtcagtttcgaaacgtacctgaaaatcaaaagattttccagagagagcaaactccgcaataaaaccgacaagcttagaagcacttgtccgaaaaacagagtagctaaaatttcttaaaactctagtggagaactcaaagctcacgagcttcctttgttgtttccatttctctccatcaacagcgaagatcccatgtcccagaagatccgcaagattcactgtaccaacgggtcctttactatagttatggaatcttgtcttgagaatatgctccacgttccgaggatctgcagtgaatatctcgctctgtcctggactcaagaacctgaaagtaggctttgtcctcgcgatctctgtctcgtaatcgtataatttgtggctgtggaagaaaagatcaaagattgtggcgtgtacaggagtatacctcttgtcgtttctggattttccggtgaagattctgatagttagatagagtgcgaaagacagaaggatgaagatcgttgttactactataatcgccatgctcgtcaaaatctccattgattcacttttttttttttggcttggaagttgtttcgtcttgttgtctgattttttcaatcttcccgctaagaagtcatatatagacgattcaacaatcacgaaaagtcaagacggattttacacgcatccaacgaaacattctgaaccctctcttttacctcgaaggttaacgttgagtgtaaccgattttgtcgttttgatgttttctcatgtagtaattgtgggtgaaaaagtcgcaaaatataaattagggcctcaactttcttttgtaccacgctaatcaaattatataaagacaaaacagaag

SEQ ID NO: 17300 - DNA, 1207 bp, Arabidopsis thaliana landsberg
ttttgttcaattaatgattcctaaacatggaaaagacagaattcatttttatggacggaaacgaaccatagtgcggtgggaaagtgtagatagagtgtttcaaactaacgatcaccagaacatatataagataagaggcatatatcaatttaaccaaacaaaacaaaacttattattaattttatcatttgatgcactcttcaagatttatcttcaggatcgggcctaatcaagcagtttttccaatttttccttaggacggagtcttgctcccaccattggtgaagcccatgagctgccatagaagaagtcgatttgttcttgtttacagtcatatctgctgatggaagaaggtgaagaggttccattgacaaatcagacagttgtgatgatgatgttcctattcttcgggtccatggatgtctaaatgagcttctagaaccggttttctcgattatacttgctccgatcttagacatgaaggttttgtgtttgaagtaatcaatgtatcctgcacatataggatctgctggattcacatataaataaggtatccacaatgctgttttggaatcttcttgaacctgtaatagttaaagacaaccgtattgatttacaaaaaaaaaaaagtatcaatataggttctcgtaagaaaataaactataaactagtactggaagtattttcaacaatgttgttttttttttgtaataattttctaatttgaccaacatggaaaacttgatatcgtggcctcgactaacaagatgagttcttaatgactaaaccaccatagctaattgaattcgttatccaaaaatgatcaaacatttgaaattcgttaaaaagattatatatttacccgttgatcagttaaggccatagtaacagtagttgcagtagctttgacgaggctctcggtgattcgaaacacacctttaagtagaacgccgccaggtagctgctctagaggaatagatatgatgggtgggttgaatatgtaactctcgagaaggaatccagaaattttcatagtcttcccggccagcaacactagggcggctcccaaagagtgtccagcaagccagatagctgattcactgtgtttgtcaatcatagcgcggatagcttgtatggcgtggatagtcatggggccttgatggaggttatctaagatgcatcggatgtcaagtgtcacggcaggcat

SEQ ID NO: 17301 - DNA, 1640 bp, Arabidopsis thaliana landsberg
  unsure (1)..(1640): unsure at all n locations
atccaaaatactcaaaaagaacttaaattaccaaataccaaaacttttttgacaaaattgtaatgggcccaaatataaaaaaattaacaaaaatttacccggttagaagttgagacaaaatgtattgggcttagataaatttttgttaaagcctgacgaaacattttcggttccattctaccatagatatttgttttggtttggttatatcaaatatccaatggatagtgattcgagggtatttactatttagtagtatctagaaccgaacccaaacctttttctgttcggttttttgatttttattcccaggtctaagaagtacaatcaaatatatttttaaaatttaatacattatacaaatatttgttaaaaatgcgtttttccgctacatcacggggttcatatcctagtaatgttaataaattttaatatgtgagtatatatatcttatactcacatatttacgagaaacattatgttcgatttgttacataaaacgataaaacattatctagtaaaaataatagtaaaaagttaacaatatcgttaatgatatgagaatacggtcaatttaggaaacattgcaagaaaaccacctcagaatagtcacaagattcaccaggatcagattttgaggttattcagttaacttttatctactaagatgaaatgcatataattaaaattttgtttgttatcatacaattggtaatagatagttaaattatattgaaagatctagttcacgagttttaaattcagttttggaaaatttaccaaataacatctaaaaactgtgtagaatactacttaaaattcaaatattatcaataaaatttaacatatattttacgagatataatatattggatttgtgacataaaatgatcaaaaattatctggtaaaagataatagtaaaaaattaacaatacttttaatgatataataaaatagtcaaaatcaactcaaacattaatttatgaacttgacctacatggtgttagtaaattgttaaacactgctgaatcaaacgacattgtggcgatacagtaacaacttaaagttgatgttgactttcacattgttagtaaaccgttaagtggtcctaaattctaaattccggtgttcgttttggtatcatttggagtcctagctagggctggacattcgggtatgcgggtcaagttcgggtaatatccggtcaggtacgggtatatcgggtatactattctatgacccaatagggtaaatagaaaacttcggttcgggttcgattcgatttcaatcaagtttgggtcggttcggattttgaatttcagaaccactaaatacccgaaaaaatcgggtatccttcgggttcgggtattttatacccaaatacccgaaatttcannnnnnnnnnnnnnnnnnnnnnnnnnnnnnnnnnnnnnnnnnnnnnnnnnncgtcggccgtcgatttctccgggtgctgcatgtgtcttcctcctcgatagtgttggatcgaattcttgatcgatatttgctcgtccactctggaaacgtcctcctttagggataccatctccggtaggtattctatttgcaatggtagttagtacaatgtaattgaatttgataataggtttttagttaatta

SEQ ID NO: 17302 - DNA, 987 bp, Arabidopsis thaliana landsberg
atctctgttctccttatactcgatccacccaacctgtcttaaccatggattccaaatggtaaccccttgattccaaaagtcacgaaacaataatccatcgcaggccgcggtaaatgcccacttctcagcctcaaaatgaaactgacaagctagctcacgcacctttatcttcggatcaacgccgtccagaccgatggttcctatcgaataaatcttggattcgggcaggattatgaattggggacgtgcacaacccaagcttttcttgatgaaccatttgtcgttgaaaaaatcgttccagtgtttacatacggatcttagccgaacaagagatccaagtggaagccgacacaatatctcttcctccaactcccacggaaggttccctgacgccattacctttctccgacttcggtagctttagaggagaatctatataccaccaccgcgtgcgactctaataaatatgaaaaatgatctttttatctgttacgaaaatgaaataacaccctctttttttgggacaatattaaaaaatatatcaaaagtaagtgtcatataattcttaataattggaaaggaaagagatttatcttccaataataaaattactgaatatttatttctcaaggataagaagttaagaacatagatttgaggaataaataaaaaacaattaatctgtaagttgttataaataaaaagaaatatatatttcaataataacttcatatttttgtaagaaataagaaaaaactattcattttttaagagttaagaacaaggagacaatatttggagaaatatcatgcttatatattctggttttaattgttataactttgtatctggtttacgacaaaaatagagaagatctattggctttctcagtatatatataaacaattaatcagcagaatctaacaagaaactagattgattctcattatacgagattacaagaattgatttcaatgcaaaacttaa

SEQ ID NO: 17303 - DNA, 1636 bp, Arabidopsis thaliana landsberg
cacaataacgcacggtaaagagtgttttatatacacacatcacatgcaatcatgcatgcacattttcttattattttggtaagttttgtattagttgcagttccaatttttatttaattatgtcgtagatatgatatgactttatcgttaaattgttaacatacttaagaaataaataaaaaaattttgaaaatatgattaatattaaaaagtaaactaatttcaaatttttcttttttggtgaaaaaaaaactaatttcaaagagaaacagaataatcatttcatggaatttttgtgaaaatagaaatatattaaataatgaaaaaaataatcaaatccaattcaaataaaaataggaaaacacgtctaatcgtaactttaagaaaccaaattttatataataagatacttttgtctaatctcaaaatgctagtctcgtctatgaagtatagaataattgagaaagcatgtgtttgtaaacattataaatttttaccatcttaaacatagtaagttatatatgaagcaacacgtgttaaaactttagcaccaatgtaatctatattgaattttgaattgacgaattgattaggttaaactttcccatcaaactctaaatataccaattccagcatatggtaattatattttttttctaatgatatatcatgcttttcgttttcatttttgctacatgctacaataattgttatggattttataacctacaaaaatataatgataattaattagggtaatgataacctacaaaggttttgtgaaacttacttttccattaattagggtaatgataattatacacaatatctaaatccatattttgaggaaaaataaatacaaagagtattttttagaattactcacaacttatcctaaacacaacaaaaagtaaaagaatcaaaaaaatcttgaatattgcctacacatatatacaatagaggcttttctaaagcatctcaccccacgataacaaattcctcttttccgttttaaggtagcaaacagcaatttaagaatcaaagatagtgtacgcaactacgcatatatgtttatgttttgaattttgatatagaacttgtttgttttgataaaggtgtatgtttgatattaccagcatgaaaatcacgaagactcgagcacactttgttaccaattatgcagcgaaactcgccgtccttctaattatcactttacttttagtcaattgtaccaccgtggttgccaaagacggtggtggaggcgctcacggtggaggtggagtccatgttagtgtcggaggtgctcatgctagtgtaggaggaggccatgctagtggaggaggtggtcatgctagtgtaggaggaggccatgctagtggaggaggtggtcatgctgttgaaggaggaggccatgctggtggaggcggtggcggacatggagaagaagaaggtgggcatgggatcggaagaggtggtggtatggttcatcgaccagcgacgaggaacggaggctctacactaactattccctttgtcgatggatctcaactgttttcatgatcatattttttttatttacctaaagctcaatttcctttgatatatttaaattcatgatttgattttggagtttttt

SEQ ID NO: 17304 - DNA, 2665 bp, Arabidopsis thaliana landsberg
tcgttgctggagctctgctgggagttgggattgttaattgtggcattaagaatgattgtgaccctgtgagttttttttttttttttaatatgggaacctctgtgtcacaatttttcgccattcattctcactcagctctctttctcaggcatttgcccttctttcaggttatattgacaatgaggattcatctgtccgaattggtgctattatgggtctcgggattgcatatgcgggttcccaaaatgatcaggtgaatacatgttatcttcttacctatggtgctaagttgaatgttctgttgacgagacaataacatgctcactgtttggatagataaaaatcaggttgtctccaatactaaatgatgccaacacacctctcgatgtgattgcatttgctgcacttagtttggggatgatttatgttggttcgtgtaacgaagaggttgcacaatctattatatttgctttgatggatcggagcgaggcagagctgggtgaagccctcactcgtttcttgcctcttggacttggtcttttgtaccttggcaaacaggtgggcagccagtcatacttgattatttttcttgttcgtgtacttgatcgttatttccccgattattagttttaacttgttccaatatcgagcaggaaagtgtagaggctacagctgaagtttcgaagaccttcaatgagaagattagaaagtattgtgatatgacacttctttcttgtgcttatgctggaactggaaatgtcctaaaggtatctaatcaattgtgctggtggttgagtgacataattcattacttgtttagttgttgactcctacttatattttcaggtacaagaccttcttgctcagtgtggcgagcatcttgagaaaggtgacatccaccagggtccagctgtgcttgggttagcaatggttgctatgtctgaagaactgggagttgatatggagatccgttctctggagcggatctacaatacggagaacaaaacattcggcgtgctgtgcctttggcccttggtctcctttgtatatccaatccaaaggtaaatacttttgtaaatgtagttttactgcacctgcttacaattattagtgggcgtctagagtaatactgggtttttaatatttttcccacaattccaggtgactgtaatggacaccttgagccggcttagccatgacacagattcggaagttgccatggttagcaatcatttcgcttcatagcctgtcccgtattatttagctgaatagtattgagaggggactgatctttcttttgactcgtacagtcagcaattatatcattgggactgattggcgctggaactaataacgcaaggatagccgggatgcttcggaacctctccagctattattacaaagacatgagtcttctcttctgtgtaatgtgttcctcattttggtttctgtaccctgcggtaagctgttgtttttgttggaattattgtaactaacttggtaagtcattatgcaggtgcgtattgctcaagggcttgtgcacatgggaaagggtctcttgacactcagccccttccactctgaacggttcttgctatcgccgtaagttcattctttttgtcaccaatagaaccaaatcttttttgatagttggatgttcaaaggtttctcatgcggaccttatttatgcagaaccgcacttgctggtatagtgacacttttgcatgcatgccttgacatgaaaccaatcatactcgggaagtaccattatgtgctgtacttcctcgttttggcgatgcaagtgagttcaacttctgtcctgtgtttctccctcttgttagttaggtctgatgaacttgctatgatttgatatttaatcaaattttgttaaaaaaatgtatagccaaggatgatgttgacagtggacgaaaacctgaagccactgtcagtgccagtgcgggtaggacaagcagttgatgtggttgggcaagcgggtcggcccaagaccataaccggtttccagacacactccacacctgttctcctggctgctggagagagagccgaactagccacggacaagtatgttattctttttcctttcttccttgtaccctttatgttacctacttaggtgtctgattataaaactcggatttgtaactggcaaacagatacattcctctgtcgccaatactagaaggattcatcatcttaaaggagaacccagactacagagaggagtgaagagagagagcttctgcttccagccagttgtcactagttttactatttcgtctattatctcatggtttttctactctccgtttaagctttgtttcattatcttgggatctttgtatgacctgacgcttttagttatataaactttagtctctttttttttttttttttttaatcgccaccaagtcgacacatattcttgccaaaaccaatattgaatcagtttaaaaaatcacgatccataaaattttccaattactttgatcacataaaaaaagtgaagaaatgttagccacttgcatagtgccgttcaaagacgcacaaatgaaattgggcttttctttggcccaaaagtgttgcgaacgcgtttattacaaaagactaaggtttcgtccaaactaaaatcgcgtttatagggttt

SEQ ID NO: 17305 - DNA, 1506 bp, Arabidopsis thaliana landsberg
gtgggattgaagaaaaatgagagatcttaaaataacatttaccacttcgtggtcatcccacttcttgctcccgaggttgcgcacttggttcaccaaagtcttgagccggttgtacatgtgttgtggctcctcccctttttgaagccggaaccgaccgagctccccctcgatcgtttcccgcttggcgatcttggtgagctcatctccctcgtgcgcagttttgagcacatcccaaatctcctttgcatttttcaacccttgcactttgttgtattcttccttgcttatagaggcaaggagtatggttgtggcttgagagttgaagtgctcgatttgggccacctcatcctcgtcatagtctttatcccctactgacggtacctgtgcaccaaactcaacaacatctcatatacttttgtggagtgaggttagatgaaatctcattaaatcactccacctagcataatcttcaccatcaaaagttggtggtttgcctaatgggacggaaagtagaggtgcatgtttagaaatgcgagaatagtgtagggggatcttactaaacttcttacgctcttggcgtttagaagttacggagggcgcatcggagtcggaggttgatgttgatgaagtgtcggtctcgtagtagaccactttcctcatcctcttttgcttgtccccgcttcgatgcggcttgtgggaagaagatttttccttcttctctttgtggtgagaagaagatttcttctccttccctttgttggaggagctcttcttcttctccctccttttggtgcgggactcttccgatgaagtgctcccgtggcttgtagtgggcttttcgcggtctcatctccttcttggcgtgatctccgacatcacttcgagcggttagactctaatgaagcactaggctttaataccaattgaaagtcgcctatagggggtgaataggcggaatctgaaatttacaaacttaagcacacactacaagccggggttagcgttagaattaaatttgagtccgaaagagaggggaaaacacatcaaccaagaaataaagcagatgaacacggtgattttttaccgaggttcggttccaaagaacctagtccccgttgaggtggtcacaaaggccgggtctattccaaccatttccctctctcaatcggtcacacagaccggtcgaggtttctccttaatcacttgggtcactaagacctcgcaatggatcaccacacacttaggtgtctctttctagctttacaaagcacttacaagaataagaatgagaaggagaatgcaatccaagcaacaagagcaacaaaagaacacaaatgatcatctctcaagtctctaagcaattgagttgattttggagcttgaagtggattgaatgctttgattgtgtctttggagtgtttgcctttgctcttgtattgaatgagaagtataggaggcttggatgacttgaatggtgttggttgggaggtatttatagccccgaac

SEQ ID NO: 17306 - DNA, 1142 bp, Arabidopsis thaliana landsberg
acaatataaaccatcagtcatcataattaacaaaaacaacttcataacatatgaaagcacttactggagacttcctgagaggagactgtgctggtaaagtattccttattggagaacttggacctgttgcatcatcaataggagattcagaaccagatgcagacttagaagacatagctgcagatttggactctgacgcagcctttgaagctgttgctgaagttttggacccgtctgcagacttcgaagctatggctgcagacttagcctttgatgcagacctagaaacttctgatgtagaattatgaccggttggagatgagggattttcaaaatcaactttgctcaggggccaggctacaaaagccatcaaacagtcctcaagatatgacatttcagctgtaggtctccatagtgatgtatcaggctgctttactgaatccacaaatactttaactgcttttggtccaagaggaagtccattaaccaatgcacttggttcttgagtctcccaacgcccctctgcaacaatgacttcagcattcttcaaatccaatagtttacatttgtttccttttagaccctatcaaacacaatcagtaaacaaatccaatacaaataatcagcatgatacacaggggaaatacattgataacacagtgcaacaaattttaattaccaaaggtgcaatgtcttcaatttggatgtctgggtctagaagtttacacttatcagctggccatgcgattatatgtccaacagcttctttcaaattaaagatcttgtgtgaaggtctccatagaaatgcatctggttgatatgcagtttcaactaacactttcaggtccgtagggcctagacgacagtcattcactatatcatcaggatctgaagaaagaatacgaccctcaccaacattttcatcagtctcagaccaatcaacaaacacacacttacgatgtgattttctgttaacactctgcaaaaaaatctgagaaaataagagtcataaacttaaataagaagaatcatttagatggtatgaaaagaataaggaatatgttactcttgcagctgagtttatacccatttcagcttctggccctctgtacataaacaaaactaaagtcaacttatataac

SEQ ID NO: 17307 - DNA, 1294 bp, Arabidopsis thaliana landsberg
aagacgaaagcggttcagaatccgacgaggttctacaagtcactatttttgaatgagagaaaacctacttgaaaatggggggtgggaaagctcactatggggaagaaatacaaagaccctctaactcgattttgcctagctttgctgctactagtggacgacatttttagccctacatgtgcgtgaacaatcatcaatcatgaccatgtagagatggtaaaagatgttgattcgtttcttaaatatccttggggcagaacctcttttcttttgacaattataagtgcaaaacaaagaacaaccaaggaacttgcacaagatagaacacccatacaagggttccctcatgcgttagttcttgtgacagtgacatgttgtccagcgatcatatacatggcagactcggtgtttaacatactaggcccaccaattccagtagagaagttggtgcagtatgttttggggaggagcttgaatatcaatgtgcatgatgcacgcactatagaccaaaatggaatggtaatattttagttcaatagactcttctttgtttttggtattaaagttgtatgtaagtgccttaactattccattaatccttctattttaggaccgagtcacatcactactgaatgaagagctccttgcaagagagatcgacttatctttctctagtaaggaggatgatgaagaagtttcacatctgctgctcctaataatggaggaccactcattcgagcataacagttggagtggtgacatggacgttgttgatgttaaacaaccatctgaagatgagtgcatggcagatgaagctgtctaaacgtgatggtgacgatgagatggaggctgaggtccctagtgttgctacggaagagagagaagagggtgcagtcggtgaaggtgaagactgcttggatggtgaggtgaatacggccggttacacagaaagataatttcagttttgatgatggagaagatttgcagcatgaagtcctggttgctggcgaaagggaaaacacttatagggagtcggctggatatgggagtaggcaggcaatgatcaaagaggcagctgatgaattttcaaaacgcgttctgaagattcaacaagcaaacaaagatgaattgaaggcctactttgatgctgaactcgttaagcataagaaagaattggtggcaatgcttgctgtatctattagggaagctgtaagtgggataaatatacagcatgctcagaaggagaatgcagcaaatgtgtagcggattgctactcgacaaagttaagtgacct

SEQ ID NO: 17308 - DNA, 879 bp, Arabidopsis thaliana landsberg
ccaagaacctggctctgagaccagtgggtttcaactccgagcttggattaaacgtttctctcacaactctctatcactcggttgtactctcaagaacttgaatcaactcaaagagaaagaaaacatagcacacaagtgatttgttacccagttcaacggatcgatgtgatcgcgtctacgtctggggccgaatcaattcgacaatccactaaaatcaagagatgaacaattctcaagctcgagctcataacaatggagtctctcagcaatctgttacagcagaataacaaactcacacacacgaacataatgaagaagaagaagaagactttatatagagtcaacataatgaaaccctctctcgcgaaaagagtattccatttaaccagcttccaatgtgattcaatcgtcttctgtaaaccggtcttcaattctcaataaccaagcattaaaccgaatgcaaagttgaatcagaaccaaataccacaacatgtgtcaattatataaaggttaaaccgttatcacaacctaatcaaacaaaacaaataaaagcaattctcccacaaaaaaggatccattcctattaaagtcttgtttgcacattttgtctttgttattttcgcatgctcctttgaaactttttgtgcatggatgtgaaactcttcactggagcatacggcgataacgaaaacaaggtgtgcatataaactttagtagtaatggaatgaaataagaattataagtggaacggccaagccgactctacttgcgttttctgtcaagacccactagaaacaagagctcacctcttcttccattgtcactacgccaatcaaatctgggaacgtatagcgaaaggcttactgggcgagcagtacc

SEQ ID NO: 17309 - DNA, 1044 bp, Arabidopsis thaliana landsberg
atacactgttatcataaacgattctttcccacatgcactacttatgatagagaatagccaggacatatcctacggcggtgcaccttcttccaagtgtatttatgctaaaccggatggtactgctgatgagtcttccacctccaaaaagatctgtgttgaacccatagacttggaaaagtcaaacctagaatttttgcttaattcttaatatgcacaacttggagatactagcatcaaggatggggatgagaaacaaaagggcgtggacactacagttgcaggcgggaggagcagcattcatagttcaaagaagggacgtcgttgtgaacgtcaaagttgagaagaaggagtgatccgtatctatcttttcacaaataaattcaaagtgtgtcactttgatttccattcccttatcttatcatcatgttggaccggttattttgtttttttttctagattttgtttggtctaaaataagttctctttatgtggacatctatttcatgagatgattgctttaataagtattctttatgtggactatattttgttctatttacattccaacttcctattgttacactatataacttatcttctttacttagatgcaaagttagactagctcggacataatatcactaatgtactaattatcagtaattctaatttctattcaaaaacaaattatagtttggattatgtacctggactccaggatcttagtccaatagattgtgcaccattaaccatgaatttattgagagcacacctgtaatcgtttataccaatcattagtctcagaaattttgaaatttatgggtaaacatcataaatatcaagcacacatttattctttcacaaagcaactataagtgaaaacatcgataaattctagaacattgcaatattttcatgttgattacaggcatttgcgaataacgttgaaattctatgttatcataacagattataaaaacgtgtgtgccgtcctaaagtagatgaaaacacattacgaaatatttaattgctgcttatccaaac

SEQ ID NO: 17310 - DNA, 972 bp, Arabidopsis thaliana landsberg
  unsure (1)..(972): unsure at all n locations
aaaaccaaccaggcctaaacggctacttgttaaattgccagagcctaattaggtcaagaaaacatgttttaggtgaggaggtggttgcttttaatctccatttttataggtaacaatgtattttcaatttgttcaactatttagcacaatacagtatagtacataggaaaaatatgcatgttatccttcattattacaagcataattcttataagtccagtaaatttttcataaaacttaaatcctcatatgactcgtttgataaatcatctttaccaactagtcttttaagtatttaacatttgcaataatcgttcaagaacaagatcgatggtttttatccattgcagcaatcgggattcgaaccactcgagttatccacttcagtgtcttttaagaattgaacctcacatccatttggaaacatgagtacaaagtttcgaagtattgtggttcctatcttcattgaccaccttcaaaccatatataaggtatattacatgtaagtaaaaactttggctgcaagcaaaaataaaatctaatcacaatcattagttaatgaaaatgaacctgtatctagacaaatgatggataaaaatggccatttgcagcttagcaaactcagctcctacacattgtctagagccagcaccaaagggaatggtaagtccgagagacgatcgncgcccaagtcttttccctanaacatttagtttaaaatttcttatgaatttgtttactaaaatttgtagtaaataagtaaaagatcatatgacattcacctcccaacgcatggattgaatactaagggtcatcgtaagtttttggattgaatgattgtttggatgccatgaagatccaccagtggaatttatagaaccaactggactatgatcatattctaatactgtggccggctggatctaggactatgtcactaacaacacctattgtgactctatagctaccatc

SEQ ID NO: 17311 - DNA, 2502 bp, Arabidopsis thaliana landsberg
ctttgcatcttattcgccacggtcgcagacggtgtgtggtgcttcttctcgttgcctcagcatcctaatgtatagtcctcgacggcttctgtagcagcatcagccaaatttcatgtgaagttccctccaaacaatatgcgcatcggtcataatagtgatcgacgatatttttcatatggttacacctctggtttgatctatttatatggtgattcgtccgacgatagatctgtgatatgtaacccctacacaggagagtatgcaatcttaccttatttgcaacgttacagaaagacgtatagctttttggtgtttgaaccgattgagaagcaattcaagatattgttcatggcttatctatctggtgatcgtgatcataaaatccttacagtaggaactggaaatatgaagtggagaaccataagatgttccttgagatatgaaattgtgagtgaaggggtatccattaatggggtattgtattacttaggcgaaacgtccgcttgggataataaagattatgatttaaagtatgattatgcgatagtttgctttgatattaggtctgaaaaattcattttttttgagatagaaaggttttgtagattgataaactataagggtaaattagcggtaatttatttcgaggatgatgtcatctatcaatcgtgtctttatcgtaagaagaattatgtagaacctgatgccattaataagttgaatgtgtgggttctagaggatgtagagaaacaggaatggtagaaatatgcctacacttggaccgatgatatattctttcgtcgtcgtgaggtttccgttgctccaacgactgctgcttggggtgacatagtcttttcgatgtgtgagtatactcctggacaaccattttatgttttctacttcaatcctgaaaagagcactctccaacgtgttgaaatccaaggttttggtgaaggcgtttgtagcgtttacacctttgtagacgacgtagaagatcttaatgttaaggatttaaaaatactcaagccatccaatgctccatttgagaagacagaagattcagaatatgaagaagaatatgaagaagaagatggagacgatggttggtcttaggtgaaagcaatgtgcatgtctttatttctgcgtttaattcttttggtcaacattagatatctattcgtttatgctcttttcgttttgaatattttaataaagtaagttttatttcaaatcaagtgttcgtcattaacatcgacgcttagtacatttgcttcgtttccaattggtgaggattcgtttatcttcggtttgaatcaaagatcgtgtacaactttgtttcctgtttttatgtttttcggctaaataacttaaattgtttattaattagaaatcagacaaaggagggacagagtggaaaaaacattgatcgggtaaacatccgtacaccgaacttattgtacgactcacaaatcctaacacaaaccaaaatcttctcaacgacgacgttctggtgaccaatgtggcaaagctgggctgaagtgtgtagatacaacccttgagtcaagaagctccattattggcgtgaaactcacacacctcggcaccttgtactgattgatcgatgcgcctctggagatggcatagtccatgagctcctcgaacgttccattcttcacaacacgtatctcgagtggtcctatcgacttatccgcaacccgactttgtctatacacagagttcaacgactcctccatttccaagcagcaccgagccatgacttcgtcatttggaggattggtttgatccttcactagaagctcccagtaaatgacataatggccaggtatagtcttcgtctctgcatagctcgtgtactcgataacacgagttccttgctctccaagtaagagcgatgcgttctcaaccgcgctttggagctcagcttcatcggttttatccgactcaatgctaagcaaaacgttcttcctccgcacaaacttgaactgtggagcggaattgtagaatccagtcacctgaagaatatcaccaactctataacggttaagcccagcataggttgtgatcacaagctcgtactctttcccgacctcgacatcagctagctccacaagttcggatttttcggttgggacttcatgatgagggataaactcgaagtatgccatgtttggcataatggtataacaaacctcagaaggtttacacattggtttcaagttgatcccaaagtaactctcggacgatgcatacatcgtgcaagccatcggtaacccgccgctatagtactcaagcatcggtatatactgagccatggctccagtaacgatgacgtcaaggtacttagtgttaggccaaatcttagtaataataccttcccaactattgtcttgtccacataccgaagttataaaatcaaacagttcttggtccggtttggtcaagatcttggacatgctctctggaatggtcgggtcaaaaatt

SEQ ID NO: 17312 - DNA, 1387 bp, Arabidopsis thaliana landsberg
gaaaaaaaaaaaattttgaacggcattcgcatttggccaaaatctgttaagtcttacaggtcaagaccgcttactcgtcatccatccaagaaagtacgcttacaaacacacctctccacagtctctcaatctcctgtcaaccctgttgtagagcgacaaacatcacaactcccccttcaccaccattaacttcattggaagggggagtcaatgttttatctgattcagtgcataatggagacgaaacagtatcagaaaattctgaaaagattgttgatgattagttatggcgtgagtttaaaaatgataaggtctgccgcatttgattaaagttcgtatactttcgtagatattagtcaataatctactttaacttcgatatactacacaggatgagatatccagggagacctgcaaggattcagtttgttccccacaaaagcatctggtaattgtttattaagttcattcatatttttcgtacttaacatgggtcatatattctcaggtggttctttttcaggatgaaactccatccatgaagacctacaaggattcagttgattccccacagaagcatctcgtaattgtttatgaagttctttcatattttgtttccataacattggtcatatattctgtgagttctatttaaggatgatagtccatcagttatattacccaagtttatatctgctgatagccccgagctccctctctctgatcaaccaatctatgacactgagtcaaaatctagagacgaggtaaatttttcaatatcggtttcaaatcaaaaatatttaactattatatacctaattacattttcattttaccttagcatctgccttctgctcgacctcctacagttttcgagaccgcaacgaaaccatctcctaatgatgttaccgaggttttcttcgacgtcctgctgttttcattttactttgagtttcttagaatggatgttactcatatgttaagttatacatcttctatcttatcaaggagattaagattccggacttgtccttggctgaaaatgtagacacattgcttgacatagtgtgcaagaatataagttcttcagttgttgctcccgatgaggtaaggaaagagagtcttgttatgatagaatgggaaccagccatgaacccacaggtaacattatcatccattatccacgtggactacgtattttgtatggattcccaattgtggatatacttaacttcgtggataactcacttcatgccctctttcccttgtaggatgataaaaaaaagatgatcaaaaagatgatgatcaaaaagaagatgatgagattgaaagcgatgatgaagaggtagaatttcctggtgctcattaggaatggtaggttgtacat

SEQ ID NO: 17313 - DNA, 1597 bp, Arabidopsis thaliana landsberg
ttccaattgttggattcttaaattctcatttgttttatggttgtagtatgcttgtggttgcaacttctggaactgggtatattctgggtacgggaaatgctgcaattagcttcccggggctttgttacacatgtgcaggaaccatgatgattgctgcatctgctaattccttgaatcaggtcattgaaatgttgagaagttcataaatttcgaatccttgttgtgtttatgtagttgatcttgcttgcttatgtttatgtagttgaaaagtttaaaaatttctaatccttggtagttgatctcgcttgtttgttttttcattttctagatttttgagataagcaatgattctaagatgaaaagaacgatgctaaggccattgccttcaggacgtattagtgttccacacgctgttgcatgggctactattgctggtgcttctggtgcttgtttgttggccagcaaggtgaatgtttgtttttttatatgtgatttctttgttttatgaatgggtgattgagagattatggatctaaacttttgcttccacgacaaggttattgcagactaatatgttggctgctggacttgcatctgccaatcttgtactttatgcgtttgtttatactccgttgaagcaacttcaccctatcaatacatgggttggcgctgttgttggtgctatcccacccttgcttgggtaaatttttgttccttttcttctttattttagcagattctgttttgttggatactgcttttaattcaaaatgtagtcatggttcaccaattctatgcttatctattttgtgtgttgtcaggtgggcggcagcgtctggtcagatttcatacaattcgatgattcttccagctgctctttacttttggcagatacctcattttatggcccttgcacatctctgccgcaatgattatgcagctggagggtaagaccatatggtgtcatatgagattagaatgtctccttccatgtagtgttgatcttgaactagttcaatttcgtggaatgatcagagtgtcctagatagtgtcacagcagtcgacattttagtggctagataatgagttctttccgttagagataaacattcgcgaacattgtttccagcttccgcgacccaacttctgattttgtttcttggtaccttgttttcagttacaagatgttgtcactctttgatccgtcagggaagagaatagcagcagtggctctaaggaactgcttttacatgatccctctcggtttcatcgcctatgactgtgagtcttgtagattcatcttttttttgtagtttattgactgcattgctgtatctgatttttgctgttccttccaatttttgtgacaggggggttaacctcaagttggttttgcctcgaatcaacacttttcacactagcaatcgctgcgacagcattttcattctaccgagaccggaccatgcataaagcaaggaaaatgttccatgccagtcttctcttccttcctgttttcatgtctggtcttcttctacaccgtgtctctaatgataatcagcaacaactcgtagaagaagccggattaacaaattctgta

SEQ ID NO: 17314 - DNA, 572 bp, Arabidopsis thaliana landsberg
atcatataaaaataaccaattagattgtcgaagtatacatttttttttctagaaaatcaatcaataagaaacatatggagtaatattttgcttgcaaaaagataaaaacttaaacatttacactttagaatgaaattgtatacatttacctacaactacatttatgtaaataaatttagtaaactgttaaaagtaatgacactcaaaatgtatcactcaaaatatattgatagggttagaaagtcagttaatatattttagggttaatgcatttgaaggaaaacaataattggtagctagattttttgaaacaaatcccagaatatggttcatttttaaggatagcaatatttaaatttaattaaaatataaaatattttaatctatgctcgaactattttctagatatttaaaaatttacaatcgaaaaagtattagttgaaaatcgtttattgtatttttcatatataatttaaaaaaaataatcatggaagatcaatttataaatatacatatatacaaattttatacttagatttcatatattatcaataaaaaatttacacttattt

SEQ ID NO: 17315 - DNA, 2887 bp, Arabidopsis thaliana landsberg
atcaatccacggcaacacacccgtcagcaggaggagcagatgttgttcacgcatttgcacattgtctaaattattgaacaagtcacacacagataaatatatagctcgataagaaaaacgtgatgaacatccatcgttcctcattaatgatgcaaactagataattggcaaatttgatgttcctataacgcattcagcaattctattaattagtagaaaatacaaaagcatataacactcactcgatggaaatatttcccctgccaaggagcacaattgcacgataagtttccgagcagagactgcaacaggacaatctagccaataaccttcaagatcaaacttctgcctcaccgaagaatagaaatttatcagccaaccaacatgtgagcttgaaagcaaaacatcacaccatgaagctccaggctgcaatcagcaccactgaaggtgagatttatgaagagctcacgaaagtgttttaacggtaaacaagtataaaatctgacatgctagcatgtggtctttctgaatttcaacaagataatgagcaattgtcgtaaatcttaaatataaccattagctacctgaactattacacattctgtctttcttgataatgcattatcaggtctaattccgtcagagaatacattaatgctggctcttgtgccacctttgctgtaaggaaactcccaatttagtatttgatgcattaatcgcagtgtagcattgcaaaccttaacctcagggacactagaatgagattcaataatcttgcttgtaacactcaaagcagcattttgtgcccactgatagaaagtctgcaattgaaaacatagaaagtaaacaacacaatctattttagtaacagaaccctacacataggctattattctttcacagacgaaaggaagatgggttaataactggaagcaaatgcaatcctacagtcaccttcaaaaagttttgctctagtgacttgcggcaattttcatgaaattccctagggagacccatggcacttgaagtagagggtgagaattcagatacctgagatgaagaaattatgagcaaccatatggtatatctatatatataataccagaaacaatagaaagagaccattaccaatgattcaagaaaatttacaccaatgaactgcacatctaagccatgagaaccaagaatagcctggttgatctgtaaacagcagttggtaagggacataagaagatcaaccatgatccttttaattttaacattaatattggacgactcgattatatttttcaaaataataagcagcactaccagtaccacaattttcatttctatgaagccatgactcgtaaacccccatttctttttattaaggcatggagcatatcaatacatatctagctgaaataatggaggcacatattgtaaggacctgttactactcaaatgattactagttaatacactcaatcactctaaatcctttcttgtccatatatttaaggtacagttaaaatagtaccaggtaaatttcttagaaataacatatggccagtatcagataacaacatatatgcacctaatgctactcaaactataggatacagaaactaaaattgaaagtacgaaaaaattacaaaataatgtagatacctgatagaaaaagacttccttctgggctggagtaaactcaagcctgtaagaataatttattcagattagaggttcccttagatgaacaaagcaagcaagaaaacagaagtagctaactaattagtcaagatttcttagtgctactctatttttccagaagctaccggtcataattgtctgtgaacgacaacatcatttcatgaatcctctcatacgcatagcatcagaagtgaaagctaacgtccaacatctaatgtgcatgttttaagaatttagataccagaagcagaagaagcccaccgcagcttaccagcctcttttcatcagctgtgcagccacagaagatacttttgaaagcacatatccctcggatgaattagcatgctgcatgacatagccaaggcagaagctgcagaaagatttcgccatattacttaattatttttatttatataatccaaaacttcataatagaaacctataatttcttatatagtcatgattatctcggaaaataatgtgaccaggaaagcagcagtattctaaaactactatattgtgaagcatgaatgctctcagttgatttgcaaagccaatcaaaaattacaaacttaacaccaagggttgcttcctgatagaggagagggtgatcgctcaactaactggaagcttaaggatatatcacctaaataacataaaagaagaaaaaaatacctaatcaagccccctttatcatcggtggcaagaaagctccattccctgatagctgattctcgaatagctgcagcagcttgaaacctagcatttgccacctgagaattttctggaagtagaaaacactttcagtcaaacagatgaaacttcccaagtccacttggccggttctggattcatcagaaagacttaccaagaatatatctacacgccttatacggctgtggggattggtgaagcgacaaaatggttgcctcagcagcaactggattactattaatctgtagaaaagaaagggaaatgtcaagtccacatgagttaagcacaaacaaagaccatgaaaagccttttataagcaaagagacttcgtacttatataaacttagaaagaacggtatattaaactagttcagtgagacatgtagtctctaacaccttattcaacagagacgcggagataaacaaacaccataaaaagaagaaaaactcacaagcaacttgataattttcatactctaca

SEQ ID NO: 17316 - DNA, 1111 bp, Arabidopsis thaliana landsberg
cccgaggtccctccccccttttgaacagtacccgcggaaggaaatagggcggtgcggcttaccggcggcgagggaggtccggtgaagggtggggttggcttcgggaggtccttgcggtcacgacaaggtacggctcgacaacggtgatggccggaatcggcggtccacgtgcacaggcgggcgagctcgtcggcagcgagtgctccagcctatccacggcgatataggtcaatccaagggcacggggagcttcacggggtgctaacgagtcgacccatgcaaggaatcgaagaataactcaccgtggagctcggtctacgttcgccggcggtcgggtgaagtccggtgatcttgatctagcgtctccggtgaggcagagctcgattcctcgctctgggagcttcaccgaggcacgtagaatctattccaagggttggatggggttggggatggctctgctggccggtctacggtggcgggggatcaggcggccactggcacgctgtctgcagggcaagctccggcgatctcttgctccggtgaggtcgagcgcgcgcggaggggtacggtcaaggtccctgggtgctttataggcgcgggcgcgggccatggcgccggctgggctttggcgcgacgcggggcacgcggggcgcgcgtcgtgcgtgctctggcgagctcagagcgcgtcgaacacgtggcctttgctttctgcccttgttcttgcgcctcctgagcagccaaacgtgcgaatctcgccctatggcttgtgtaagatttcttccctgcacctagggctacctagttcatgtaagttccaagggaagatcgggtctggttagagagatacggggctgggaagttggcgctgtcagtgatgtccacaccgagattaaacttgtgccaagtcgtgtcaaccgacttagggttgggttcacactttgccagggtgctctaggggtctttaggcgccacttttcaattgggtcaagtggttttgaagtttgaatgagggtgaacatgtttgatctttggaaaaagggttggttttggacttagaagaattctgttttgtctcttatgctcaaccttttagtgaaccttgtggagcata

SEQ ID NO: 17317 - DNA, 4152 bp, Arabidopsis thaliana landsberg
  unsure (1)..(4152): unsure at all n locations
gtcctagtggagttggaaaaacttcgctgctaatagcaatggctggtctttggaggtcagggaaaggagcaatcacgttctacctcgatcttgaggtagatttctcgcagcagaattctgatactcagtaaaattcagggaaaagagcagacgtattgttccttccacaannnnnnnnnnnnnnnnnnnnnnnnnnnnnnnnnnnattgctttatcctccgtggagtgcagctgtgaaggacacgacacctggtggcagtaatattgacggtactcagtttaaatttgtgtctagtaacaaccatttctttcaactccatttaagtttatgcaagcagattatagaacccaaaagcaaatcgactgaagaaaaaatgcgttgattttgttaggttcaccacctctgctgattagagaggacggaaatgaaaagccgacaacagatgatctgatgcggactctagagaaggtttgtcttggacatatagcggatcgctttggtggtcttgattcgatacacgagtggtccagtgttctctcacttggtgagcagcagcgccttgcctttgcacggttattgctgtctcagccaaagctggcgctcctggatgaatccaccagtgcgttggatgaagctaatgaggtacttgttggttctcctctcatctatcatttagaataatatcatgtacatgtagcgttgagccattaaaattcctcttgatgcccaggcgttcctgtaccagcaaatccagtcggctggcattacatatataagcattggccaccgccggactttaacgaaattccataacaagatcttacaaatctcaacggcagacccgaagagcaatgaacgtaactggcgaatagaggacgtggatgcccaagattctttgtacggtagattgaatcaaaaggaggtgccaagtgaaagctgatcaaaacctgattgattacataagagacagaagcagcaggtaaatctgcaaacgggtgtcatgaaacatataagaaacatgtttggtgtccattttgtatataatctaccagacttgacgttgactgaagatgcaagtaaatagagagattgatacagatacgagtgcaacgaagttctgattaaaaataacacgcgagatgagctaaaaattcaaaaccggctgagtatttatcataagcccaataaatctaacgatgggcccatttgagaaacaatgaccaccactccttttgaaatttcactcgacctctcaaacctaagcggaactcgacctcgccgaaaccactcgaccgcctcctgaaagaattactctgccgcctcagtcgagtttcacgactcacccgatcaccgattctggttcactatgaatcactcgaccacgtatcgccatctctcaccaaagagttactcgactcaatttcactcgagttcctcgctatactcgaccgtttcacttcgtcgttcgcgatcactttgttttcaccacactcgaccttttctgcgccgctagaattgagttccccacctcgttcactgtcgaagtctcaggaactactcgattacaaacgcaagactcgaccgccaaattgtggttccatccccaccaattccgactcgccaaagaagtactcgagcacaaattttcactcgaccataaattttcactcgacctcctgcaacagagccactcaacttcactgacagtttactcgaccaacctgattcactatgtgtacactacttcctcaactttactcgaccgacggagctctactcgacctcttgtactcgtcctcagcctgattcaatctgagccactcgattctacccgtgaaagagaaacttgaaaaaggttaaggttactcgagcacttgattgtacttgtccgtttgggtctatattgtctgttgcttacgactttggcttgatcgtctcttagatactaacctattgatattggaattttgagttctaagtcttttgcaggataatcatgagtaattacagtggcagttcttcagttgatcctgactacaacatggatgagagagagtcatcgtcttcaaggccagagagagaacaaagagaatatgatagtttcagaagaaaagctgagatagcccgtgggaagcgagtttatagatgaggatctggaagacgagtacatgcctgagcatgctcgcagagctaccaaacttctgcacaaacctgatgtattgcctgctgaggaatatattaggctcttcaaattgaatgagttttgtagcacaaggtatccatgctcgaccacgcttgcacaacttggattattggaggatgttcagcatctgtaccagagttgtcatctggacactctgatggcttatgcgtatgtagcatatgaagaagagacaattcaattcctctccacactgcaagtggagctctaccaaggtatgacctttgatgagttggattatgaaggattgggattcttgagattctctgtgtatggtcatgagtataggttatcaatcaagcgcttggaaggattgtttggtttccccagtggaacggaaactaagcccaagtatgacaaagaagagttgaaagacttgtggattaccattggcagctctataccgctgaattcttccaggtcaaagagcaatcaaatacgtagccctgtcatcaggtacttccagcgttctatagccaatgtactctactcttgagagatcacaaggactgaactaattctgatatggagatgatcgctatggctctcaagggaactcttcgccaaactaagaacagcatgtctctccaaggtgaaatcaatgacacacctctctctgtactttttctgatccatctgtgtggatacaagagctgggctgtcggcaataacaaaagagagcactaggcgctctgtgcataggtggtgttgtgacaccgattctgatcgcttgtggagtcacaatcacatctgatggactcaagccacgggcaatggatatcgagcatctacgccactgcaaattcctagagttcgcaatcgttggcgacttgcaccggttcaggtttgagcactctacagataagagagctaacatccttctccctagccctgaggttacacggataatagagggagataacattgattttcggcctgagattggacgcctctactatgagaacgctccgccattggatgaggatgatcttctaggagaggatgctgaggatgggatggatgaagacagagcagtggagttcgacactagcatgtatcactttggtgaacatgtacccccagcgagggagagcaagagcttgcgtgaagctcataggaataacagtaaactttagaagtggtgcaagaagcaggacaagctgctcgccaagtgtttcaagacgatcaagtttctgacagataagctgagttgttcctcctccgctactgctattccacagggacagcctcctctagagattctatcgaggagatttgatgagcctgagcacaggcctgagcttagcgagcagagagtttcacatgtcccggctaggcattcgtcattcgagtcccgagagcacaagagaagaaggaaggctacactcactcgatctagcagcagatcacgcctcattcagtcgaggagatcactcgaccgcggtgctggccacaacaaaagaagggaggtcgagtatccccagagcggtgctggccaccatagagctgatgaggtcgagtaaccacctgctggagctgatacggaacaagtcggttcgtctatggcctgggagaaatcacaggcagccattgacgagcaattacgctcattcttcaactgagataagcgcctcacttcaccattgtattatatcatctgttgtgatttgtttcttcattttgtttctgtcattggatttgtcctgagtactctcttccaagtttattcacacagttgactgtgtgatttaagtttgggggtgggctcaggaagtgtgtgttgcattgtatatattcttgagtctgcattcatctaagacataaaaaaaccaaaaaaaattgaaaaatttcagaaaatgattttccaaaaaaaaaataagagtgttcatgtacttgccttccatttaggaatcgagtctagagtgttcca

SEQ ID NO: 17318 - DNA, 2047 bp, Arabidopsis thaliana landsberg
gattccctctattctaactatgcaagtatttgtatatatatagagcattcgtacatacaaacagttggacgaacgtgaccaagtctttgtgcggaagaaaaatggcgtctagacaaggttttctcacggactggccatggacacctcttggaagctttaaggtctctttctatgcctcttttgctgtataccatcttcaaaaacatccatttatagtccttggttttttatattagccattagtcatgataatagtatgaatacggataaatattgcagtacttgttgttggccccgctggtttttgacagcatctactcatatacaaccatacgagatcacgaaaaacttttgatagtggccgtgacggtgtggcggattgttcatagccaaatatggataagtttatcccgttaccaaactgcaaaaggaaccaagcggatcctgaacaagtccatagagtttgaccaagttgaccgagaacgaacctgggacgatcagatcatcttcaacactctcattgtttacttaaccaaagtgtacgtctcagggaccagtaccattcccttctggcgaaccgatggagtgatcttagtcgctctcctccatgctggtccggtggagttcatctactactggtttcatcgagcccttcaccaccacttcctctactctcgctaccattctcaccaccattcctccattgtcaccgagccgatcacttgtatgtacatactctttctgtttcataaaaactaatgatgaacacttgttcacgttttcacgctttgaaaaaaatgatttcgctattttctaatgattttgatacatcctactaaatgtgtccaacaataactagaaaaagaaagataaatattctaaaatttgttacattcaacattttataattattctaggaaaactttgtccagctagttcgctctgctagttattctgttattctgttattttgctattttttgacatagtagtcatgtcaatgatttttgttactgtttgtttgtttgtttttctcataatctattgattttatgaatttatctgttattttaagtacactttcatagcaattattatggtttagtttcaaaataatatcaaatgaattggaaaaatatatgttcactgtcgtacttatttttattagtatgcgcaacaaattctaaaccttgggtcttgattgtagcggtggtacatccgtttgcagagcacattggattttcgttaatcttggggctacctctaataacgacttttatgtgtggaacggtctcggtagtctccattgccttatacctaacttacatagattttatgaacaatatgggtcactgcaactttgagctcattccgaaatttttattctctcttttacctccactcaagttcctctgctacactccctcgtaagtacttaaatccactagaatagtaattatactattaccacgattcctttgaacgcgtttaaatttctgtgttgtaatactattttcacatttttataaaataatgttctaaagatatagttttgtaaattttaaattggtaatcgtaaacaagcgtttgacttttgcgtttacaatatacaaatgaatgtcaacgaaaacattagaagttttggttacaaaacataaaagcattgtgactaaatatatatgataattgtaggtttcattcgctccaccatacgcaattcaggacgaactactctctattcatgccaatgtacgactacatctatgggaccaccgacgagtgcagggactcattatacgaaacatcgttggagaaagaagaagagaagcctgacgcgattcatcttactcatctaacatcactcgactctatttaccatctccggcttggctttgattccctcttctctcacccactctcttcccggagttacctatttctcatgaagcccttcgctcttatcctctccttaattctcaagtccttctcttttcaaacctttgtcgtcgagagaaaccgcttccgtgatctcacacttcactcccac

SEQ ID NO: 17319 - DNA, 1779 bp, Arabidopsis thaliana landsberg
  unsure (1)..(1779): unsure at all n locations
ctttaacttggaaaatcaaatcctgaaattattaacattggatgcgaacacaatcatacacggagattgatctgacttgagttccggctctacctttaccgcgagacattgcattgtaaattacgtaacagcaatttttaagaaattcttgaaaatacaaaataaatcaaaaatattactggagtttgactcaaactttttgagtgacgcgcatcagagaggagcggagacacgcgcgagaataattggccggtgaggaaccggaggatatagatttaagccacccatgtgatcgctgctcctttctcctgataccgctttacacgtagacgctaaacgctcttaattgggttaatactgtcattttgattattggcgacaacgagttagcaagggtacttcagtaattttgttaagtgtagtaaaactgtttttgaatcgtaggatccatggaatattaattattattttgatttaacgccaaattgaatttttcatgtttttgtttcggtttgatttgacatctaaagctaattgatagggaaatttgcaagaataactaacaaaaatttataaattaagaaagtaacgcaagacaaaaaaaacagctatactttctatattatatataataatggcatagttacccctttttctctaccttattctaagttcctccttctctcctctctttttcattttttttctttcttctctcaatctctttttttttttttttctgtataacacaacaaacaaacgaaaaggacaaagtagatttttcagataccacttatgttatctgattgcttgggttgccaaagttgtatcttaggatataattttctatacatccaaaatagtataatacaacattttatttctatccaaaatagtacatgtttttacttacaaacattatttactattttataaattcaaatccgattttaaaaattcaaactattttgtatgtaaaaaacatacaaaatagtttgaatttttaaaatcggatttgttttttttttaataaattttataactggaatctatattttgaaaaagatatatagcaaaaaaaacaaataggtgaaaactaaactaagtgttactaaatcatctcacctcgaattcaacattaaaattattttttctttatccttacatgctattttcttaaattttatacatatagtgttatatttttaatttgtttatcaaatatggttattaagctaaatcacccatatttttttgtgcgttaaagcaaaatgaatgaaattagtcaaagatgtttntgtgcaaataaaacattcattcatgtttactcacttgtctcttattatgatttcgagattatcaatgtttcctttcttaatttgttaactaccattagacaatatcaatgagaatacttatcaactactctattcaaaaacagatcgaacaaaaaactctaggtctttctagaaggcaaaaatcttcacatttttgttttatagtatatttaagttcacataaaaactatattttaaaaaaaaacaaaatgatttgatgtcagatgtttgatggtatttttggtggagcgtgaataatttattttaatgaatttggttaaataacaaaagatcttttgaaatgttgagtattgtaaaaacaattatggtattacattttttatcggttgtggattttttctatatatattttgaattattgaaattatgtatagttaattagaatgtttataaatcgtatactattgagaaatataattta

SEQ ID NO: 17320 - DNA, 1080 bp, Arabidopsis thaliana landsberg
ttggatatctcttctttatactcatagattccttcgctatttagatcgtgctctcataaagcgcgagaaatttgtgtttgtgaatccttttgctaaaactgtatttcggtgttgacaggggatttcttcaaacatattcaagaactgggaagcttgtgcctctacactatgaaagcctctacactatgaaaggcaaagagtctttgggaggagttagtggtaagcctacaaattctaatctttttaaaattttcctttggcatgatgctccaaacgggtctataaattataaattcgaacattgtaaactttgtagggacaataaaaaacaatgttcttttatgatacatgaagttcattatgttcttttaagaactgctacatgaggttaacgatctccttcaatgcgttgtatgaagagcctccatttcttacagaggctttaagattctcttttaaaacaagggctctctctctcatgtctgcaccttcttcatccactatcaacctcttcacagctctctcgacccctcccctctctaccgtaccttgcacctgaaaccctattctccaaatactctctaaacacagtgcgtttaacttttgctcgccatgaaagggcctgcatatcattggaactccttccacaatgctttcaagcgttgagttccatccacagtggctccagaatcctcccactgcaggatgtccaagtacttctatctgtggtgcccatttcacaatataccctctttctgtgaccatcttaatgacttcctctggtaataactctatccactcgaagcctgcaacagagccaggtcggatgacccataagaaaggttggttgctattacacaacccccaagccatctctaacatttccttagtctccatgtgagctttgcttcccaagcttatgtatatgactgaccttggtttctgcttgttcagccattcaatgcagctcatgtcctcttgcagtaaactaggtccttgcgatgaagctgtaatgtgaagagggcctaatggatacactggaattccaagttcttgttgcagccatgacagagacaagct

SEQ ID NO: 17321 - DNA, 1784 bp, Arabidopsis thaliana landsberg
  unsure (1)..(1784): unsure at all n locations
taataataaaaaaaaggaaaatgatgatgggtgagttttataatagttacggcgaacttggtcacattggataatttgtcattgctcttgggcggaccaataaaagcctctcttttgaatcccccacacagatctatcgcctcttctttcctcgtgtctgccnnnnnnnnnnnnnnnnnnnnnnnnnnnnnnnnnnnnnnttcttcttcttcttcttgtttcgatttcaagttcttctctttcgtgacctacggtgccgcttcatattccctaatttgattgaaaagggttgcgcaagggctttgaagtgaaacacttttgattcttgttgttgcttcaagttttcatttttatcaattgggttttggggaaaacactatgagctgtgattgaattgtctagctcgaagaatcttgattttgtttacacagagaattggtttcttctttcttgatgatagtacaattggattctgaatgttgtgtagagtttttggaattgctcattggtgtatgcttttgttatgcagggtttatctttggtggatgattagtgaaactttttaaggagatattagttcacatgttttagttaaaaatggcagcttcaagcggctctggtttggaaggttagaaacatgacctcaatccttttgttgttatgtattctttgtgtatactgactttaggaagttatatcgagtttccatttctttatttccgtttcttagagtgttttgcttttacgtttaactttaaataagaatgaggtcttgtttctgagactcatcaatttagagagctttatagggtagctttgagcttcgtttattggctttgctgaggtattttgtttgtatgtattgttttgatttgaataaagaagaacttttgggatttattctgttttttgctcttgactatatcagctgaggagggggaaataagtatagacatggaggaacacatggatctaacagaagatgatttcagaaatgtgtctggccagttttcaggacaagcatcgatcgtggaggttggggatgctgttgatgtgagagtcgaaaccgtgaaagtagatgttagttgtatccttattcttcttcttattgttggagcttgctaatgcttgcaatacttaaacacctctgcttcgagtatagtttctacaatcatttgctccaagacttgaatgcttgtgattatgttctctttctttcttttcataattccatgtgtcagctaaatctggtgttaaaagagccagaacaatctctctggaacagcaaccttcagtccatgttacttataaacacttaacaaggttagatgaaacgaagactcttaactcgataacaagaagcttttaacatttgaatgctcaaaacattgctatcattatatgtgattcttggtgttctacttgttttgattcttattgtcctgcatctttcagagatagtaagcagaagctggaaagtttattacagcaatggtcagaatgggaggcagaacaaaattccttgtccgaggtatctatgatttgaactcttctgtagtgctttatatagccaatacaataaaccttgtggtttgcaaaagtgaatcaatttcaagttgtgattgaaagaacaattgtagacgaaatttcgcaattctgcaagaaatgataaggacacttgtttgctgactatttcatgttattaactaagctagaaacttttcgtttggaatatgatcaggatcaagaacaagtactagaagctggtgatgagacatactttc

SEQ ID NO: 17322 - DNA, 836 bp, Arabidopsis thaliana landsberg
ttccgaaattgtcagttccttgttgaaatgtcgtaatggatcatgcttcttggttaattacttatcacacttcatcttggtatatgttatttggtatatgaacccttcaaactccattgacttcaattgagcctgttattgtgaatcttagttattttgttatcacagataatcttttggtatgtttaagagtcttgcctaacttttgtgaccgtgatatagctgaatgtgattcctaatcttattattcttttagccttgtttcgattacacaactgttgaggatgctgtattgcattctgaatctatacagctatgaacggcataatgattgcattgcatctcttttttccatgtgcagatgataacgagtttgaggatgtcaacattgcacagcccaccgacttctcactttcatgaagagttgcttactgtatcaaggaaacgtcaggagaaggtattgattcaaaacacaaggaggagtctataaacgccagaagttgtttcttttgcgtctctgcttgtgttaacgcctttttagtttgttacagacaattgttgtaagtaaagatattgagatgtggaagtttgattgcaacttgccagattagtagtttttacagtctcttaatatgtttacaatgagctagaggtgcagctaacacgagccgaggaagctccattattaccatttgacattgttcattaatgacggaaaatccaatgagggtgacaaaataaagagacataaaaacaaaatgaaaggacataacctgaatcttaacggaaaaaaacgttaaggctataagtgtgtctggttcgggaaaaagagagga

SEQ ID NO: 17323 - DNA, 2610 bp, Arabidopsis thaliana landsberg
aaccctttcgtaaacttactttgtggcagcgccagcagcacccgcttcagtacgttagcaatttgagaatgctatatatttcaaaggcaatgctgattcaagaagaatagaatccatgtgtattcctcctacgggaatttcagcggtaccaatgagacattggtcagttccatctatcgaatagacctattcagaagaatggaagcatgattggcaacaaacaaaaaacgttgacttatcaaacagagcaaacacactagtattgcagaaacctgagtattatccccacgaggttggaaaccgcatttctcaacaatagaagatctcacgatttcaggagtcgttaggggggtataacccttcttcatgacttgtgataatgtccaattaagaagagccatcttcaatagaactgcctcattctttagatagaaaaactttgaaccacttacctgcatgagtgtaaataacaaggaagttacttcaacttatctccttgattaaatataccggaaaaccaaaatatttggtcatcaatctaatactttactgaaggaggtgatcgttcacctactcaagtgaactctacaatatgaagtaatcaaatgttcagtctaaatacaactgcactaaaaaaaagaaaaccagcagctacgcaagatgccaaatctgatccaacaacctacaaactgtgctttggtgcctatgaaataagacaaagtgtatacctcagcagcagagtcaaaatcaatgagatcaagatccttcccaagctgaagatgatcctttattggaaaactaaactcacgtggactaccaacctacataagaaaattatgaatgttttaagaaagacctttgacagcaaaatgccttcgtcaacgcaagagttgagggagttctgacaaaagtaacttacctcctgtctaattgccgatgaatcctctcctccaacaggaacatcagggtgagtcatattcggtatagactgtgctacatgttggagctcatctttaagcttcacgaggtcttcttccagagtaacaagactttccttaagatttttacctgaaggcaaaaacgctctatgatatctcagtacagaacccagactaacaaacaaaatggatattcctcatttaccttcttctacgagtctctcacgttctgatggctccagcttccctttcatctttttggcaacgttgtttctttcctcacgaagcctctcaacttcctgctatctgcaatcattgattagctgaaccgagagaaaagaaaaacaatttaatccaatctctcaaatctagccagagactagaaactaatactaagtaaactatccataaactaagaaaacaagaagctttttgcaactttaacatttcttttgagttcttcttcctcaaagtagctgacttcacatattttctactactaagaatcccaaattcgaagagagtagaagattaggtaaccttttggagattgaccatgttctcataaagctggagcacagcttccaaattagcattcgaattcctgttcctgatgttgatttcgactgcttccttattgtcccttatccatttgaaatcaatcgctgccttccacagaggccttgctgctactaaaaaggaacgaatcagctttgcattcaaaagcaatgccacgaggtaagagagggtaaactggaataccagaggaatcggaggtctgtgtggccggaatatcttgtacggcggcggaagcggagaaagctctgacaaggagaggcttattacggggttgaagatggcgggaaaacaaacctagggtaagagtattggtaaatggcttgaggaagaggcgagaggagaaggttacaggaaccgccgctgcgagtctcaatttgtgtaaacccatcggccggagcttctctgctgacgaaaaaagacacgactacgacgacgatttacttttatcttctgctgctttgcggattgctatttaaacgtcgtcgtttggatctgttaactggtttgacttgccacgtgtttctttatgattcagtgttgacatctctcctcaataaaaacgacaacgttttgcgtatgtatgaagtgaactatgaagtatgataattctatcttatgtgggtgaaacttttacaaggaataagaataagaggaagacgaaagttaatccaattctgcattattacaacttatgaacaacgtcaagggccttcgtcttcttatcattcttcttccacttcctcttcctcttgttcttgttcacatacttatatatacatatgagagacatattctaatttctaacacacatcctttacgttcaagactggacatccacggatggtccacaatcgagacacattgtaacctgactctgataccatattacaaaataagaattgagctgagctattaagaaaaggatgttaaaattctcgattcttatttcttaaagagtaaagtgtaaaacaatttccttatatagaactgttctaacttaaccagtcaattgaaccggataataatatattctaactaaactggatggtatatgtactccaagatctagagatgtcgtggtgggtaaaaaagc

SEQ ID NO: 17324 - DNA, 955 bp, Arabidopsis thaliana landsberg
tcacaaacgacttgatcgtggtactttcccacgctttatgtttcagtcacttgttcagcgattttaagtttggatcgtcattgagccacgtaagcttgtatggcctcgggtgctttgttttctgaagacctaacctgtctaccatgtacttgctagcaacattagtacatgaacttcaatcaataatcaagttacataccttgttctttatggtgcatctagtgtggaagatgtttgctcgttgcaccttctcttcggggttaacaaacacactcaatgtcctgtgaatcacaaggagttctcctacatctggatactcaacgtcctcatgctcatcagaatcctcttactcatcttgtgactcatagtcaccactaggagtgaggatcatcaccctttggttcggacattctctcgccatgtgtcccctaccttaacatttgaaagaagtaatgtcatgagaacgagattgattagtactagggaacttacctggttcgggccaaggggttttaggtgccttattcgactagttcttgaacctaggatcactctctacggccttgcctttttccatggctcggttgttgcttgcattccaaggcgtgttgttctggatcggggtgtttaaggatgtcttatgccttatttgctgctcgacttgtaccgctaggtgtagcaactcatggagtccattatattgagctctctctacctttcgttgaatcttcctttgtaatccgtctatgaatttagccatgagagcttcgttggattcctctagctccaagacgttcatgagcttgtcaaactcctcaaagtactcatctacggtccttgttccctgagataattttctaaaacgtttttgtaaatctatgataatggtcagggacatacctcaaccttaagaggtacttcatgtctctccaagtgcttatgggaccaaatcttt

SEQ ID NO: 17325 - DNA, 583 bp, Arabidopsis thaliana landsberg
ggataaacccaaaatagttgtcattactaaaacaagaatttctgcgtttattttaacctttaaacaaaacattgagaaactgaaacagaatcatcagcttgttttttcaaagtgaataacagagtttttcactgccctttaggccctctcttcttctctgagcttattcttttcttactctttcccaaaatccgcgttatagtgagagctcgactcaagcttcttggcctcgctcagctttctcacagcctgtacaacagacaatttgataagcagaaaagtttgggtacaaaaaaatatgtaaacatgcggagtatttatttttgtttctaccttcatgaagtcttcatgtattacatagtcacgctctgctctgattgcgaacattccagcttcagtgcatatgttacgcagatcggcaccattgaaaccctaaggatgttgattgaatggaacaatcagtgggatctataatatataacaaaagcaaaaacttccatcgcagtgacatttaagaaaaacaaaccaaaccttttcaagttttacgaatagcctcatagtcctatttctcccatgctttggc

SEQ ID NO: 17326 - DNA, 538 bp, Arabidopsis thaliana landsberg
taatgtgccagctttgggttgttgtgatgatctcacgagattattcatgacttatggagaagttgaagagtgagtctcttttttgtttcctgcattgttcttatggactatgatattgttcatttgtttgtttggatttgattcgtgtagatgtaaacctatggatgcagaagactgtgcggagttcacggatgtctactggatcaagtttcgtctcatcactaatgctaggttttgattcttctttctttgatgatcaacttggcatcactgagattcttatttggttttttattgattccaaactcaagcaatcatcaagtaatgtgtatagtgaaaaactcatcactgttatgtcttagcgttaataggatttttgtttttcttccctttgtgtgactttattttgtaatggtatccggattttatgttcattggacgctgaatctgtcgaattgagctgtgtgatttgtcttacgatatgcaaatgaataattttttgggaatgagatatgttctatgtttgatacatagaaaa

SEQ ID NO: 17327 - DNA, 1536 bp, Arabidopsis thaliana landsberg
atgaggggggttacggaaagtgttgttaaagatatatacgaacatataagaaaagtgagtgaccaaatggatgtgttttggttttggttttgttacgaagtgatatgttctttttctatactcatggatctgttgaaatctatgtagactcaagaaaggagctttgtcttgaaagtatctgctttggagatctataatgagaccgtggttgaccttttaaatcgtgatactgggccccttcgactgttagatgatccagaggtaagtaaagggtcggaaacactaggctcatgaactatctcggccagtataagaatgttgtgtatgttgcacaaaggaaccattgtggaaaatctggtggaggaagtggtagaaagcaggcaacatttacagcatttaattagcatttgtgaaggtaattcttctatcacctgttaagatgctctatatctctttatgcatttgatgatgatagtattctaagtcatgtttagcaaagccttagaaccatgtagatgacatatataaaatatgactcattatttcactaatcactaatgagacatatgatatcatctttttatttcctgttatgtgattttccatttattgtacagatcaaaggcaagtaggtgaaactgctttaaacgacaaaagttcaagatcgcatcagattattcggctggtatgatctatactcatctgatatgctgcataattgaattaatattctattaaacatggagaagatagttttgcctagttatttgctaccattagacagtaaaagtaaccactttccataatttctcatgttctctgcttttaatattcagaccatccatagcagtctcagggaaatagcaggctgtgtgcagtctttcatggcaactctggtacgtcatttattatcatagggttgaagcttcacttggtattgacgacattttaattggtgcagaatcttgttgatcttgctggaagcgaacgtgcttttcaaacaaacgcagatggtctaagactgaaggaaggaagccacattaaccgtagtttattgacacttactacagtgatcagaaaactgaggtcagaaagcacactagtctgaacaccatgattatctttggcatgtctaaattaccttttaggttgatgaacattttcacccgtagggcaccttaagaaattagcaaaacatttaattatttctgttattttggtgaagttctggaagaaaaagggatcacgtgccatatagagactcaaagctgacaagaattttgcaaaattcacttggcgggaatgctagaacagcaattatctgtacgattagcccagcactgagtcacgttgaacagacaaaaaagacactctcttttgccatgagtgcgaaggaagtcaccaactgcgctaaagtaaacatggtatgtcacttagttaaatatttggagaggtctttcgttttgcagaaacaggatgattgtttggagctttgtctttggcttcctaaagcttttctttggtctttcattgaaa

SEQ ID NO: 17328 - DNA, 714 bp, Arabidopsis thaliana landsberg
  unsure (1)..(714): unsure at all n locations
gaaggacttntctaatccttttctttctcatagggttcatactcactaaaaatgaagatgcttgattgacgcttgaaggagttaacttgcatcaagttctcatttgatattggatttggatcctccgtggccgacatgtagagctgatttgctcgacgggatacaccatcttgttctataccatggaaccactctcatttattttgtataaaatacactctcctgctatacataattgttgatcaaaaaccctttgaaaattctcattctggaccattcatgaatccccccatttatagaaaaaacaaagtaatgaattattgattaggttttatagagctgtggttagttctagttgcaaccttaaagctgagcctactttaaccaatagtacatcattacatccacgttcatggaattataaagacgtgacatacatcatcattcaaccaaacgtaaaccattaatgacttatcagaaaagatgaattttttcatagcttcaatataccaacatgttaaaagggacattcctccccttttgctatgtatttggacaaagttgggctaaagttgggtaaattcaatgttttttgttaccctaatttagcttatcggttatcttctttagtactacaatgacccgtcaaaagagaaacttttgaaaagctaacccacaaagtagcttttttgttcagttgagtactcatttcgt

SEQ ID NO: 17329 - DNA, 2181 bp, Arabidopsis thaliana landsberg
tttcatgatgagtgttagggattaaactggtaatttgttttttgtttgataagatctttatgtgtttaagggtttgggggcaggtgggtgatcgacctttcacagatatcgtttacgggaacagaaacggatttctaaccgtattaaccgagcctttgagtcgagctgaggagcctttcattgttagacaggttggtttttatctcctcttccttaactgtacactttggtttactgattcaggggaagtaagcacataactattttctgcatctcacttttagctttccaaaaatgttgtacaatatagctgaatggggttatttcattttttttgttgcaggtgaggagattagagttggccttgttgaaacgttggttgagaaaaggtttgaagcctgtggatcatagtttggtatcagatataacacagtttgttaaagttccatcagatttgtaagaaggattctcattttgctattgcaacaacaactttgttccttgttttttttttgtaattgaaattttgagtttgggttttggccaaatgcatcatgataaaaaatgccatttttgatattgtacttgtatttttatacccgcaagatcttcatatcaggggtcttcatagttaaaagaacatttacgcaaagaggtatggaatcaaaaaaatgtgatgtttcggaaaaaagttgtatatcttttgcgatgaaaacggttaagtcttcctatattgagcttaagatgattggtatgttgtagcttattagccacgtcattcgaaaaaaaagtaaagacgtcacaaagaacaactcagcaaatttgtggcgaagaatcaattgaagtaagccatcgatagtaaattactataaacattcggagaaaaagaataagaaagttcaatggttttgcaattggtttggttttttgaacggttttcaagccaattaaacaaaagaaccggaatgaatttccatgggacctttgacaaaactttgagcaagttttgttttgtcagagaattcttccttttgcagtccacttctcagagaagtaatcagtcacaaggagttcgacgttgcaactcgataacttgttgtattcttccatcatctgcatgatacatttagacacttcagggaatctgagctctgtaggatcattctcttcaacatagatgttcatcgccttcagacacagaaaatagtccaagaaatgcttcatcacgtgcatctctttggttgttccttgaaaccctttaatctctaacacttttactggacaagatgtgagtgaccgacctttgacttctcgggaaacacagtcacaagcattcccacatttatctgtgacatggtgcaatagaccctgaaagcataagaaaggagacaattaaggtattcagttcaaagtaagaacttgtctgtacacgtttggcaaatgacttgttactatacctcaaggactagagtttctagatgtggacagttccttagaagaactggcattgcttggcatcctcgactcttgtgacttttaagagttaacgatttgagattgttgaacactggcatcgattcacaacacagagaaagaacctgaaaacaagacaaaacactattagactttttgccattacatgtctcaaaacatgactttaacgctaactgaccttcagagtattcggagacaagtacatatactgaacattacgtatgccttttatgagcttctccatattaactagtcggagaacaacatcatcctccacccaatcgatatttggcgctcttgctcgctcgatttgatcttgagttaccaaaaggctgattctagcctcaaataagttttgcattataactacagggtagtctatagcaacatactcagtgaaacagaagtaaacaagactaggtgtatcaaccgaaaaagtgcctaaacaaatgttgtaatttactgttaggattttgaggcttgcatttgatacgttgacatccttacctccccagttaacactaaccaagactaattcctcaagcgcaggtaaagcactaaaaaaatacttatcaacacataacctaactgagtcccgaactcgggttttaagcattggtaagaatatgtcaaaagcagctaaccaatcaacacgaacactgtttagcttcagcgggaccaggttcc

SEQ ID NO: 17330 - DNA, 4919 bp, Arabidopsis thaliana landsberg
taaactctgataccaagagatgatatatgggtttgtccaatctaatctatatcgccgacaccgcgggtggattagtttactcgccgcacgatatctcattcataggaatctgcgaactaagcttctccttctagataactggcatattctgctctggacatattcgatcatggtgcctcctataaacattggtgagcataggatatctttgtgttgaagttacttatttccagacacggccacagaggtatcgatgtgtacttggttcataagttgatcgatatttacttgggtcataaggtgttgcattggtaatagatgtgtgacctttattttagaacaaaccgtccaatggtcgtgcatatggtgggccttgtaccagagagatctgcgccgctctattaatgatcactgacataccactagtagatcttttcgcatgcaaatatattttatattattttctttgttaaaagatttttcctagtattatcatatgagtaattaatgtttctcctttagctttcactataaaaacgcatattattatcgatagtaaacatcccaaatgttcggttcatagcattttcgattttcatatttgaaaggtagagaatcttttatatttaacaaattacaactttacaagcattgtagtgaggttatatttatacatggtgcatcaaatagatataggaggattagtttgcgatttcaatgattaaacccaaaaaaaaatgacaagaataaagtaaacttaaacatcatattcgaaatgaatcatatccgtctatgaataattatgtcaactattcagcatttacaatcacgccaaacaattgacacgttattctctaatcataatattggttacaagaaatagaaattcaccgaattacctttccaaattttgttcaaataaatgtacgtatcttattatactaattttattttgcattttcgtgtccgctagatatgaacacgtcatcgataacgttctataaatatcattcctcttgtccaactaattaactcactctcgagagtagcgtgagtcttgaggtttcattattatttttttgttttccctacaaggaagtaacaatgaccgttggtgccggaatcagcgtcaccgactcagatttggtggtgctaggtcaccgtgttcttcacggcgttccggagaatgtcttagttaccccagcttcgggaaacgccttaatcgacggcgcgttcatcggcgtcacgtcagatcaaaccggaagccaccgtgtcttctcccttggcaaactcgagtactgttcaaaatccctttcctacacttttgttgttagatgtcacataatttgttgaattacttgaggcttagggtataaatgtttttttttttccttggcagagacctaaggtttatgtgtgtcttccggtttaaattatggtggatgactcaaagaatggggactaatgggaaagagattccttgtgagactcagtttctaatcgtagaagcaaaccaaggttctgatttaggaggaggagatcaatcttcttcgtacgttgtattcttgcctatacttgaaggagattttagagctgttcttcaagggaacgaggctaatgacctagagatttgtcttgaaagtggtaagttgacacagttagctagatttgagttgtttattttttgttagattctctctgagatttatatggtttgtgtatggtcaaggtgatccaaccgttgaccaattcgaagggagtcatttggtttttgtggctgctggctccgacccttttgatgtcattaccaaagctgtcaagtatgtaacgtttctcaagtctcaactcaagacttctttatgtccaaaatttttttagtgttaagaatctgtgcctttcaatgattatgcagggctgttgaacaacatcttcaaacattttcacaccgagagagaaagaaagtaaggaaacattgagacgttttatgtgatctttggttatacatatcaaaaattaactctgaaaatttcccctgttttggttgtgttcagatgccagatatgctgaactggtttggttgtgcacttgggatgcattctacaccaatgtcacagccaaagacgtcaagcaaggtcttgagaggtactcctgattctttacttttaaagatggctttattaactgtgacttaaccaaacctgcaatgattctctatagcctcaaagctggtggggttactccaaagtttgtcataattgatgatggatggcaatctgttggcatggatgagaccagtgtagaattcaacgctgataatgctgccaagtaagtaattaagctctcttaattctgatttaagttctttctttagtcttaataaaccactctttatcttttgtgcttaccttcagttttgcaaaccggttaactcacatcaaggagaatcataagtttcaaaaggatggcaaagaaggccaccgggtggatgacccttcattgagtcttggacatgttatcacagacattaagagtaataattcgctcaagtatgtttatgtttggcatgcgataacaggatattggggaggagtcaaaccaggtgtttcttgtatggaacactacgaatccaaggttgcgtatccagtttcttcaccaagagttatgtccagtgagaattgtggatgtttagaaagcataactaagaatggacttggtttggtgaatcctgagaaagtctttagcttctataatgatcttgactcataccttgcatccgttggggtcgatggtgtcaaagtagacgtccaaaacattcttgaaactcttggagctggacatggtggtcgtgtcaaacttgcaaagaagtatcaccaggctttggaagcttctatttcaagaaacttccctgacaatggtattatctcttgcatgagtcataacacagatggtctctacaggttagcttctggacctacaacgttgttctcattgatatttatccataattattactatcccttctaatttcttcttgtaatgatactttagcgcaaaaaagactgctgttataagagcatcagacgatttctggcctagagaccccgcttcacacacgatccacattgcttctgttgcatataacacacttttccttggagagtttatgcagccggactgggacatgtttcatgtacgttgaattgctttaacaaacttttctgaacttgtgaatgaatctatctgtttctcattgcagagtttgcatccgatggctgaatatcatgctgcagctcgcgcggttggaggatgtgccatatatgtcaggtaatcacaagattcaataccatttgacaaacaaattatcatagtaaaatgagctgcaagtaagtaactctagatccattcaaacttgttaaacagcgacaaaccgggacaacatgacttcaaccttttaagaaagctagtacttcgagacggttccatactcagagcaaagcttcccgaaagaccaaccagtgattgcttcttcagtgatccagtcagagacaataaaaggtatctcgttttcctttacttggaagagaagaaagcttaaatcttaactaactgttgtattatactttgcaagtcttctgaaaatatggaacctgaacgaattcactggcgttattggagttttcaactgccaaggcgctggatggtgtaagaacgagaagagatacctaatccatgaccaagaacctgggaccatttctggttgtgtccgaaccaatgatgttcattatcttcataaagtagcagcctttgaatggacaggagattccattgtctattctcatctcagaggtagtacacaaactcaaacatcagtctaaattactctgattatactaaaaccttcactttttttttccttttctatcaggagagttagtgtatctcccaaaagatacatctttaccagtgacattgaagccacgtgaatacgaagttttcacggtggttccggtgaaggaattttccgatggaagtaaatttgcaccggtggggcttatggagatgtttaattctggaggagccattgtgagtttaagatacgatgacgaggggactaaatttgtcgttaggatgaaacttcgaggcagtggtttggttggtgtttactcgtccgttcgacgaccacgaagtgttacggtggattcagacgacgtggagtaccggtatgaaccggaatccggtttagttacgtttactttaggagttccggagaaagaattgtatctgtgggacgtggtcatccaataattattgatctgtataattgtatcagttctgtattgatttgttggttaatctgtatgggttatcgaccagaccaatacaaatcaaacagattggtccgtgttcgttttgatataataatacaaaaaaaaaatgtttgttgtatggcttagcatgcattagtgtaatcattttcttccttcttatttatcatcaacggtgtaaaatctgtaaaatgttatggtgcaaatttagttgtccacaagagaacaaccagacgactatgtaatcatatctgtagatagtagtagactagtagatccgtgcatttttagcaatacttccactaataaaactcgcaaattaaagcattcttaattactctgaaaatgacttctacacacaccctaaatgtttttatagaaaatttggttttggtctaattattttgatttggttcggtctagtaattgatcagtttatgatattttttgaaaggatttttttttttttttggtcgtcttttgaaaggaaaattttaagaaattataaacgatttatttaagtccataaacgaaagggatcgaatcaatgataaaaaaattgccttaacaaaaaaagttttaaaaaaattggga

SEQ ID NO: 17331 - DNA, 2155 bp, Arabidopsis thaliana landsberg
  unsure (1)..(2155): unsure at all n locations
tagcaatatgtaattcaatgtctctcaactatagaatttggaatcttaagcacgtttataactgccatgtaattcagtgtcttatgtatcgaatgtcttagccttttaaacgtactgccaagttgctagcaaacgagaattctaaccagagcagaaataaaaaaaatggaaccgatgtatcaaatatcgggataactttagtgcattgctatatgtttagaagatatgatttacagcaattatccgatcaaactcaattttccggggacaaagttagtagcgtaagaccaggcgttgttagccacaggatcagccaaatgatcaaacaagttctcaatggggcctttaccagtaacaatggcttggacaaagaatccaaacatagagaacatggcaagacgaccgttcttgagctccttcaccttcagctcagagaaagcctctggatcctcagccaagttcaatgggtcgaacgcacctccggggtaaagcgggtcaagtccttctccgagtggtccacctccgattctgtagccttcaatgaaccccatgagcacaacttgaacagcccaaatggctaagatgctttgcgcgtggatcaagttagggtttccgaggtaatcaagacctccttctgagaaaatctgagagcctgccttgaaccacacggcttctccgaatttaacaccgttcttggagagaatctcagggaatgtgcatccgagagcacccaacatagcccatctgctgtggattacttcaagctcacggttcttagcgaatgtctccgggtcagccgagagtccagcggtgtcccaaccgtagtctccggggtattctccagttaagtaagacggtgtgttctccgagaatggtcccaagtacttgggacggtctggtccatacctgttacaaaattatattgcatttggtgattagacagatctaaacaactaaggattacttaagacatatacgagggagagaggataaatttggtaccagatgctttggggagtagacttgacggtacgacgcatggtcacacggccaccgcccaagacgcccaccttttggatgaggtcgctggagggcttgagagccgtttggccagcgaaggaggattgttggatagctgatgtggccataatcgtaatctttgtttaactacaatgaaaggaaaggattgaagagagagtgtgagttatgatgggatggtgaaaccaattgggttttataacagagtgattttcatgttaggggattatcaaatgtacacgtcagagggttctgattcgttgaaagagtttagtttagatttcattggtcctgtgaggagattggtaatggttgtggtggtgccatctggcaatggaagatcttgtgcttcagtgagaggatagtgtttaacacttattttattggattgtttttttggctattctttgtgatgatatatcaataatcctatcttcgattgcgtttctttatcttttatcttaaaccgtgatgactactctactcgaccagaccggtttgaacataaaatttcaaactgtgggttttaaaactttaattacaaaacaaaaatggatgtattatggattggtttanatcaaactatatgatgatatgtactggaggatccagaggtctatgattcttagttgctattagagatgctttggttcttcactatatattatttcttgcatgattcgctatgtcactctaaatcatatataaaagccaacactaagcagatcaagaagtcaaactaagtaaaatagaaaacatatatttcacagaacatgccatgcgcttacctatcttaaatatttttccttggcaatggctcttacaagagtcacataatggtagagaaagattacatttgctaaaaaatcgaacctttagtttcttacagagtttttatatatatgggcctcccaaattaggcttaggtcatgagccattacaatgcaaacacagttacaaaattgagaaactcagacgtataagtcatttattcagattgctattattatatatataatattacaacggttcataaaataaaccaatagttgtaatggtttgtcaaataaactaaaaattgcaatgatttaattaaactgttataacagtttattta

SEQ ID NO: 17332 - DNA, 1170 bp, Arabidopsis thaliana landsberg
aaagcccttacgagagtgatattaaataattctggttttcttacaatttgaaatgacggaaatgtccttggactattgttgtatttaccggaagattccactggaggaagtctttttaagatgggggaattgacgaggtcgttaatgggctattgggctttatgatgttgttgggtctgttattcgattccatgctcagtttcggttcaacttcaacggtatggtagaacaaaaatgagtaacaagtattatctatttcatccaaattttcttttcatgtaactttcgacatacttgggtatattaaacaaaacaacataaaacattctgtaaacggtacgcaaacttttaacatctattatcacattcacagacagtcaaagatggctaaaacgctcttatggctcgacaatgatcttcccagtagcatggccatcgatacttttggcccaagcatcctccgctttgctcaaaggatgctttgagtcaatcactgtcttcactttcccttctttcactagattcaccataaactccaaattctcagcttttgggatcaacaagagtggcactaactgcttctttgacatggttattttcttaaccgcataagtccacattgcattaggccccggtgtgatgtctatcaccttcccgttttccgacaaatttggttcgaataccgaaaatggaatcccgtttgcacaatggaccacagcgtcatattttttacccgacggactcttgagggcggctccctcgggagtcttgtagtcgagaacctcatccgctcccaacgatttgacaaactctatgttccgggcaccacatgtagcggttacgtgagcatttgcaagttttgccagctggactgcatagtgaccaaccccaccagatgctgctgtgaccaggatgttcgccttcttgcctgtaccatccagcttcaaccccgcaggattagtaagagcttggagagcggttagacccgccacaggtaaagctgctgcttcagctgctcccacttcttgaggtcttttgacagtcagcttctcggttgcaacagcgaactcagcaagtccacctccaccctgaaagaacaaaatcagtttcccttaacatgtttcaaggtaattaaagtttctacttgtctgtctgaaaaaacttactaga

SEQ ID NO: 17333 - DNA, 2716 bp, Arabidopsis thaliana landsberg
ggaacggaaaaaatgatcactaccgtcaaaagtttgtcacaagagatacatgctcaaaaattcgcaacactaagcctacgatggacggatacaaagggatctgtttcttttactttaccctaagtactcctttctcagttggctagcttcaaaaaacagagttgccacgggagacagaatgtttaaatggaatcaacaagtgaacacaaactgcatgttatgtcacgaacctatggaaacaagacaccatcttttttttgggtgctcttactcgcagaaggtatgggagaagctgataaggggaatactacttgataagtactcgacatattggagggaagtctttaaaaccatttgtgacaaaaactatgacaaaacaaaaatcttcattctacggtatgtcttccaaaacacggttcattcgatttggggagaaagaaatgcttgaaagcatggtgaacaaccatcaccaatggagaaacttgtcaagttaattgacaaaaatgtttggaaccggctgagcacaatacggagtggggggagctttgaagtatgaaggaggtcttcaagtttggtttggtacaagacaagcttaagaccaaatcctctgttttagatttgtttttcaaaaaagtatgcattaagttgtaaacacgtttatttctctttttaaaatctaatctaaaaattttctttttaaaaacgacatagaaaaatccaactgtatattttaaatccataaacatgaattctaaagccgcaagtccaaaaatttagagatgacatcatagcaagcaaggacacgcaagaattaatgaaatttataatggagataacaaagcatgaatatttataatttggaaactgttttaccttaaattagatagtttacgatacattcaaagctaaaacacttatttacaatgaaaagtgatcaatgtttcttgaatgggtttggctacttcttctcatatggttggaccggggcatatatgagcttttacgtggtattcgtggacccatgaccatatgagcttcttcatgtggccttagagtgtggattcttccctcggatccacaccatccattgaagtgtgttataaaatttccccatgatccgtcatggcttttgtgcttaagttgtcatggtgggaattaccttgaggtgccacattcgtgcttaagtgggccgtaagtgcaattgcgttgtgctccaaaaggaacggtgccgtgggttcctcttgttcatcagaaatatattaattagccgtaaaacctgaaaattcacaagcatttggattgttttctaatttaatatccattatgtgactaaaagttctagtgatcgtacatactacatagaaaataataacacaaaatactagtttacatttcccaattaaaaaccattttgaatgaactctgtctgatttaattatacttttaaaatgtgggatgaattcaaagattatacttatattcttattatttaagattatcaagtggaaaaataaaaatatgaatgtgttaatataaggtaatagaaatttaatcattttttaatctatatgtaaaaagtatttaaccgatatctacaatttgacgcctcccaattgaaaggagccaaaagcaaccgatcaagtggagaccagtagccatacacattcactcctacccttacatgagaaagataagattatggagttttctgccacgtgatcttatcctagtggtccaaatcgataagggtgtcaacacctttccttaatcctgtggcaattaacgacgttatcatgaatcccggaccctttgatcattagggctagttgcctctagcggttcccactatataaagatgacaaaaccaacagacaaacaagtaagtaagagaaaaaccaaaagaagaagagaaacaacaagaagaagtaatggcttcctctatgctctcctccaccgctgtggttacctccccggctcaagccaccatggtcgctccattcaccggcttgaagtcatccgcttctttcccggtcacccgcaaggccaacaacgacattacttccatcacaaacaacggaggaagagttagctgcatgaaggtaaatgtcattaatgaaaactgtcttttgtcatgtgcaattagtgcaactgaacaatactttagaataattgggaattcgaatttataggtgtggccaccaatcggaaagaagaagtttgagactctatcttacctccctgaccttagtgacgttgaattggctaaggaagttgactaccttctccgcaacaagtggattccttgtgttgaattcgagttggaggtaatatacactgaacttttcctttgtctctaagcatcctttattcttcttcttcattgctagaaacttaagtggataaccgaaatagactatcaccaatatatatatcatcaattgtattgaatggttttctttatatatagcacggatttgtgtaccgtgagcacggaaacactcccggatactatgatggacgatactggacaatgtggaagcttccattgttcggatgcaccgactccgctcaagtgttgaaggaagttgaagaatgcaagaaggagtacccgggcgccttcattaggatcatcggattcgacaacacccgtcaagtccaatgcatcagtttcattgcctacaagcccccaagcttcaccgaagcttaatcccctgtc

SEQ ID NO: 17334 - DNA, 1590 bp, Arabidopsis thaliana landsberg
tgaacgcgtcacagtctcttgaacttgccttcattgttgcagaacggctcaggaagagaagaacgggtagccagcgtgtgtcttgagtccggttcttcccttttatacactttttgattccaaacaactcttttctctttgtcctgtgactgtgagttggtgtctttatgacttaagttaaaagcccaaaagcctctctaggaggagtaaacctgtttcagctgtggacagaccatgtcatgtcattgttctttatgttaactttaatgtcaaaccgtgtgacttacactagtgtatatttatttttacgtatctacacaaacatgaaacttgttctatagttagtactatagattgatcttcgtcttttagctattcgtaaactacataagaataaatttttagaaaataaacttccaaaatggcccattagctcagttggttcgagcgtcgtgctaataacgcgaaggtcgcaggttcgaaacctgcatgggccatttttcataatatctttttttttcttctgagtttcgtcgtaaataaacaatccgacgccgacggttttggggaccccccactaatcaatatcgtgtcccgctcacttaatccaaaatatgatcccctacatacctctttactctcttccggtgctcccaacaaccatacttcgtctcgatttccaccaggtgtttctacacttctctttattccacgtgtcatgatattggctcatagttactctcaattaccaaagactctcacacactagatcatacaataacacaacaatttaaatcaagcagtcaataatcagccaactagctttttaattttctctgcaattcctctgtcgttctcaccagttaacagctacagcacaaaactgtaaccacgcttccgatctctaaaacctgagagagagagagagacagagagacagagagacagagagaagtgtttcaatagtttggcgtgaagatggccggaggaggcggatacggcggcgcatcggggaaagttgattacgtcttcaaagttgttctaatcggagattcggctgttgggaaatcgcaactacttgctcgattcgctagagacgaattcagcatggattctaaagccaccatcggcgtcgagttccaaactcgtaccctctccattgaacaaaaaagcattaaggctcagatctgggataccgctggtcaggaaaggtacgatttctaagattctctgcgttttggaatcttaatccgaagaattttactggatctgtaaatgtttccatgaaagcgacttggtttgactagaagatgttgcatagatttgtttcctattttgtacatctactttatcttgaccagatcctgaatttgttatcatcgaagtgttttatcggatagaacaataaaggtaatctggaaaactatgtctaggaataatgctccatctcaattttgtgtgatttttagctgatttgaatctatttggctcatttctatatttggaacagaagatttgggattggtctttcgattcgtgactttgcttttgttgcacttagcagatacagagccgttacaagcgcatact

SEQ ID NO: 17335 - DNA, 1409 bp, Arabidopsis thaliana landsberg
ccaataggacatctctatatgcatatccattctccctctcctgattagagcagggtcaagtttcgccaagtgattcgtggtgaagacaatgatccgctcttgtccacaagcagaccagatcccgtcaatgaagttcaaaagtcccgagagtgttacgaaactcttgttttcttcattgtcttggtctccatcttttctccatatcatcaagttgctctctttcttctttcttttgccagtaagatccaacgagcaatcaatgtcttcaatcacgataatcgacttattagaagtagcagtgagtagtttcctcaactctgagttgttctgtatagccgggagttcaagatcgtagatactatagttcaaaagattcgccattgcagcgatcattgttgatttaccggttcccggtggtccatagagcaagtaacccctcttccaagctttcccaatcttcttgtaataatctttaccgttattaaacgcagcaagatcattcaagatctgctctttcttcttcggatccatagctaacgtctcgaaagtcgcaggatgctcaaagtcaatatatctccaaaaactagtcttgctggatccccaatgagaactcggattgtttgtgaacaacttcatcttcttgttcttagcatcaatagatttgccttcttcaacaacatattttatgtaagagttggttacaatatctcgcgagcgtctatggaaagtgagcttcaatgttttatatcctgcggagtcggtttccatctcccaccagacacgaattccttcatactcatctcggactttagtctcgtctcgttttaaaaccaagcccttactctctctaacctggcttgctcttagatgcttggctttatcagttgcttttgctccaaggtaagtctcgatagggtcgaaagcgtgattgactcgataatcttcgtattcagagaagttgatttggacataaggtgagaaaaaattaatgaatctgtcggaaaatctctggagaaaagagatttgttggattgtagagagcaaaaactccttaatggcgatcttaaggtggttagggaagatttgttgaatagttgcccacaagaagaacaaactcgccaagcttgaaccaaacatatttcccatcattttaatctttagatcaaatcctctcttgttttatatgagttggttgtgtttggctatgagtatatatagtgtctattacttgcaaaagtaatgtgtgtgttccaagacaaacaagaacaaagctttctatgtttcgactttggaagtccttgttctgcaagttatgtactacccccttacaaatcctgttactgattcttttcaaataatggttcaacgaataattatgagttgccataatttgactcatatgtcttttc

SEQ ID NO: 17336 - DNA, 760 bp, Arabidopsis thaliana landsberg
agaaagatgattggtcaataccatttttttttttaaggaatgtaaaattatattcacccaaaaaaacgttggttgcaatgaatgcgccatgatttaaaagaatctaaaagaattaagaaaatttagaatgatttctagctatgaatttgaaatcaaaactgcagcccaccttggagtcatggatttccagaatttatagccgtgctgaatctgtttcgtatatttttctcgatgatctttgcaagtttcattaccgggataacaggcttcccatgtcgcctactattacgctctcgccataaactgtggatcgttgcttggaaagtataacgaagagtgaagagatgtaaatactgacgagatgaatcgagcagatgtggagtgataaggctccaactcgagatgtttctaccatgaagaagaccttttgtcaaagagcaccagatttgagaggaatagtgacaagaaaaaagaggtgatctcgtgtctccaaaagtaaataagtgttttataaagtggtataggcattcaagcattgcttagatggccgccgaaatttgtttagtcttcatttttgtgtattttcaaaatttcaactaagttttatttctgtatacataattataaatgttcatatattgtttgatataatttaaagaaatgttttttttaataatatctttagtatcacttatgtctgttaaatttttggttaataagaaataaaaagtttatagggtaaaatatggtaaaaaatatt

SEQ ID NO: 17337 - DNA, 1935 bp, Arabidopsis thaliana landsberg
atatgtgataacacacgtagacgaacctgaagcatttactcttactcaagacttctctttaatcctccgcccaggaatctcagagaatcctccttcaattccaattcaaagctccttccttttttcacatctctcttcttcaaattcaatcatcataaaaatcgaatctttattcttcagagagcttcaatggcgaccacatcatcaaacccattactactttcttcaaatttcctcggttctcaaattataatctcagctccaacaccaaaaaccaccacaaagtctcttcctttctcagtaatctctcgaaaaagataccaaatttctcaatcggagaagctaatgaaatcgttaccatcacaagctgcgttagcagctctgttgttctcatcttcatctccacaagctttagcagttaacgaaccagttcaaccaccagcaccaaccattactgctgaagctcaatcaccaaatctgtcgacttttggtcaaaacgttttgatgacagcaccgaatccacaagctcaatcatcagatcttcctgatggaacacaatggcgatacagtgagtttctaaatgctgtgaagaaaggtaaagttgagagagtgaagtttagtaaagatggttctgttcttcagttaacagctgttgataatcgtcgtgctactgttattgttcctaatgatcctgatttgattgatatcttggcgatgaatggtgttgatatatctgtttctgaaggagaaggtggaaatgggttgtttgatttcattggtaatttgctttttcctttgttggcttttggagggttgttttatctctttagaggaggtcaaggaggtgctggtggtcctggaggtttaggaggtcctatggatttcggaagatcgaaatcgaagtttcaggaagtgcctgaaaccggtgtgacatttggtgatgttgctggagctgatcaagctaagcttgagttacaagaagttgttgatttcttgaagaatcctgataagtatactgcgttaggtgctaagattcctaaaggttgtttgttggttggtccaccgggtacggggaagacgcttttggctagagctgtggctggagaagctggagtgccgttcttttcgtgtgctgcttcggagtttgttgagctttttgttggtgtgggtgcttctagagttagggatttatttgagaaggcgaaatcgaaagctccttgtattgtgtttattgatgagattgatgctgttggtagacaaagaggagctgggatgggtggtggaaatgatgagagggaacagactattaatcagcttttgactgagatggatgggttttctggtaactctggtgtcattgtgttggctgccactaatagaccggatgttcttgactccgcgttgctgagacctggtagatttgaccggcaagtcacagtggataggcctgatgtagccggaagagttcagatccttaaggtttcttcttgctttcattttctgttagagtgaaacaatggagacagtgtggtgaataatgttgtgtggtttattgcaggtgcattctagaggaaaagctattgggaaggatgttgattacgagaaagttgcgaggagaactccgggtttcactggtgctgatttgcagaacctgatgaatgaagctgcgattcttgcggctagacgtgagcttaaggagataagcaaggatgaaatatctgatgctcttgagaggatcattgctggacctgaaaagaagaacgctgttgtctctgaggagaagaaaagacttgttgcttaccatggttagatactactgatcctagctacttcttgtgttattattgtgttgaccactcactgttcaataaaattggaatttgcagaggctgggcatgctttaattggtgcacttatgccggagtatgatccagt

SEQ ID NO: 17338 - DNA, 939 bp, Arabidopsis thaliana landsberg
  unsure (1)..(939): unsure at all n locations
tcacattaatctacaatgataaagatataaaattattactttttctaatttttgtacggaaaataaaggaagggttggtaccttttgcaatccccgttgttgtgattccacagacacatccgcgatgattgacggaaagattttttgccaacttacctgaatagataaacaatataagaaaaaaggataaatgtgtatattattatgatttcatgtagtttgtcacacacttacatgattcataagatttgccacgagcgatgaagcatcacatgggacaaaagcagaagctcttgatacctcatgtacaaacccgggtgcgtttcttgcgtaccaaggaaataatttagagtagtattcgtcgagattcaatctcccgttacttgtccacatcggagttctttgcctcgcaagaaaaacaacttctttcagcgaaagtgacgtcataaccgccactccgtaacccacttcagtcaaagacgtagcaaatgcgggatataggttcctgaacgaatttaatctccatatgaaacaagtcaatgtatcaatctcggaccgaagacgagcattctccaaccatagctccctctcttcggttgaaatgatgggctcctcacaagatctgcagattgatggagaggtcatagcatgaatccnnnnnnnnnnnnnnnnnnnnnnnnnnnnnnnnnnnnggtggagaaaaatcctcgtttgaagatgatgatacatatctgaccttttcatgtgttatagtcaaagaaaaaaacaaaaaacaaaaaagttaaacaactattgtgaatttgtgatatgttgtttaaaaaataaaacctcgtttgtttaacataaaacctaaattgaaaagaattgaaactttaaacgaagatttaagaaaccatacctaccttgataaactcacagaactcctcaaacgatgaatct

SEQ ID NO: 17339 - DNA, 589 bp, Arabidopsis thaliana landsberg
  unsure (1)..(589): unsure at all n locations
ttattgtgctccgaacaaaggttatctgtgtcgaccaggtaaagttatagagaagctagggtttgtactcttgtaaccgcttaagagttaagagtgattctaaactaataaaataaaaatcctacgaaattaattggtgccaatagcttggcgatgctacttaaaatttataacatacagatatttttttctctattaatactttaaaatctaatttgattatcaaatatgtgtttttagaaacatattgtagcaatattgaatttgaattattgattactactataaaccgtacaaactaggcaaagtaccaacaataagatagaaaatagggggcggtcttcaaattacatcatgtagacaacttagtcatgttgtctcaatgtctaatcatgccaccgggaactaggtaacctgcgaaaaaatcacacacatatgaaatgtataatctataagataccacaacctaataactntaaacttatatactaatgaaatgaatgtattaaattttgcaaaccaaattacatttgacccgattnnaataattttaaatatgggagaaattgggggacctttacctttcccg

SEQ ID NO: 17340 - DNA, 2570 bp, Arabidopsis thaliana landsberg
  unsure (1)..(2570): unsure at all n locations
gtttgattttctgtaataatgccaatactatccctgtttgaaatacacgctcttcatcttctcgctttcttagaaaaccaattatcctctttcattaactattaacttttaaacatgggtttggctctaataaattccagtccaccgtttatgaagcttttgattttgccaacgattaacagaggtgtattgggcacagaagcaagacagttaattttcggaaatgacatttcggttttgctcgaaattgaattagaggttttgatttacacaggcaagacttcagattttgttggagtctttggtttttttaagagactttggttttgttttctgaaattgaattagtcgagattctcgctaataagcgctnnnnnnnnnnnnnnnnnnnnnnnnnnttccttcatttgatttctttttttgggtctctctaatttattggcgtcgttgtactttctgggtatactatttacgtatactttgttctatatacgttttaaaatgaattgtttgttttgattaaagttgttaagtgatttcattaatgttttagatttaaacccttgggttccctatatattatctctttagggtttagtatacttccatcaaaaaatattgtcaatttatatagaacgttatgttattcattgacaacactattcacatctaaattattttgtgtctgttttcaaaaatttaagtcatgatatatgtagaaaactatacaactttttaatagatatatcatgaacttgaattaaattttttaagatcagataatatgagttacaattgaaaaggggtaaagaaaaaagaaagagaaaagagaacttctctcctaccacctatttctcttttcacctcaacaccaataataaagctatgtcagctcacactaatcattctccttcttcgctgacgaagcgtaacaccagaacagtgatgtctttttactctccttgaaggttatttactacatttacaaatttatggtgttagttagttaattatttagtaaaaaagtgatatatctgaaattaccctattttataagagacaaaaaaaaactgattttccataatctcccaatctattttccaatgtttattgacaatgattttatttcctatatcgaaaatgagtttcttgaaaaagttttatctaaaaatttctcataatatctagttatctatcattcttaaccatttatctctcatggttaagaatctcttctattttatagaaacataaaatataagagattgccttcattcaattagtattatcggtagtaaaacttcggatactgatttttttttttgattaattcattaattatgagagctagtaaagatgaattttatacattcgtcacatatgtttaaacttatacggcgtcgtttcaaagacgacatgaaactaaaacgaggaacaaaacaaccaatcacgccatcgctaacagtaataataatcaaacacggtaagtacgagattcttcttaccgaatcaaccgttaaaaatcacatcaaaagtatatacgatcgagattccgccacgtagataactcactgtagatctaaccacactggataattagatatttttttcttttttcttttcaatgagtacagttcagccacgtctgtctctcagaccaaaacgcaagtatcgtcctttgttttgtttctttcttcatcgttgatttgtcaactcaacaacgcccaaaccctaaaacaatccccaatcatcgtttcaataatcaaatttccccaattgaagaataaagatcaaaactttggaagttttcctgtgaaaataatctatcctttttgcatcatttgcgttttggttgatgaagaggatctgaagaagctgagatttaggaatgatgatgggttttgctgtatcggatgaattgttgggtactgttgctccgattgtggtgtactggttgtattctgggatttatgtagcgctctcctctttagagagttatagattgcattcaaaggttgaagaagaagagaagaatcttgtatcgaaatcttctgttgtgaaaggtgttcttgttcaacaggttgttcaagctgttgtcgctatccttttgttcacggtaccgtttttctcttttcccatttttgagttgttttgcttttgtgaaattgaagtgaaaagttaggtaaaacatattggggaattttgatatctgacgctgactttttatgtgtggaattggatggttaagatttttgtttttaaaaaggttaactttttgggttgatgttgtctttcgacccataaagagaaatgggttatgtattaatgatcttaaagttggatcatatattgactgttctaacaatagttaagagctttagaggaaagtatcaatagggattgttctgtgatttggcaatagggtttagacttggcagaccttattaggctgctctagaattcaaccaaagactctatcttaagctccgttggtcctctgttccttacttgtgttagattcagagaggactggttcttatcagcttatctgatgagaaaaccaacaaaca

SEQ ID NO: 17341 - DNA, 1736 bp, Arabidopsis thaliana landsberg
gttttggttgggacgtaggacataacaatttgcttaagtaatggaataatgaatgatttttttgttggaatgcggttttgagcaaaaacactaggtaaatggtttttcttcttttgaaaagcattccagtgtattgtctttaggacaaaattgcaaatttttttctttttttttcgaaaaacgcaaatttgttaaaagtattgattggtaattgtattgtagttttaataaaaaaacaagaaaacgccttttgtatgtttcttaatcacagtctatgaatagtgacatagaccgcccccaaaaccgtaccataactgtaacagtataaaaaatctctatatatacatatatatctatgtatttttgttattatttgaaccgccccatacttttcccgtatcacaaaatacagtcatcattcgaaccccaaaactatatatactatttcggtttttgaattcaaaatgaaggagaagaggaataggcagattaatataatttcgttatttctttttaatttcctatcttcaatttttcctcacccactgaatttgactatgccattaaaaatgtgtatactaatcatcataccttcaataaatagagtttgtgggaaacacacgacagacacgtcatcagctctcgacggcgcgtttccatgcctttattatccttcacgttgaccccacatgccccttttttttttttttggtgttctacggtatatttttgtgaaaatgttacttttcatctactcgataaaattcttaaacagatagtacaactttttacccgattaatccgtagaaaatacaatgttacttacactcaacaaacatttccattaatagaactttacccgatttaaaccactcttccactcgattaatattattattttattaattaaatatacgatgacgtgtccatgagagatgagctttagtggcacgcaacgtaagagaagaagacaaaagtaaaaaagagaaaggcacatgtcgaactcacgtgtccacttaaacgcaccaccttcttctgtgctctccacgcgcctccacacgccctcctcaacttcggaccttcttcctccaaaaaaaacaatttcactcttcattttctcagattctcttattatttcttctactcgtttcgaatcctaatcgtctacagtttccgacgagattctcaccggagaaagaaaggtagttcttttctctgaatctgttgtgttgagaacttagccgtaatttttgagaattattcttcactatttgatttgacaagaatatgggtaataaagacagaatctaaaacacttgcttcagtttttgaggaatcaaaaatcacacgaaagttttctttttcttttttctgctcctatgtttcttggtgggtttgtgtttatttgacattaggagtgattgattgattataaagatgaatgatttgttagattcattaagatcactgttctttttgattaatcatcttatatctaaattttaggtgacttgacagacaatcttgttctgtaataaaagcaaagatggtatcgaaaactccttctacatcgtctgatgaagcaaatgctactgctgatgataagtgattcttaaggagacaattcttgggaaattagattttggaaaccccttttttttttatttattgggggcatggatttatgtttcggtgttattacataacaaaaattttacatcatatggcttgctatt

SEQ ID NO: 17342 - DNA, 3985 bp, Arabidopsis thaliana landsberg
aggtaagagatgtgatgatgaagaacctgtatataaaataggattattgagaaggtattcaagaataccaaattcattaaatagaagattaattctttaaataaaagattataagagtctctttttataccgatttcattaacttctcgtaaacgcttgttcttgagcaaaaatgatcgcggaacatttactgcaggcattaaatgttcgatgtcccagggtgacacttttttaggtcccggaaatgatgtaaattcatcccactgcacctgcaaaattaaagttaattagtgatatgttatttattgcactcaaaaacgtattcctaaaataatgttataaagtgtgaatgaaattttacttctaagctgcgccactctgaacatttccaatgaggagagaaatcactaactccaataattgtcccaaaacatcttaatcaattgaacaatatgtgttatcatagataatattagacattataaatatatttaagcagaaaaaaaatttcatctaatgttaccttctttcagagaaatcatcaccctctaaccgcattgtaaatcttgaaccgacattgaacttattgttcacagcgtctaagaatttgtcgtaactgacaataaatttacttgacctgatacttataaagacacaaaatataaacctacatgttgaagggactaatctattgatatatcaatataatctaaaatgtgagttcaaatggttctttgaattaccttggtttgtaaaccacaatgaacatacattggttatcaaaagcatgctttgcggaagcaatcaccccatgtctcatactttctattgatactattgatgaaggtatattcccttgttgacgtcttgctcgtctgataccaactcgtaactctccagtctctcccctgaaaacataagtaaatagtttaaagcccaaaactcaagaacacaaagatatataaaaagaaccaatattatacctagtgaatacaataacatcccctacaaccaatttttttgatgttgtgaatgcattccaaccagttgttaacaaatgtctctgcggggtacctgcaaggaataagaagcttattaattacttctctaggatttattaccttaatagctgtgtttgaattatatgaataaaaggaattattacctctatagctgtgtttgaatctccattgattactatgaagatctatagcaataagttcttgtgtcggtagaggctgtgacatatcctaaaccaaaatttaatatgtaatgtctaatgaaagcttaaaattcaaattcgtttaaaaaactataaaattaaataccagcggagggagacattcaatggcatgtttacatggaacagggaattcaccatgagcgcttgtatctgaagccgttaaaacctttgtaaaggaattaactattggcctaaattgattttcattctcaatagggattacaacttgctaaaaatttaacaaaatcagaaaatcaatgcgatataatagtagtaaaatagaattaacttaaaaataaaacagaaatactaaatttttacttacagttgtatctggcatcaaagtaatctcaacataagtctcatcactattgttttccacctaaaatcaaacatcaaacaattaaccaattacttttttatataattaaatcaaccatagaaattatgcgtattcgcaaaaacataatagagatataccttaagatgaatagcaataacacgacattgaagcttagaaggaagatcacaaattggttttaactcattcaactcttctcttgtagatgcctcaacctgaaaaaagtcgtcaaaaggttttgatacacgagagagagggagagagagatagggagaaagaagagagagagagagagaagagggagagaagagagggagagagaaagaagagagagagagagagagagagagagagagagagagagagagaagagagggaagagagaaagaagagagagagagagagagaaaaaaaaaaaaaaaaaaaaaaaaggagagaactcacaagctctatatggccttgaggaaagtaataaaccttttctccaagttttggaatatcacacaaaggtccttcacagagtttccataactgctcgtacatatagctcttggacccatcaactgccgaacaaaaaccaaaacattataaccaaataagtttttaataaaataaaataaaaaagtcaaaatttcttacttatgccagataattcagactgtacattcataacattgccactttccataagctcgtatccaaagattggtatagaaaatatgttatctcaacagttattatacaactttctccttttcttcaacttctcgcgctaccatgaaagcgcataatatcacatttataggtgagaaatatcaaaatacattaaaatacttccttagatttgaatactaaatttaataaggttaccaaaaattaataaaggtaatttagagaaatgtcattaatattttgactacacataagaaaatcaaatttcttatatttttattgattaagttaccaaaatcaacatatgcattattcatatataagttgagtaatataatacatttttaatacttacaatgaaaaaaaatctttgaattttgtttatagatagccatataaatttaaataggagttcttgctagctttttattttcaacatatgcattagtgtcgtggtcatgcctttcatataggaactatagaaaaattttagctttttcttacaacatctgcattattcatatataaaaaacattctatgaaatttgtttaaaagtagccatataaattttaaatatgagtttttgcttgattctgattgcattaataggaattctctagcattgtgatcaaacctttcatatgggatctatggtacatctcatgttaggttattttttttttgcttcctctttaagtttttaaggatcccatgtaaaccggctttctcatatattgtcgctctttggagaaatttccaagggcatgttctcttttccatttagctttccctttccaattagctatgatgtgaatttgcatgtatcccatggctattgggatgtccttggcatcaggggtggatcaatggtggtggtgatggtttgaccttacaaggggatgtggcttatagtatgataaattccatcaaaaatgtacaagggcttctcgctccctctaaacctgaatgtcatttaagcatttttgctctatgttttatattgatgattataatagttattaatgatattatttagcttatagaatttgttttttattaaattattaattgaataaacttatttaattcattaattcaataatttaaatgactaatcgttttctccaaaccatttgctaaatgaattagattgactcattatccattagaaactaaatttgtatggatatagattggtttgatttggtttaaccacttgacatccgtaaatatacacccacaaaaaaaaacttataacactcctgtccgacagtcggtgcgccacgtccgggaggttttaaagacttgttaccggccctacaaatcaccacatgatctttccccatgctttgtcctcactcgcatggttccgacaatcacttccgggtaggtcacccatcttgaaactactctaaccaaagcacacttaactttgaagttctctcaggacttttgaccgaaaagataagtgcacttttgtgacataggtggccaaatcaattattttaaacctctctgcatgcactagcatattcctgaaactggggtactataatatgttttattattttgatgtgttcattaatgtttcattctttacgacttttctctaacgataagtagcaactatgatgattcgtattgaaaggatgtagttacatactttttaggttgatattaactttaactttttagggttttttagaac

SEQ ID NO: 17343 - DNA, 1263 bp, Arabidopsis thaliana landsberg
gaaccacctacccgactagtgtcgttgcctatatacccggcaattcactcactcgtttctatatttggagatttctctccaactgatctgatcaactacaattattttcttccgctggtgcttttctcgccaaagttgcactgtttaacgccgtctgattcgctgcttttctcgccgtttaacgccgtctactccgcctctgcaattgacgcaacgaacaagagaaaatgataatttctcatgattcattgtaacaagattcatcttggctccggtcctcttctctcctctcaggttcgctctctattccctaattgcttgggttccctaattacaatccttagggtatatatttttaaaaatgcttacctccatagaacacatgtcgtctaagtcactttctcatggggttccctattttccaattcttagagtttatatttgaaattctcaaaacctccatactgtaacaagatttacaatttattcacatttgatgctctctgttacgcttatgtctaccaatgccattgtcttcacaaaagcttctctcacgtcgttcctcaatagaacatctcacgcgaaaacaaagcttcctctttcaagagtaatttagtctttccagattgttgaaagtgcccaatctcataagcccattttgattgtgccttatcttaaatttatggccaaaaaaatatctcatccggcattagcaaaattattacattacatatgtcctagtcgaaaagcaaaaattttatagagaaaaaattagaaatatgattatggctgaacaagttaaacaatcaaatttgggacaattgtgtacatcatacatatacagacccaaaaaaataagtatatagtatattataacagaacaggattataacattaaacaaaatcaaagattccaaattatataatcgaaagaaaccacaatttaaaattcttgaaacgttgacaatgaactttcgttttataatcactcaccagactttcgttttaacaatatcagtttctaaataaaggacaacgcgataagtgtagcaatcaagccacgtttgttgacttcgaaacgcgtaagatacgcgagacaagctaagaaagtacatatcaaataaaaaagataaccacttggtcttataatatagacctatctaccgatccatactttattattttatttaccgtacagataataatcatcatctcccactttttttttttggtatgaaattcatttcccgctgttcacagcca

SEQ ID NO: 17344 - DNA, 1073 bp, Arabidopsis thaliana landsberg
gcgggactacagggtaaccgagtgggagcttgtttcatttttagagacctagggcattatgctaacgcatgcgcgaacaggcaaataaagcagtataaccaaatggttaaccacccaccgccagttcagaaagctaagggaccaccggtaaagaagcaagccactctagcaaatgtttatgccttagatgtagaacctaccaaaccttcatgacccgcaaaaggtcccgtaacaggttagtatgggttcttacttttcttatttatgcgtgtttgagtgattgatcgttgtgtgcgtagtttactagattaaatattgcatacatcattttcatttgcattagggacattacttgttggtggtaaccccacacatgtattgttcaattctggagcgacaaatagttttgttagttctgacgtggccgataagtttgtgccatgggtatgagaaaagagaagtgaatgttttggtacataccgcgggaaatcatccacccttgtagacccgagttgtgttagtaggagttccagtagttatccaggatacgatcctaccggcaaaccttttgggaatgccgatggaaaggtttgaagttatctttggaatggattggttgtcaggatatcatgcccatttagattgtaggcggagcagagtagcgttcgaactaaggaatcgaccacgactcacttactgtggaatcaatccaagtaagattgcttcgttcgtgtcagcaccgaaggttgagaatttactatgggaaggagaagtctaccttgtcactttaaccgccgttggtggagaagttgaaggtgactcaaggattgaagagatcgcggttgtcaacgaatttgaagatgtgttcaagcccttggaaggattacctccaccgagaaatcatttgtttaccattaatcttgaactgggggtgactccaattacaagggcaccatataggatgccaccagttgagcttgcagatcttaaaaaacaattggaggatctactcgaaaagagaattaatcgtccaagttcatcgccatggggagcttcggtattgtttgttagaa

SEQ ID NO: 17345 - DNA, 469 bp, Arabidopsis thaliana landsberg
tcgatgttttgcattgcttgtaagagaaaccccccaactgagggtttcacctcatttccaacgttgatgtaccgtaatctgacaccatctctgtagctctgaacgttttcttgaacccacttgtcggcctccgtttgactggaggcgagacgttcaagatctgaactgggaacgtcgaggatgagctcgatgtcagagccacggagagcggcaagagcgcctgggtcagggccgtagagccgcattcgctggatgttttgttgtttgtaaagagccacaacgtccgatggacttggcaaggtatcgcctagcatcccgtagcatactccgatttgtccagcttcattttccaaaataagaatcattaaattgaataaatttgtgaagatggagatgattaatagatgttcaatagcttaaaaaatgactgaacctgtggggttgaagaaggaagctattacaaggctga

SEQ ID NO: 17346 - DNA, 948 bp, Arabidopsis thaliana landsberg
tcttgctgttgcgggtgcgggtgcggctcctcttgctgtggcgggtgcgggtcctcttgctgttgcgggggctggtgcgggtcctcttgctgttgcgggggctggtgcgggtcctcttgctgttgtgggtgcgggcgcggctcctcttgctgtggcaggtgctggtcttcctatggatcagaatcagtatgagccgattcagccctatatccctactgcttttagtgataatattcaataccaagctcctgtggattttaatcatcagatccaacatggaatctatgataatttcagtttggatccaaatcatcagtatccgtttcaagatgatccattcatggagatgttgatggaatatccttatgaacaagtgggttatgctggagagcatgcacacatccctttcatgaacggaaaccactacaactaccaccaaccaccacccgttggtcttactaccaccggtcacatgccttccaacaacgccaccaccaccaccaccaccaccaacaccaccgatgtgtgatgtgtttcagtagtttgcatttgtgttttgttcatttcaaaagaccaatctctaattatgtcttttcttttcagttaattgttgtaagagttgaaggttttacctttaagtcagttctatttttatgtattgggtaatgtatttctgcgccgtggagccggaaatttcaattatatttgaagaagtttggtcataaatttgtttttactttgttttttgttcttaaaatacataactaaatagatctgccaaaatcaaatatattttgtttcaaagaaaatcttacttttgatacattattggcaaaaacatcaatactctgtatatctctttctcaatccatagtttatttactcccacacgtacttatatacgagcaaatgacacactatagaagtaaaacatgaccataataatga

SEQ ID NO: 17347 - DNA, 1409 bp, Arabidopsis thaliana landsberg
tatatataaaatctaatcatctaactacttagttttcatatgtggatgagagaagaacaacaaaagcaagaagacattttgtgttaagaaagcaaaacaagattactcatctttgaattctttggttggacattgcctcaaagcatccgcttgctctctttcgtcaagtgaataaaggcaagttggtaatgagatgagactctgatcccacatgacaaaaaatggctgagagaagtttctatttaattccatagagtttgtggtgaaacattcactgtcttgatgtgaaaggggttcgttcctcaggagcccaccaagagaaggagaagaatcttgtgtggtcgtttgctgcatctccattacttcatgttaccaaaagaatacaaaaaaaccccaaacataggttcaggaacagatgatgattatagaaataacaatcttatattatctgacaacaaagtggtaacagtacatcaaaactaggattcttgactgtctctagctatgtgtcagttcctaatatcttccacagagagaaggaaataatgatcatatgccaacataaagaaaatcaaatctttttaaagcacccctaagtgtatcataacatgagaaaaataaacctttaaaggaaagatcactcgattttcacaaagataacaatcacagtgctctgcctctgattaccaagtaacgtttaatgttcaattgccccgagtgaaaccattaccagttatttcaagaagatcataaactctacactcttttttgaagaacccattgtttagatgtcgtaagtagtccagtttcgtctgaaatctctgtctctctaaagtatccaattcaatgaaatcaacaggaatgtggcaatgtgcccataaatcaacattcaaaacatcgaaaacaaagtctcttctttggaaaaaaaaaaaaaaaaaaaaaacctcttctttgtgtctctttcctaaacacaaaacgaacaagcaccacataaacataacaaaagcaaatcaattcatcatctaaaaccgctccaagagaatcactaaattgtgatcaatgacgacggtccacggcgagatcaaggagacggcgccgtgtaaaaatttcacctttgaatttgattgaggagggacatattccacacgtggcacctaaagagtggttaatgataagtatcgacgcaaagtaagtatttaacaatgattaaataaaaatatgaaacaaagaacaatattgggctttcaaattggcgggttgagccaggcccatgcagtagtgcaacgcattggccactcgtgaaagcccagatagcaagctatcttaacgggctatgacccttaaaaatagagttaatatcgtgtgggccgatggcccacatatcagagattatactgataaaaacagat

SEQ ID NO: 17348 - DNA, 1513 bp, Arabidopsis thaliana landsberg
gccttacgaggcggtggagccgctagcttctgtgttgtcttagcttggaagatcaagctagttcctgtcccggagaaagttacagtctttaacgttgaaacaatcggaaacagaggagtaatccctaccgatcttgcagcgaaatggcaagagatcgccgacaagatcgataacgatttgttcgtaagattaacgttgagctcaagtaacaagacggtcaaggcttctttcatgggaatgtacttaggaaactccgagaagcttctagagattatgaacgccaaattcccggaactcggtctgaacaaaacagagtgcatagaaatgaaatggatcgattcggttctgttctggcttagtatctcaccgggtacatcaccaacatcggtcatgctaaaccgaatcccacaaaagcaaatctaccttaaaagaaaatccgattacgtgcagaaaccgatctcaaaacccggtctagaatcgatattcaagattctttcagagaacgagaacgtgtcgatggcttggaacccatacggcgggagaatgagcgagattccggcgacagagacggcgtttcctcaccgagcagggaacatgtttaagattcagtactcatctaactggttcgtgccaggtgaagaagcggctagcgattgcttgagccaaacggaaagagtgttcgaggcaatgagcccttacgtgtctaagaatccaagagaagcgtttttgaactacagagatattgacattgggaagaacttgaactcaacgtacgaggaaggtaaagtgtatggagttaagtattttaagaataacttcgagaggttggttcaggttaagactagagttgatccggacaactttttccggtacgagcagagcattccagtgcacgttagccgttagagacattcttattatttgtgtcttgtattagtaatgttaaataatataatcttgtgggagaggagataattagtactttttttggtaacatcaattaaatgttatttaaatttgtatcttttgttgttattagagataaatgtaatattcttgtttaattaaatctgaaaatataagtgtcaaaaaggaaacaatgtattgttaattttgctctttttttaatttatttatttaaaatccaaaaattaaaaataaaatccaaaaattatgattgtagataattatgaaaatgcccattagaccattacaatatatttgccaaaattataaatagattttgatttttatttggaagaagaatttgttggatttgaagttttaaaattaactcaaagcatgattggtttatgtttattagactattagcaaatctaatcttttgacttagatttgctaagtgcgttgacccaaccaagaatcataagcaaaaaaatctgctaagtgggctgaacttgggcctcatcactcactaaatcacaaaacaaaaattaggaaaagtctttttcgtagaaaaaaatcggaaacctgtgtctgtgaccttggtgct

SEQ ID NO: 17349 - DNA, 2646 bp, Arabidopsis thaliana landsberg
tacaagtcaaacgctcccaaactaattctcggtattgaactaacggatctccatatacaaaattaatataaactcggtttccatcaataatagtttcagtatcaagaagccgatcactaacaaaaacaaacttaaccggataatctttcgaatacataagggcaagaccactactggtgccaatcggttcaactatttgaaggaaatcaaaacctaaagacacttgcatattttgtagatgcatgtgattgctcttggtttctgataaaaaaaacaaacatggggagtacattcgacacatctcctccagtcgacgagaggtaagatctgctcccaccccttgacaattccatgctaagattctcatgtgttagttccggaggtagagtcaaaccccaccgtactaacaattgaaaaggtaataaaattttgtaagatttgcttagattgactcaactcttaacataaataacttaaatgacacatgtttagtttcaaaaactgtagtaacccatatctttggtaaaaagacgaaataaccttaatgattaattgtaatcaaattaaaacaaaaaataaaaaataaaacaaatcttttatattttaaagcacaagtcactccaccaataaaattttgacaaatcagcaaaaccaaattatttttcaacagaattataaaaggaaaatttgcagatataacttaaaagcatttataaattaacaaactaaccaataaaaacaacctaacaatataacatatgtaatatatattattacaattttatccccaccactaacaccactaaccacaactacaaccaccgccgccggccaaccacctccgccgccggccaaccacctccaccgccggacaaccacctccgccgccggacaaccacaaccaccgtcgccggaaaaccgacgccgccggaatcaccaccataacgaccatcgccggcaaccaccgccgttgccggaaaaccgccggcaaccaccgccgttgccggaaaaccgccgccgccaccgccggacaaccaccgtcaccatcgccggacaaccaccgccgccgttgccggacaaccaccgtcaccatcgctggacaaccaccgtcgccgtcgccggataaccgccgccgccggaactaccaccataaccaccatcgccggacaaccacctctaccggaatcaccaccgccggaatcactaccgccgccgtcgccggaatcaccatcgccgccgtcgccggaaccaccaccgccatcttcgctggaaccaccaccaccaccaccttagatcattttacctaccccttaagttacttacttaataattacatatatagtgctatattcttaatttttctctcaaaaagtgttattcatgcaaatcactcattataaaatcaaaagagaaatcgtggataaaaaagaaaaccaaaacctatattacataattaaaacaaaaacgaaaatccagttaacgtgagaacaaactttttttaaaataataattttgaacaaaatttagataaagaagaatcttcttcacatatttcgtttttgattttaaaaatattaaagaaaaacaatttaattttgatattgcatattataaattgacttgttttagcttaccaataatattttgacatgtatcaattcacaaataattgatttgatggtaggaatagaagaagaaaaaaaacggttatgaaaacccttggagaatttatcatgactaataaaattcattaaaattcaaatatgacaatattatgtaaaaatctgccgacattaataaaagtctgtcgtgacgttatgaaaatttctttttcaaaaaaaaaaaaaaatctagtcaaaccggatttaacatacaatcagaccggaaataatttaattgagggctagttaataaatctcatataacaaaaaatttcgaaattttaaaaataatactatcatatgtcataatggtttgtatgtttaattattaattaataatactatcatatgtcataatggtttgtatgtttaaaaaaatttcaaagagttagatttaaaattaataatttttactttcgtaatcagatcacaatactatcatatgtcataatggtttgtatgtttaattatttttgggatataagtttctggtttcaacacactccaatctaaaattttcatctcatacatgtattttttgttataataataataattttttatttatttaatactatattttaattggatatttttttttttgtatatctttaggtttcataaataatttaaaatatattagctttttgtactttgtaaatatttgatatgagttcattcaaacatattatgggtagctagaaccgcttgatctatatttgttccgctataaccgctcgaaccacatttattctatttgatccgcttaatccgctctgctagatcagttttccccattagaagtcgtagtgtttagattacgtacattatataacacattgtgttaacacttttgaaccacaaacagttcagtaatatttttattattagaagattgttaattatttgtgaatggaaactaatgtgttttgtctcaattttactgacagaccacttatcttccgctacccattcaaacccgata

SEQ ID NO: 17350 - DNA, 1775 bp, Arabidopsis thaliana landsberg
ccaccaccttctaaataagaagtattagtcatgtaattcttccttactgaatccaataacaagagagagacagggaaaaaacttcatcaaagaccattctagtttttcaaaggttctatggagttaaaatgtaatgttgttgaaagtgttaaatctgtagttttcttttgtaataacttctctatacaataaacgagttatcgttgagatttgaccaaggaatagaagataacaccagattctatgcatgcatcatattatgtccccacaatctaagccttgtttttgtttaatactaatgacaacatcatcatagtacaggttgataatttaatctctcaaatcttctataaaactattcatatataacattatataatgtttgatatgcaacatattcagtgtagtacaatggtcccaaactgcaataagtgaagagagtaattgacttgcaacattcaaatcaaattgtaatattcaaatggtattttctcaagtcttataactattttccataggtagttactaattaatatagtccttgacacactcctatatatgcagatcacacgccatttcaatatatatacgaatctcatctagaattctccatccatttgttttcaattcctgttactgttgtttatcttataccttaaaaactatatcacctactcacaaattatacctttttcatcatctattcaatgttgttggaagaaacagaaccaccaaaccagactctagatcatgtcctaagctggcttgaggattctgtgtccttatccccattaccaggatttgatgattcttatttgctccacgagtttgatgggtctcaaacgtgggaatgggatcagactcaagatccggagcatggttttattcaaagctatagtcaagatcttagtgcagcatatgttggttgtgaagcaactaacctggaagtggtaacagaagctccatccattgatttggatcttccacctgaaattcagcaaccaaacgatcagtccaggaaaaggagccacgacgggtttctcgaggcacaacaggtgaaaaaatcagcaaggagcaagagaaaagcaatcaagtctagtgagaagagctccaaagatggtaacaaggaagggagatgggcagagaagttgcttaacccttgtgccttggccattacggcaagtaactcatcaagggttcaacattacctttgtgttctctctgaactggcctcttcttctggtgatgctaatcgtcggcttgcagcttttggtcttcgggctttgcaacatcatctttcctcatcctctgtgtcatcatccttttggcctgtttttacttttgcttcagcggaagtgaagatgtttcaaaagactctgcttaagttctacgaggtaagcccttggtttgctttgcctaacaacatggcaaactcagctatcctgcagattttagcacaggatcccaaagataaaaaggatcttcatattattgatattggtgtttctcacggtatgcaatggcccactttgttggaggctctgagctgcagactagaaggacctcctcctcgtgttcgaataaccgttatatcagatctaaccgcagacatacctttctctgttggtcccccaggttacaattatggttctcaactcctaggctttgctcggtctctcaagatcaaccttcagattcgtccccttgacaagttacaactcattgatacctcacctcacgagaacttaatcgtgtgtgctcagtttaggctgcat

SEQ ID NO: 17351 - DNA, 732 bp, Arabidopsis thaliana landsberg
tatacataacatttgttaatgagataagtagaatgatgcttgatctgtttgatttttttgttcgattttttttgttttgtaggctgctctcttgagaggcgaatttcttatcaaattggtcatctgcctatctacacaagataatcttttttgcattgttgtattgattttattctgtatattcagacttacgatttatgtgaagaatatcatgagagaagaacaaaagtactttgtgcgtcatagcaataatggtttttatgtttgtggactgatgatcagtcaattacaacactccttttattgtatagttcctaatgaaaactgtataaaagctttagatagctcattgtttgtttctccttcaattatttttttgtttgctttgtctacatcttatattggaggaaaaagcttgattctttgattcacctttcagttcagttacatttcaactcgtttctttgattttagttccaattcagcatggctttttcatactttcactttagcttgatttcatccaggaccaagtaaaaatgcagatggaagctatctcaccatctcatttgcttctagcaaccgaattcgctggaatgtaacctttggacaacctatcttaatgactcagtttgaaaatcatctatagagaaaatttatagattgaaagattatgttttcacctccaagtcttgctttatagatgagatcctacttatgaattgatagctg

SEQ ID NO: 17352 - DNA, 1140 bp, Arabidopsis thaliana landsberg
  unsure (1)..(1140): unsure at all n locations
ttagggtgtggtacgttattggtttctgtaaaaggttcaattcaaggaaggttcaggagcgatgaaaaagaagtagaagctccattaagattatcaaagagtttcttttcactcgcctcatcataatcttcatcgcagacaatcttggatttacctttttttaaacgttgttcttcatcacacaccataggttcatcaaaactagggttttgtaggttttctgtctcacaatcagtagggattaggttaagatcgggaagcgacgacgaacaagtagaagctccgttagggttttgttgtgtgtatcttctcttcgccaaagacgatctgattttcctcgggaaaagatagaagaaactcatcttgcacttggattcttctcgtttctctgcaagaagacgactacgttgttcttcttcctccgcaaccataaccgtcacatacgccagtaaacttaaacccgacgacatattcttccccgaatccgtgagatgattatcgtgatacataatactactcatcgtgattgaatcgaaagactggaaagtttctgagagcgacgacgtgaggaacaagtaaacttgtatatagagagacgagaaactgatcgacgattagaaaagaagtgccttctcttgccttatatatactttacaatagggtttcaggtttctttgttttcctatttctccattgagtttagttgtttaattactgtcattagtaactaattatagccgttgtgatcaagtgtttcctttttcacaagtgtgagagatagtgaatttttaggaagtttcctttcctttcaaatttcaatagctttgcttcacttttttgtatttgatgtattattatattttttgggcacttgccgactttgatataaattaaataaaatgcagaaaacagtggagtctcaaaaaaattcagatctttagaaaaacaaaaccaatattgttgtcgattgaatcgaaaatagtttcgagtatccatttatcatcaaaaaaaaaaaaaaaatcctagaataatttttatgttttttgaattttattggatgtacgtacataatcatttcaacacaattgcataagaatagttgatgcanaaccaaatatggggagaaaattcaatagtttc

SEQ ID NO: 17353 - DNA, 1584 bp, Arabidopsis thaliana landsberg
  unsure (1)..(1584): unsure at all n locations
taaacattatagtatcctgtgattgttactaatttatccacgcagttaagacaattggtatttatataacaactccaattaatataacgataaaatatttatattatttccctaaaatgtaagacccgtcaaatttttaattttattaataattgagttattcaaaatatattacagaatcttcaaaaatacaaagtgacttgaaacgtcatgactattattacttttttgaaagttgcgtctaacatgcttctacggtgttttcgtctctcttatatatatatcggtatcattagcatctcataaaacgaatacaaaaaataactaagaaatttcagtaaaaagatggaatcgtttcatcctcttacactgttgaaaccgcctattacaggatggtgtattcgtgtgagagttgtgaggacattcttagttccgctggttccatcttcaaaggttatgggtttgattctcgtcgaccaacatataagttttgactattttgtaatgaaaattttaggtttgcatgttttagagttttgattagtatatttgatccgtagggtatgactattgaagctactattggagacaagatgtcggatcactataaagattttattaatgaaggagaatgggtaaccataacaagttttggaattgttgagaactcgggtcctgtcaggccaacaactcataccttcaaaattggatttgttgttgacactgttgtcagattaacaagtccggtacccgctattcctcactatcgtctagcatccttctcttcgattatcgatgatgaaatcgataaatgtgttttagttggtgagattcttatgaatttgttgtgtgcattattttatatcattcatcttagtatttcattagttttgtcattttcaatatcaattgtatatatttgactctgatttattttaattaatttctgtaattttttggaaacttggtgggagcgatctatgatgttggagaaatgataaacataagacctaagcaaaaccacgtcgatgattgacgctaactttcaaaataagtgacaatgagtaagttttctactttgatagtttaatttgaattacctaaattaaactgttctaatactatttttgattatctgtttagaaatcgtgttttgaaatgtctagctactgaagctcttgactttgatcataattatcgtcgatatggtggtggagttattgtcgctgttcttggatgggggaagattgaccattattttgatggtccaaagaacgtacgtgtttgcaccgcatgcccgaaatcatccgtctttccggatcctgatttccccgagtctaacgagatccatgagatgtaagttttgatatatttttttattattacatttcgttattagtaaacggaatgtaatattattattgataattgcctgccacatttgtttgttttgtaggttccgtgatgaaggtgcaaggaatggcggttgaacatcgacttaaaattatgtntttgtatttatctttatgaactcggtcttgtattatttttatttctgtatgaacaagttctattttatttttt

SEQ ID NO: 17354 - DNA, 1326 bp, Arabidopsis thaliana landsberg
taacaacccctcctttctatatgtctttagagagaatagttttaaagtcgacgtatcctcagagtgtgagtttgttatgccgtatctaactctagagcacatttattgggtgaggagggcagggttgtttgctagtcctgaatggaagaaagaacaaggcatagcaatatccagttttgtgaatgattccacattttgggaatctcttgacaaaattgtgggaagtacatcttctctggttcatggatggttatggttttcaagaggcagcaagcatgttgcatatgcctatcattttatagagagcatcaagaagaacgtcgcgtggactttcaagtacgagagacagttttacgagccgacatggaatgtgatagatgacgtgtggcacaacaaccacaatcctcttcatgctgctggttattttctgaatccgatggcttactactccgatgatttccatacttatcaacatgtatacaccggtcttgccttctctctggttcacttggtaaaagaacctcaccttcaagtgaagattggtacacagcttgatgtgtatagatacggtagaggttgctttatgaaagccagtcaagctggtcagctcaatggagtctctccaggtgagtgaactttcttgattttttatatatatatagtaatattgttttatttgcagacatttaagtttttgaatctctttgcagttaattggtggactcaaaaggcgaaccagtatcctgaactgcagaatctcgctgttaagattctgagccaaacaagtgaaggtgcttcaaggtacaagctgaagagaagcgtagcagagaagctgttgctcactgaaggaatgagccactgtgaacgaaagcatctgaaagagttggctgttgtacattacaatctccaactacaaagctgcaaagcctaaggaagtgaagagcagtgaagatttgttttgcatatgtgactccattgatcacaagctttagacaattcttggatcagagtactttttacccaaataagttccatatttctgtattcttgcaaggatttgcaaaaacatgagttcgtttagaacaaagaacacccaagagattgtgttgcaaatgatttcagtttttttagtcaagttttgtgatttatatatccaagtctcatctttatttatcacatttttttatatttcaatgcattattggtatcgttcaggtaaaacaatgatcaactatataaatatttagtttctactagaatcgaagtataagttaaaaagtaaaaagatttaagacgcaacacaattatttcaacacaaaggtatat

SEQ ID NO: 17355 - DNA, 3367 bp, Arabidopsis thaliana landsberg
  unsure (1)..(3367): unsure at all n locations
cagcactattcagttccattaataaaggtcaaaaaatgcgtaattgtatgagaggttactaactactttgacttgcacaataggaccgtagcagcggaagatattccccatatagacagcgtccatcatatcgagaacaagttgaatgtggattatctccaaactatataactgttgtagttaattatattgtactgaacttgcgccttcaaaatattcatgttgatttcctgttaatttcttactatttacaattattattttactgcaaaatcataatcataataaaaaaaataattactaggataaaacacaattgtatgtttattcctagaatagaacacatcttttttttgttacttacatgttttcagtacttgtgtaattataattaacacccttgattagttttaattaattattattatttaattcgtttttaactaaaaattaaataaaaaaacagtgattatacatgtcatcattccatgtcattaccataatccacgtcatccgaaacctaaaattcccttaaaactttcagtttctcattttttcagcatatctcactgttcatctgcgccaaagaaaaaaaaaaaaaaaaannaatgttgctctcttctctcgttcagtcgacggaaccctaatttcgtcgccgttctctacttatctcgtttcttcggccgaaactctttcgatggtgtcgaatttcaagtcatcaaaaatcaaaacccaaatcaaagagatctatagaattttatatgatttgttacaggtttgagttgaatcaagaataactactcttttactttgatttttatatgtctctcgtttagttttcctctcaatcgatctatttagagatatttctacttctatcaatgttttgattcatatggtttcgtcttcctcctatgtatccctcaaacatattcttacgtttcttaatttgattgttgttatttggccaataaatttcatattgtcttccccagaaaaatgttgttttccgatctgtattataaatcagccgtaaagtaatgtaactcagccgtaacgtgatgtaactcagccgtaacatataatttacacaacctttcgtcttccctgaatgataactcagttgtgacatgtaatttaccgaacctttcgtcttccctaaagcatataactcagccgtaacatataatttacactcatctttcgtttgcccttgaacatataactcagccgtgacatgtaaatttatagatgtcttcccttaaacatataactcatctgtaatgtaattttaccgaacctttcgtcttccctggaacatataactcagccgtgacatgtaaattgattgaacgtttcgttctcccttaagcatataactcaaccgtaatgtaattctatcgaacctttcgtctttcctggaacgtataactcagtcgtgacatgtaaattgactgaacctttcatcttcccttaagcatataactcagccgcgacacgtaaatttgtcgcgaaacaataaaaaatacaacatttcgtctaactttatcatcgagcaccaacttcacaagtttgtcgtgcgttgctctttcgcatctagctgcataactctacaccctctttcggcggggttaaatacgaatctctgtttctaaactcaattcccggaaacaactatgaccgaaaccaaatcaaccatatcgggtgaaagatgaaagaaattgaagaaaaatgacgaaaacgatgaggaattagaaggggcggtgacgcgaaaaactcacatgaagaaaacgagctgaaaaaatttgaccctattccttttgtccgttgaggatgctgacatggaatgatgacatggaaaattacagcctacgtcgttttgaagtggtgaggtggcaagtaagccaccaaacgaacagttcataacacaaccatcaagcaaatctataagtcagtcgcaacatgaatactattacagtaattaaaacaggagaaaaacaaagttaagtcagtcgtggtatgtcgtaactaaactaactcagccgtaacgtttaacaactcggctgtaactacatgctattatagtaattaatcttttgcaaataagtcagccataaaaagaatgagttataccgtaatccagctctttacggctgatttataacactcgaccataactcagccgtcacatcattccataactaagccaatcaaaactataactcggccgcgtcgaggaaataagtcagcctttttctcataactcagccatattgttggctgggttatcttataacttcttataactcggccgaccatccttaactcaaccataccgttgcctgagttatacaataactcaggcaacattttacaactcagccgtaacgtctggctgagttatactcatacttcgccgtttcgttatgactcatatatttttgacgtaagtcaaccgcaacataccgtaactcagccggctgagttcatttaatccacgtcaacaaattctgacgtgacagtggcattccctataattacgttttttccggtaacgtttagtaggggcacgctaggtaataaaaaaaaacgaaaaatatgagagtaattaaaaaaagttttgtcgtgttctggtaataacacctaatttcttacccatcacagttaatctccaaaaaaataaaaaaaaataattaatttgtaaaagctatttgtgattctccattggtaaaaaattactcgcccatacattacaaagttagatattagaataatttacatatttttagagttatcaaacatttaataaaatgaaaatatgtgttctatatttttgtcttattttcttttcaaacatcacaggctgttctaatttatttagatggaaatttagttatatatacaaattcaatgtaaaataatagggttttttaaaataaatcatgaagaatagtgttgctaatttatactacacaaatcacaatcataatataaatttaaaaataaagcaaatcaatcaaacaatgtttcataatcgagcttgttcataatagaatttgattttgctttgacatttggctcttctggaccaactgtcagcagctgatacttgaccaaacattcctcccaataaaacttaaggaaccatttcatcaattccgtttaaatcctcaaaaaaaaatcactttcaaaagaactgtccgaaccctccatctcctttatgacaatggtctcaaccaatgttaccgatatatgactcagttctctaaatacttgaatcttttcaagtgtatcgtattatagacatcaaattaaatttattaagctaagggtcaaaatgtaaaaagtattaagatatttcgttaaa

SEQ ID NO: 17356 - DNA, 649 bp, Arabidopsis thaliana landsberg
ctccttcttcctattgaaaccctaaattctcttcttgaaatccatatcttgtttcaagagtaaaccatgcggagcgagttatttgattcagatgaagcagaaacaaaatcgagaacaaatctctcgcaagaagtcgaagaatatatcaaagatacaattgatcattctttaggtcttccgatctccatggaatctcttcagaagaagctttatacggctgaagaatctcaacgccgtcttcgcgaacagtatcagggtctgatttcgcgattaaaggagaaagatcatgtaatcgatcgtgttagggttagtaatttctttctgggtatctttcgttttctgggatttgattgatttgaatctgaatcttttttttttttttttttttttataagcctgaagcgagtatgaatgcgcaagcgttgaagaagtttgttgaagagaatcagaaattggctagtgagtgtgggaatttgttgagtcagtgtaagaaattggagaaagagtgtttgctttatcatcaagatcgtgatgcgttgatggagtttgggaatgaatctgatgagagagctagagaagcaaaagctagggttcgtgaattggaggatgaaattggaagaatgtctgaggaaatgcagagatttaagcg

SEQ ID NO: 17357 - DNA, 595 bp, Arabidopsis thaliana landsberg
aaatgcaccttcctgtgggtttactgaggatgattctccactttcatttgcagacgcctgcaaacaaatgcagagtaaaaaatattcttagaagattggacttgatataagatctctaagtccaatagatattgtacctctgcatcagtcattttcacatcactgtcctttgagccactcttagcactagtttgaagaccaagctttttaccttcctcctctctaagtttctgaaagacacagctgtcagttgatttggttaaccagttcagataatttgaggtcacctcagtagacagagcaaacctggcgaggagcttccagtttcttccgaagatcctcagagcaaaggtcaaatatatccaacaccagcgggtaatccactttcttcaaagatcaacaaattggagacattaccataagaatgatgagcatctggacttttgcttaagacacaaaaatagaaagcaaacgtaccctgaggatctttgctttttgattactctcccttttccagaaaaaccgcacgaactgaacagtcaagttccttcaagatcagttataagagaaagaaacttcgtgtcagtggtaaaag

SEQ ID NO: 17358 - DNA, 2175 bp, Arabidopsis thaliana landsberg
gatgataatagctctggttctaagtcaatggatgatccactgaagaagcaaagaaaatcatggccaagtacaagtaagcgttgtcttctttacatgtaacttaagcttaagattttgctcatgagacagaactccaatgtatacagatccaatacttaggaatgttatatgttctttaagaaattgttacctctaataccaaaactttattagtttcgacattggaatatattgggggaaacggttgtagcattagcaatcattgaaaattttgctgcaactagcaagtcctctctcaggattttgaatgatcattgagactaatttgataggagtgaaacattttcagatgtggtttaagtcgtagcgtagtttctcatttctcattgcttaatctctcttttacctttttttcttctggttcttttatcctgcaatgttctctcttatcggatgcttcacatgttgttaacaagtccgatgtatattctttacctttgagggattactttatagataaacaaaaacacaaagcatcactttcctcttggtaaacagtataacaaaataaatggttttttgagtttgtggtgtatgtctcttgtgatactcttgttagtgtgtactcgttttttcatttggatgtgtagcaatgtgaaggaacatgtttatatgccaagaaacgttgttactctttctcttttccaaactttggtttttgctctttgttctcacttcccatgttagccttcagggttcatgaaagtttgttgtttggggattttcctgagcctgcttcgccagattctacttgtagttcttgattttggtggtaaaaacatatctggtggtttccctgagtttatacccaagtttaaaggagcttgatttgtcaagtaacacgtttgagggtgttgttcctgaggggattgactctgttaaaactcgaaaaacataaacctttctgacaataacttcactggagtattaccaagttttggtggattaaaacttgtctttgaagggaacagtccaagtctttgtgggttagctataaaaccatgtctaggttcctctaggttgtggggaactgctgttactggtcttgtgataggtttaatgaccggtattgtaggcatggcctcgttattaatcaggtatatacagaacaagaagagaaataatagtatatagagtgaagatgatttgtaagaagaagatattgtagatatacactagtagagcaatgcactatactacaacttgaaatcaaaacatgggaacaacgaagaatgagttcttttttcttcgttctcgcagttttcatatattttctatgtgttcggctttggttatacaaatacaaataattaacaaagtgtaccgatcctgcatttcaaagcaccagagctagaggtaagcatacctacaagggaagatgatttagcagccaaactagaggctctagcgtaatttgcagaagctccagctccagatgaagtaaagtaggcaccatttagcattaagtctccttgggatctccaattccaattgttccattctcctttccctgcacctacccgtttcgtcacctgtcgaaacaaatattcaaatttatgttcaattgtcttgattagaactatcagattatatcttctaacttagatgcatctttgagcaatcttgcaaccagtgtaacgggtttgatcaaatacctccttagcgaaacggtttccgggggcaaggaaccggtttccttgactgttgatggtagggttagcacttccaccaattgcatacatttcccagtgagtgtaatcgttgtttactacgtgaaagtatccatgcctgcacctgaaataacaccaaactctataacattcgaaaactgactggttctctaaggaaaaatcaatatacaagtattgtcacagaaaaaatgatatgaaatttagatgaaaaaccttggcattctctgtataagaccttctccaaaatggttgtatgcaatggttacttgcatcattttgtctctggtgtatgaatcggtatgccccaacaaaatagcctgcattatcatctattgtcagcttttgatgtttagaccaaaaaacaaaacactgcttttgttaagtactgagctaatcaatccgtttgcattttggacacttaatc

SEQ ID NO: 17359 - DNA, 682 bp, Arabidopsis thaliana landsberg
ctattaatggaaaacaatgtgagtctcatgagaaaacatgagggagatgagaggaaatcttggactaaagtaaatgcagaggagatgcataactacatactgtatataagcttccagaaacatccacaaactgttcaatgactccagagacagggacatgaaaccgatgataatcctgtaacatccaagaaatatgtcagagtaactaaagaacaaacaacaactgtgtaattcaataggagaaatccagtctcgtcgcacctgtggtgctagtctgaatataaccaaagatccatcaaggaaggcatttggattcacattcttcccaaggaggcctcttattgaaaactttttgccctatcattgcagaatcaatgcaaaaaaataaggatgtgttgcattatatcagctacatcatttgttttgagaattctctaatcttgaataatattgattaagtatatagtaagctactctagaaaccattttaccttgatccagaatctggtactatcttccaccgactgaaatgccattaatcgacaatcagcggcacatacagcaacatcattgcggttcatgcaagcaattggtcttgcaccaggtttcaactctcggataaagaactcattgaacgtctgcaagtaaaaacaaaatcatcattcttgaaaatgctataaaa

SEQ ID NO: 17360 - DNA, 582 bp, Arabidopsis thaliana landsberg
agaagtagttcgtcaacgatatgcccatgttaatgacgacattcatgttactttgatagaggtttgtttctactctttcgattcctctttaggtgtgtttatcacgttaggaattgtttttgaggtgagtaattttttacaggccagggatattctttcatccttcgatgatcgtctcagacgttatgctatcaagcagttaaacaaggtgaactcattttgaagttagaacatgtaaaggttttgagcctacttttatggagcgtttcttcttaagaactactggttttgatttacattagtctggagtacggtttgtgcgagggattgtgaaagatgtgcagtctcagaagttaatacttgacgatggcacagaggttccctacggactcttagtgtggtccactggtgttggtccttctcctttcgttaggtctcttggtcttccaaaagatcctactggaaggttagttcgaccactccattacaccctttttaattaaaaaaaatattcaacatcaactcaactttttcgatgtttatctttataggattggcattgacgaatggatgcgtgtccct

SEQ ID NO: 17361 - DNA, 1145 bp, Arabidopsis thaliana landsberg
ctttcattatgattaattaaagaaggcctataattaaaagtaattagaggtctagtaaaaaaaacttgggagataaggaaggcttgattagtttagttgtgtgccgttaaatcatgttgttgcggctgtctccttattgtagtttctagtttccacgaaaccgtgttccatttccagagatactgtaacgtgcgttttctttgtcggatcttagaaatatacagattcatgtatcttttttttatatgtaaaatagtagatatttgttgttttatcgtttcattgattttgacaacgtcattgtttagttagtcttctttggaccatatataatatgagatctattttttgtaattcttaatctattttatttataataaaatatttatattcttaattatatatatatatatatatatatatatatatatatatataaccattcttttttacaaagattaataacgatattcttttgaaacaagattaacaacgataccgacaaacaaaaaaagaacaacaatgatgttaaaaaaaaaacaattttcatatgtaagtctttgcaccacccaagccttgttttataaaacaaaatttctaagcgccgttttgacatgtattttataaaaacataatatagtattttatgatgtttatgattggttaaatttcctttatatcaggtattgtttaattttctattatgaaatataatcactgaaacatgaggaaagaataattcttaatcatccgttagggcaaaaagacaagcattattcaagtgatccataaacagggaaaatctctttttcttttatttctatcctgagctcatgaaactaaaacttttattctattaactataataagcaatataaatatttagttcaagtgaggcaaaatatttgcatcaccaattctaaattcatttatataagtaatgtaaaatttatgtacatcaactataactgatgttaatattcaaattaagcgatgcagactaaatttattttttaagtgatagttcgtgtaagtcgtgaatgagcctcggaagcttgatgcaaataagcaaaggtttgttatacgctttcgaactatatccacatttaaaaggtaaataaaggaaagcaccaacttttgaaccc

SEQ ID NO: 17362 - DNA, 2081 bp, Arabidopsis thaliana landsberg
tggtacgaaaaccgctcgaacttgggaggattatcgccgctggtgagtttgggaaatggcttcacaaccatatcataaggaggcttgatatgaaccaccgacgacatcctcgttttctttttatccatcaaggctctatgcaacacattgttgtaccttccgttgctcatcttctacaaatcccaaaacaaatctcatctaaaatttttagtcaaactataaacattatttttggaaaaaaagaaaagaaaaatgaaacctataataactcatatgacttaccatgatctgatctccgatgatgataataaccgcgggatatatataatctacatcgagccagcggtcttccttgaacacttgaagtccgaaaatttcaatgggaatgagaagtgtgagtccattgaaatcagtgtgggcttttattcccatgacccaatctggctctggacacggccggtaatagttgatcttcataagataaccagcactatcgtccccgaatgctaacttcaacatctcacgttgtaaacctagctaacccttcggatagcaaaccgaggatctcttccgctagctgctttgcatgctttgcaaactcctcagtcacctctctgacccaaaatcgcagcggttaatgtttttagttagcacgttgtttaatttgggtaaatgcataaatgaaatacgtacatgatttccatatatcatagcacaaattaaacggtaaattataaaaaaaaaaaaatgtttgatccatctgtatatatatatatatatatatatatatatatatatgttagatcccatttgtacggcctaactttgatagaagaatatgaaaaacgaattttaataatgtttgactaaattattacattaagaatccatagattggaatcctacaaaatgacacatcatgtgcctttctaattgagtagcggggtagtctatgagaataaaactaattttaaaattaatgtcgaattgatatgtgtattgacattttacgtacacaaaaattttagtcaactagtttaatctttggagcctatattaattaatcttagaatcttaccaatgattagtagtcttaactaaaaaattccaaagttacatagtaataaagagtaggtaaattaattcatatctaacctaagaaaactaaaactaaaatatgtcttttcaaaataacgtatagtacaataaatgtataatatagttctgtacttttgaataaaagaccaactagatcatcaatattttaaaagaagtacagaaaactattgataaaaaggatgtgatgtaagagttgaccctgttgtatcgtttgatatgtccaaaaggtcaggaaaagctggcttaattagtaattagtaattacaaagtacttacgtcacatttgtttattattactcttttttttttttttgtaaactcttttcttttcgtttacaaaactttagaaaaaaataatttatttaataattgtaaaagtatactcctcttgcattaatatgaaacataacaataacaataactgttacatagcattttgcaacataagaataagtgttacataacattttttgtaaaactatattaatgcaagaggagtattttctgtaaattttatgtaagtgttagttaacatagaaaaaaaaaggttattggaggaaattaactatggttttgtgctgtgtatgtaccttggtgtcccaacatagtctattgtcagattaaaaaccgaatcaaacgttattagattgatcaaaaacaaactctattaacgataaaaccactacacaaaatcaaaaataaaagaaggttttgttatatttttaggtgtaaggtactcaaactttcaagatcaaacgcataccctgactactagtctgatagattaatattcatttcatcagctctatttctttgtcttttttaaaattacatacttagttagcacagcggatggatgaattcttctttaaataattaaaaatttggtgagtctaaacttgttggcaatgactaagaacaagaatcccggggtaaaatctattgataacttcaaaatctta

SEQ ID NO: 17363 - DNA, 1242 bp, Arabidopsis thaliana landsberg
  unsure (1)..(1242): unsure at all n locations
actcgggtccccttctcctctctccaacttcaggatcagtggtccaaggcaaggatcccctctctgctgctccttgagttcgtccttgttcaatgataaaggtgccaacagggtgatctgcagcaactctcccactggtggctttctagaaagtgcatcagcaaccctgttttgagcgcccggcttatactcgatcttgtaattcaaccccaacagttttgcagcccatctctgctgaatagtggacactgatttctgctctaacagatgcctcaaactcctctgatcagtccttatgatgaactgctgccccgtaaggtagtgtttccacttagataccgccttaactatagccaatagctctcgctcataaaccgacttaattctgcctttaggtgagaaagcttggctgtaaaaggcaatgggtcgcttctcttgagtaaggaccgctcctatcccaactccggatgcatcagtctctatggtgaagggttggtgaaaatcaggtagtgccaacactggtagattagacactgccgccttcaacgcctcaaaagctgcctctgccctttcagtccatttgaacccattcttctgcagcaattcggtgagtggtctcgcaatctggccatagttcctcacgaacttcctgtagtagcccgttagacccaaaaagcccctcaactccgtgactgtcttgggtttatgccagttcagcatcgcagacaccttctctggatcagctgctactccactctctgaaatgacatggcctaggtaagctacctccttcagaccaaaagaacatttctttgcattcacatagaactgttggctgcgtaaaagctgcagaactacttccaggtgcttcagatgagtctccaaatctgggatgtagactagcacatcgtcaaaaaacaccaacacgaacttcctgagataagggcggaacaaatcgttcatcacactttggaaagtcgagggagcattagtgagtccaaatggcattactaggaattcgtaatgcccttggtgcgtcctaaacgctgttttctctacatcactactcttcactctgatctgatggaaacccgacttcagatccagcttagagaacacccttgcgcccttcagttcatctaacagctcttcaataacagganctgggtntcgatccagtatggaggccttgtttagagccctgtagtccacacggaaccgccgccctccagccttattctt

SEQ ID NO: 17364 - DNA, 2252 bp, Arabidopsis thaliana landsberg
actactcgttgttctctctcaaccgtgatgggacagtcatacatgttcttgtttatgttgatgatttcattattgcaggcaataatcccaaagccattgatcacttcaaagaacgagcttcacaagtgttttcacatgaaagatcgtggctagctgaagtattttctcggtctagaagtgtctcgtggcgctgatgggttctgtctttctcaacaaaaatatgcattggacatcataaatgaggccggtttgcttggttataaaccttctgcggtacctatggagcttcatcacaaactcggctccatatcaagtccggtctttgataatcccgcgcaatatagacgcctagttgaccggtttatatatctcaccataacacgaccggatctcagctacgcagttcatattctatctcaatttatgcaaactccgttagaggctcattggcatgcggcacttcgtcttgtgcgttatctcaaggggtctcctgatcaaggaattttaccccgttctgacagtgctttgtctcttacggcctattgtgactctgactacaatgcctgccctcagactcgttgttctctctctgcatatgttctctatttgggcgactctccaatatcgtggaagaccaagaaacaagacacggtttcctcttcctcggccgaagctgaatatcgtgcaatggcctacacactcaaagaaataaaatggttgaaggctcttatgacaactcttggtgttgatcatacacaaccaattctgttattttgcgatagtcaagcgaccattcacatcgctgctaaccccgtctttcacgaacgcactaaacacattgagaaggattgccaccaagttcgtgatgcggtcacagacaaggtcatttctactcctcatatttctactactgatcttctcaccaaagctcttccaagaccaactttcgaacgtttattgtccacgttaggtacttgtaattacgacttaccaacgtgaggggggtattaggatatacatgaatatatttacttagatataatcttatcaagatcaagcgacatgtatgtgtataaatactcttcttcttctattgaataaaggaacgcattacaaaatatttcacctttccttatttgttgagaaggatatttaccaaatcttctcaatcgactttcgtctttgatcaccacgccaagttagcaaatctccttggcttgtcacatcaaccactccagctccgcaatgtcagctcacacatccatgtcagcaactcagacgtttgatgtagatctgttgcagcttcctaatatccaacaactccatgatgtccatcagctcgttgtcttgatatctaacagctctctgatttccatcaattcgttgttgtctgaatctgcatcttcaagtattacacattacataaactattaaagaaaatatgtttaaaaaaaaaaaaaaagctcataagaaaaacgcatgtcatctgataaaatacatgtaagcatctcatatattacctcgatcaacacgacacggtttgtaaagcaagatgttggagatgtaaagctagggattcaacgcactaaatacgatcacctttgtcctatgaaaattatgttgttaacatgtttgaattctgttgtgtgttttaatacaaggttctttgtttgttaaatacagtctttttataattaggattccaaaaaatagaatataaaatgaataaataaacatgtaattagtcgtcgaatagttgcaatcaatcaacaaatctttaacaaaatagttgttatgtagtggcaaaaaagtccctatttcaattaccaataagtcaccaaagagtcagtatagagtggctaaaatgtagccaaacagtcgctaactcgctaattagcgaccaaatagcaacaacatatattggtccttaatctgtcgctaattagcggctgtttggcgactaacagatttagcgacgcgtggtttgccgactacgtgttttagtcgccaaaaaattgtatttatgggtttaacgacttttaagctacttattgtgtagtcgctaattccatattttcttgaagtataatctaaactggtataagtctaattttgggtaaccatatgcataagatcatgcttctccgcttttttttccgaaatatgaatgcatgtttagtttttatacttaatagtatcatgttacaataatagacagaacaaaagacaaagagagcatccatcaagacaga

SEQ ID NO: 17365 - DNA, 1574 bp, Arabidopsis thaliana landsberg
atccaagctcaacgatatacgatagctaaaactgatcaatcagaaggtaattgcctcttcattcgaaccctaaaccaactaaaaaattgctaataaccaaagagatcaattcaaacactagagccagattcacatccagatctcaggaaataaaaaaaaaacaaggaatcaatccatcatctaatttaaagtcacaaccctaagtgaaaaaatcatctctaaagcataaacacaatcgaagacttacaacgaagtgagcgagattaacaacagtccaagccattccaggggaacaaccagagacagagagaacaacgagccaaccgaagaagagaataagcatgtaagtcgtccaaactcctggatacatgaaccattccgtattcctattcatatccggtggtggaaccgctttcacatacagattcgccatttcttcttcaatcagatcggatcggatcgaatctcgtcttcttttgatcaaaatcttatattaacacctgaactaaaaacccagattcacaaaattctctatttcggcgagaacaaggattgtttgtttctttggtttaattttgtatgcccgtgaaagacgacgactgcttttttgcatctacactgggcattaattaattattgggatatttttgacattacccaaaccaaaacgtctgcgttttcattttgtacagacagaaaataggccaacaaatgcaataaagggaacataaaaccaacatgaggattctaactgaaatgttttcttatgtatatcgaaattcgtgaacaaaggtgataggtatctgtttgtcacctaacatagtcggtatcagaatcttcttcttcgtcttcttcttcttcttcttcaccttgctcaatggtctttacgtcaaggttgagagccaaatcctcaactgagaccttaatgacgtcgcttctaacaccaatatcggtagcatagcgactcatacagtacataccagcagtaactgttgccacaccaatgggacttggaataagcaatttgaaaggagaagagaggagtgcagccaaaggagcaccaacaattgaagaagcttgaccgcttctccctacaccgagcttatccattataagcaaaccggtcttgcaatagagcgcgaaatcctcacagttgttcttgaaaatgtcgtagttgccaaatccgttttggagaaggtacattgccctgtggatgactgaatcagttgtatcagattgcgcggttgtgcaagtccctccgcggactttggttaggaaaaccgattgactgactccatattcgaagcagtagagtgagccgttcttgaggaaacagtctaagcaagaaaggactactgcactgtccggttgtctgaaagcgcagtcaggaaatatggaacacataatttagaggaagacgatgatattgatgattgttgatgaatccaagggggtgtgttctggtttgaaatgaactactatggaccccccggctaagattcctgcggaaatccacagctcatattaatggccatgaaggaatgtctacaacagtttcaatcctttatcaccag

SEQ ID NO: 17366 - DNA, 1003 bp, Arabidopsis thaliana landsberg
aattattctctctacctatgtctgagtcaataccacacaatattgtttcttgatgttctgtatatgatgtctcaagcatattgacataaacaagaccattgctaacaggactggagtatttgcatgatggatgtacgcctctatgagttcatagagatgttaaaactacttaccatcttattgaatgagcgatgtggagcgaaactagccgactttggtctctcgagatctttcccaattgatggcgaatgtcatgtctcgacagtcgttgcgggcacacctggttatctagaccctgagtgagtagatctattatttttttcagaattgtatggttgaggccaaataaaaatatgacatatttaattgatttgttactcttttcaggtactacagaacaaactggctaagcgagaagagtgacgtgtacagctttggtgtagtgctattagagatagtcacacaccagcccgttatagagaaaacccgagaaaggcctcacatcaatgaatgggttgcgctcatgctcactaaaggggacatcaagagcatccttgacccaaaactgatggggactatgacacaaacggtgcctggaagattgttgagctggctcttgcatgtgtgaacccgtcttcaaaccggagaccaacaatggcacacgtcgtgactgagctaaacgaatgtgtggccttagaaaatgcaaggcgacaaggtagtgaagagatgcacacaagtggttatgttgactttagtcgctcttctgcttccgaattttcccctggagccagataaattgagagaatatcttccgaacttccaatgtatttattgaataaactatctacactctataatttcttttgtataaaactgagatgactatgacacaaacggtgtgtggaaggttgtagagttggctttaggttgtgtaaacccgtctaaccgtcttcaagacgtagaccgacgatgccacacgtggtgatggacctaaacgaatgtc

SEQ ID NO: 17367 - DNA, 748 bp, Arabidopsis thaliana landsberg
tctatgcgctcccttggtgaaacccaaacaaaagctgagctccaggacatgatcaacgaagcggatgcagatggtgacggaaccatcagtttctctgagtttgtgtgtgtaatgactggtaaaatgattgacactcagtctaagaaagaaacgtacagagttgtgaatcaaggtcagggtcaagtgcagcgtcacactagaaatgacagagctggtggcaccaattgggagagggacatagcggtcggggttgccagcaatatcatcgcttcgccaatttccgacttcatgaaagataggtttaaagatttgttcgaagcgctgttatcttgaaatgacacgtcagtaactttatgccaatagggtctgacaattatgttagatctctctcaaaaggcgtttcatctaatgacaataatttctatgtaataaatttattgcatgtgttagtgtgttaccatcttcagttgtgtgcaatttattaaaatgagtttgtaatatggtttcagtatcgaatataattggggtattaatgtatcttttgagaaaaacattgaaacgtagcagaactaatcattgaaaactggtagctcactactaaaaattgatctaatatgataaatcggttaatgatctggcacatacagtgatcaaatcagctaagcctcatactcttaccatgttaatcaattgtcataagcatgaaattaaacgatttgtttttatcccatgccaatttttgctttgt

SEQ ID NO: 17368 - DNA, 2272 bp, Arabidopsis thaliana landsberg
tttggttttttctctctgaaagctttaacgcttctcaaattgatttaaaggggaaattaggggcatattaggggattcttagattgtaaatgattaaatttaaatgttaattgaactatttagttaagaggtgctctaagctaagaggtcctcttaaataaaatgtggtggtgatgtgacatgatttggttggttgggaataatattaaagccgaattttttttcttaccgttaattcttctactatgtataatacttcataatatgatagtaaaaaacgaacgagatggttacacttactttgatgtctctgaattcttacaacctgaatcaactagaagtgcacaagtggatttcacctattctacatatatgccttcaaatctcgagaatatattggaaactcgaactcgaattcgtaatcgacaagtacatcaataattgaaatttgatttggttgaatatatatagaaattttttagcagaaatcaatagttaaattttatgttttcatgtatgttttaattttttatatgtcatctatgtatcgaatattatgaattgaataataattaagtttttaaaaaataaaatatttatatattttatcttttaaatatattttttttaagaatctcaacttaatatattaccattgagcttgccaaaaaattaaaatcttaccaaaattcttaataataaaatttcacaaatttattcattaaaaataaataaaaaccttagctaatagactaccattaaggatggtctaacattcttcttgttaaatcccttaactaaatatatataggccgaagcctctttgttgggccaagaattttgaccatctgaccaatatggttcaacaaagagaaacatctatggtgctgtagtgtctgatttgtaacattacaaaacaatggaacaaggaataaggtttttttttttctttaatccaatacttttatgatctatgagtttaaaactaaaccaaactctagtttttttctagactcaaagactaaaagtctcattgataactttcaacacgcgtcatgcagcttcattgtctagctctacatgcaaacatcccacgtgtttccactctgcatgtatctccaacactttcgttacctcaaacttatgtaattcatctttataaattacacacaaagccagcgattctctagggactcagtaaggccacctcaaaacaagacccatcgataacagcgatcatggtggctaaagccttagcacagctgataacatgcatcatcttattctgccacgttgtagcttccgtagaagacctcaccatacgccaagtcacggccgacaatcggcgaattcgcccgaatcttctcgggactcacacagagagtaaattccggcttttcatgtccgattacggcaagaactactccacgagggaggagtacatccaccgcctcggaatatttgccaaaaacgtccttaaggccgcagagcaccagatgatggacccctccgccgtccacggagtcacacagttctctgacctcacggaagaggagttcaagcggatgtacactggagtagccgatgttggcggcagccgtggcggtacggttggagcggaggcacctatggttgaggttgatggattgcctgaagattttgactggagggagaagggtggagttactgaggttaagaatcaagtatgttcttatatatatccatatgatttgccttaggcttggcttacatattttattgcaacttagaaagaatgtgaactattaattttgatgcagccaaaaacataaggagaagtagttctctaggtggtaccatttgttttattttgtaattaggcacgtaattatactaattaggtaagagtattatctaagtaattgatattagttggctcaggaatggctctttttagctctaattaattttggatgacaaaaaaaaaagatagtagttggatatataaatcacttggtagtaagttgatacttttacgcagaagtgtctaatttgtgagacaaatgttttttggggttaatttgtgggacaattacatcatacaaacttcaatgcctgtcagtttaaccatatatcatgcatgtgattatgtgaagggtgcatgtggatcgtgctgggcttttagcacaacgggagcagctgaaggagcccatttagtctccaccgggaagctcctcagtcttagcgaacaacaacttgtcgattgtgatcaagcggtctgttgttcatccgt

SEQ ID NO: 17369 - DNA, 1947 bp, Arabidopsis thaliana landsberg
gaaaagggtaaacattatatgcgagatttgtcaccaggtatgttaccttttttgttgtaatctttaggattatagacttgaatcgatgtggcaatatgactatgcatatattcgatgatagatcacacatgatgaatgatttaagatcgtgcattccaccttttaatacaccaattgtcactttcaagtcatgatttggtatgaatatggataaatgatgctcacattaagtatatctgaatgctgagcaacgttcatgcatatgtatcaccaagttagtagaattctctatgtgactctgattgggtttatcaatatctgatggtttttaacttctcttgctagccttatcaacctggatatactgctccaccacctccacttcagcctgaagaaacaactattgacattgggtatggttaatttcatgtttctgctgctcagaattttatctgaggtttgttattattatgtttctgactttggcatgtgcgttgcagtggaggatggacaatctcaggtttggatgtgcatgatcctcgtctccttactattgctgaagctgaacgtcggtatctagaatctgaatatgtggaatatacagcttcaagtgcaagcggggccgcattctgtcgctcagctgctctaatagtaagccttaaagcttcttgacagatttatattttaagtgtcaccacaatccctcgcttgtgataaccccaaaacacatctttttcacagttaatggctcttcttctcttacgacacgcactgaccataacagatgatactgatggcgaagaagatgacccatcttcgatactatctgtaagctcattgaagcttcttcctttttttctttttcttttatttttgtctcagttgcatttaagttgtaacaccaaaccacaaaattgtctgattcttattttagcttgtcctgctccgagctgctggatttcttcttccatgctatatcatggcttgggccacagtatctacagcgccaagacaaagacaggttagtattataagaactcatgcaaggatttttcggacagtcttttttttcttactgttttatgaatcaaactgagtcactggtatcgacttaatgaaacccgattgaacaggaagctgcagctttggctacacagtttgcgttggtgctccagtcagggcagcctagaacagttcacttcacggtatcaccgggaatatcatcatccgccgtggctcatgcgactacatctacaccacaacagcatgacgatcctgtctgaattctgatctaatgtcataaccatggagccattacaaggtatgatggaaatcgaatgaagagcttggtgtctgtaatttgtatgagtaaaggattgaaatcatttgaatttgtggaaggttagatctcattccaaatgagttctttcatcttacttgtagccaaaaatgtcaataggttttgcacaaatttgtaaattctgctttactatttttcacacattgtcttgaaacttgagtgtatttttctataaatagaaataattcgtctttaaggaagaacagaagagacgattgacttgatttacaagcagattccaaaatattctatgaacgtattacaacaaaaataatgaacaaacaaagtgtgttagtatatatgaatcattgataagtaacaagccaccaaactcttattccttatcgtcaaaccaaaggagacggctaacacatcatctttgttagctcatcatccaccattctcacgcaggagaagtttctacatcaatcagtataaaagatctctaaacaatgagatttaaaccccaaaatctgcaaaccagtttgcacgtgtattcttctgcttcttatgaacttatcaatcatcttgatcttctccaatattcccatcatcacaacagtgtttacatgtcatagaggcgagtc

SEQ ID NO: 17370 - DNA, 1880 bp, Arabidopsis thaliana landsberg
  unsure (1)..(1880): unsure at all n locations
attccttggttactgtctaatattacccaaacatgtactgtattgttataagttctaaaatttgtattaaaggaattagggtttgggagatttctttgaatgtttaggtttctcgggtgtcttgtcgaacctgaaagcaagtgatttagcaaatcccaactcttctgactaaaatccctaaactttgggtcttggattaagctttttgcaacaaggtaggtgatatctagtgtttttggttgttttaaaacctctttttctcttagtttttgttgctttgcattcatattttggcatatagtattgcatttgcatttgcatttgttttttttaggtacatgagtggagtttaaagttttggaactaaaatggagcaaatggagcaaacaaaggagctaaaagattgcaaagtggccaaagaagagaagctagtaggaatctaccaaactggtcgattgcgtggtcgattggtcaggaccagagctacggaggaatatgaatctaccaaagtggtcgatttcgtggtctactggtcaaggattaatgttgcggacgatattgaatctaccaagtgatctattgcttggtcgatttccttccttaaccgggtcaaaacccggtatgttccgggttgatccggtttattttctcattactataaatactcttaacctagttttagggaagagagcttttgttttgggagataaaaacttctcttaaggttctttgtcttaagtttttggtatgaatgttggtttgttgagttttgaatcaaagtttaccttttaaatctcttatctacattctctaattatgattacacaaagatcaaacccattcctttgtgctttcatgatcatgagtgagtagttgtttagagttctttagttaagatagattaggatgatttagatattgggttatggagtttagggttagattacttaagatccttacttattggttgctattaagactagatcaaccttgatcatgttgatttagacactaggaatttcatgcccggaaggtgttcgatgaatttctcgaaccaaaatctttaagtgtttttcataccttactattggaaattgttgattagggtgattagtggctagatagacttgtcatttgtgcttattgatcatttgattgcctttggaaaatgtggatgattgattgattaataaagggattaatatcatggaaatgtgttagtcttgcttattgttctatagcctaaggatcattgcttattagaagttctatgatactccataatccatctcgttatcatttctaatcaattgccttaacccgaaaattcgtcattagttatcacttagtaatttgttaattttccgctttgtttactttcgaaacttgttagtcttttgctttttgttttttcttactctgttttgcattgtttgcttgataatgcatggttactaagatttagaatactcaaaatcatcttattagcttagattaagcaattgtgtgtattcttggtgagttgattgattgcaaattgttgttcgataaacaattgaataaaatgctacatcaatcacttggcttagcacataattcgtatccttaagcatacgccaactttgcttagcaagtagagctatattgaactgctgcagatccctaaaactcagaccttcgtgaattttcaattcggttaatttattccaagcaatccaatgtatctcctgcttctcttttgaacttgcccaccgaaagcgtctaatctaccttgtaactntattaataattcttttttcgaaggaggaaagaagacatacactacgtggggagagccatcactatagacttaatgagaactggagataagatttaatgta

SEQ ID NO: 17371 - DNA, 1045 bp, Arabidopsis thaliana landsberg
tcgtttcttttgattatgttgcatacccatatattacctcaagctcggttctatatataaatttatctttctgttcagttcaactatttgtttgtcctactgtaagaaaaaagttctcaaatatgtttctctgtaaattgcttatggatttcgtttcgtatatgcagtcatcaaatgtttgtcgttttggtattgcaaaagaggatttaacgacacgttgtttataagattctctgcgaacttagaacaaaggtcaaaccacactgaaccagtctaaaattgttcatgggatcaacggtggttaagctttaaccaaaaagatttcaggtctttactaaaccaaaatatgaaaatcctggatttatttgttacttaaccaaactttgtgcacatcacaattgtggcgtaacgtaaacaaagatggaattcgaattagatgaagaaaaaaaaaaatggaattcgaattttcaatttcgaaatgggcggtcttttctttcattttgaattttgaaatttctatataacagaaataaaattggaatttagagcaaaggaaattaaaaagccgtttaaagaagaaaagcttctactacaagtttctctctaatatctcgtatttgaaaaccccaaattctcattttcgaaaagtctgtcgaagagtaacggtggttttgcggcggcgtttcttgggtcaccggcgatgatgatctaggaaggttgttctctgagttcggctaggctaatcgattctaaggtcagttataagcggtctcccaaattccagattcagtcgagccgattccgatgaatctgtttccgatgtatgtttctctgttacttgattcgattacgattacttttatttttcccaatttggtacgttaaatcttcttgaattttatgagtcttgttcgagtgattatgtggttttacgctttcaatacattctccggtagtttttttttctgattcgtgatttggttttgacagatcatcaacgatctcgagactgggaaatagaaatggattaggattcgtgactttc

SEQ ID NO: 17372 - DNA, 3498 bp, Arabidopsis thaliana landsberg
  unsure (1)..(3498): unsure at all n locations
aaataattataaaaatcaccattataagaaaaagaaagaataagcccatgaatagctgaattttccattaaagaagtacattttcacatttcatttaccaaaagatagctaaattacgaaatacataaatttttatgttggattaaattacttactaatatcattctttgttgattgtttacgaaatacccctctaataacacttacaagatgccattccaaggccaattatgtcaatttgattcttaaaagcagtaaaaaaaacttccaaaatcacataacgcaacaagagtttggattgccttcgcttagtgactcaaacgattccgacggttgagatctatacgaataaaattcgggcggtggagattcgtagccagtgtccacgtactcataagaataatatgacgtcggatgagaaggaggagccgtgtaatacgacgccgtctcattcccaccgttattacttggcccatgcaccgtgttataactcacggtataagacggcgccgtttgaggctgagtatgataaaacgaaggaggaggcagtcccggacccggcccgtacatttgttgtggatgatgacgtggaggactgtgaaccgttggatacggatgattctgctgctgatgatgatgtagatgaggaggtggtccgtgtataatgtgatgatcttgtggagctgagtatatcactgtctctggcggtccatcgttttgcggaggaccaccaccgccaccgccgccgccgcctccttccattaccaccgtcgtgttccctaagcttttcttcttctttttctttttcttcttcttcttcggagctccatctccttgtggttgaagttgaccgtttacaaacgtaacaacttgtttaacctgatcaaagtttcctcctccaccaccacctccaccaccgacgtcacctccgccgttgttgttgttgttgttgttttcgtcgtcgtcttcatctccactagtttcttcgttatctttctttggtttcttctgatagttacaatcgttgttaatgttgttctccattgacgttggccatagctcggcgtgtctaccggctttcatgatcttcttgattaaaatctccggctctacgtttccgatcaccgttactttttgttgcttcacgtcgatatttgttgtatatacacctaaaataaaatcatataaatactcataattagttaatcaatatcgaaaaagaataaaacgttagatttagtttatatattaccatcgattttgctcaatattttcttgatttttctcttgcatccttcacaatggatagaaactcgcaaaacccatgtctacaataaaaagaagacgaagaaatatatgtattgagaaaagaagatgatagttatatatgaagaagaaattgattactatgtaaaagtgatacttacggtgtataaaagaggttcagggtaatcttcgaaaacatgtctctgttcttcttgtcttgtgtctgattttatctctgttcctaattccataatggagagaaagaggaagatgaagaagagggagagggaattgatgcaactttcatgtgtaatatagtaacgaagtcatggcttctatatcttttttttttttgtgggacttcttcagcagataatattctctaatagttgcctttttggaaaagattataaaatgctcagttctcaaaacattaatatttacttagttaggattaaaaagagttttttttttttcttcttttttgtcaaaacatgaaattttcgatttttctttgccatcattttcattttcttactattagaagatattttaggacactgaaattgtcaaaatatccagtctagctaggttcgaagtacaccataaacctaggggtttgaataattttctctctcttacggatgttaatttgaccgagaaagagagagtagtaatcaaacatatttccaaaccatgattcagcgatcgaaaattgtcatatgtatcggctcacaaaatagttggattatgcccattttattcagtttgatttcttctcatagtatcgtttatgtcatttttatttaattttgacttccaatataaacaagtattttcctacactattcctacactataaaaaatataagtattgataattacgataacacaatttttataactgttattaaagtggatattcgaagtttggtaacaatataatatcatagcatttcagtagtctaataattgtaactaggatcggactttcgctacactgaggatttttttttttttagtatttatatgaagtgtatttgtatgtgtgtttgtattttttataacagacgtattttaaaattatcataatgcaatatattttataaaaagaaaaaaaattgtgatagagatgttaatgatgggttaaaatccactggatacccaaaacccacataaaatattaagcccatagatctactttttctggaaaaaaaacacaggtttaaaatggtttgggtacccaaataaataaaacccatatgggtttacctcattgggttatgggtacccacggttttttttaagtcctttttcaagtgaatcaacattttcttgtcaaaaaagatttcacatttttcccttaaaccgcgatttaacagtttaccgccaaaaaagacattcaacattttcccgctaaaaaagacattcaacatttttccgttaaaaacgacaatcaacattttcccgccaaaacgcaattcaatattttcccgccaaaaacgacattcaatatttttccgccaaaacgcaattcaacatttttccgccaaaaacgcgattcaacattttccgccaaaaatgatttcacattttcccgctaaaaacgcaatttaacattttcccgccaaaaacgacattcaacattttcccgccaaaaaggatttcacattttccggtcaaaaacgcaatttaacattttcccgccaaaaatgatattcaacatttttccgccaaaaacacaattcaactttttttccatcaaataaatatgtaatatagaaaataaatacaatttaaaatatatttctaagcaaattatagatacaacatacatataatagtatattagcagttaaaataaactttaagaaaatgacaaaaactaagttcggtacccacgggtagtctcagaacaatcagtttttttcgggctttaccaactaaatcaaaaacccatctgagttttttaaagttgggtttttggtgggcggatttattttgggttcaggtcgggctgagcttttttacccaccacaacatctctacttggacgcatgtgataaaacagatgtaatctacgaacctactggaagggcataagacaccaaataacagaacagaaaccaagctatatattgncattgttgttttaagctaaaactaaaaactaaagctttgctaatcttctctgcgatgggaaaaagaacaatctttaaaccggaaaggtgt

SEQ ID NO: 17373 - DNA, 1880 bp, Arabidopsis thaliana landsberg
cataagatgggcaacatggaattacgtccctaatattacactaattgaatggttaaaattacttaagcctaccttatgtgaattcatttctctctcaagaactttttacaagtcatgataagaatcatatcccctatttaattccctaaaccttttccttttcgggggtttagatggcagaggcaggacactggtaaaaaatagcttatcatataacatctggatttatatacttctaagatatatactctcagattctcagtaaagttatccacagtagaaattacaaaaagctacacaaataataataccatactccttaaatcacgtgaatacatgtaagctagtacggaaaaaaaaggggtagagaaatttcgaaacatagttcacttagatcagagtaaaagttaaatgacaaaccaaataaaagaaaatgatggaaaaccaataatattcagtaactacttacattatcatgatctttggcccctactatttaaagcttactttttaaaatgcaattaatttgacaacggattcatattaacacaatctcaagttctcttacctctataaatttccgtaataaacttagcaatattatcggccaaaacccaaacaagaaagattttctcaagtaaaaaatgtagatgaagtagttcgttacatatataacgttttaaataactgacctcgtattgaggccaacaccaccccgaacaagttgagtgagacgagggatcaattgttcaagtgattcaatatccactatattaatacacagatcaagtgtttcccacattggagagcctttcgagattgaaattcgtaaattttcaagtttctcggtttctatgccaatattggcagcatgcaactgaaataaaataatttatatttaatacgatttcaggacaaggtgaagattgaaactgaagttgctgacagtaaacgatacctcaacatagttaagtccttggtcttcaagactagacaaactttccaacatacaacaaactaagtcggacaaatgtggacggagggcaactcctgcaccctgcaaacggtaacgaatagcacaaaatcacttaaaggatcataaatatttccgaggaggacattcagttcaccaaaactagcaagtaattcaaactgattaattatttcatgtttggagtaaaactgaaagaacacaccaacacaaggttaagttctgcaatctaggtttactgattactcaactgtattgaaataaaattaaaatgtaccactaccaatgtcacaagaataatctctgagaaacaggcatgatatgggaatatactaccaggagacaaattggtcatatatgagcataactctcttagatcatcaatctaccaaagttagggctaacctttgcaagcttcataacaactccaattgaagccttacgtacactgttgactttactcattattccttctgaaagcaaaaaaggaagaacaatatccatcgcttgttttgcatctgctagttcggtaagcgtgacatcacagatccttattgttaaggatgttacggcccgacataacttatcaccagcatttctcacagtttctttaatgtcatccattgcacggaaggcagctatccatagttttttcaaatgctccttgaccttttaataacataagggcgtgaaaaaacaataccacttagaaaatctgatagaccaacaatgtttacatacaagatagaaacaaccacgcagctgggttgatatatatatcctatacttcactacaagcaggttcaagaatccaaaaaaaaacccggcaaatatgtaaattgatatgcaaaaggaattacaacagcatccgaaagagaccaagaaaaga

SEQ ID NO: 17374 - DNA, 1714 bp, Arabidopsis thaliana landsberg
taaaagttgtagtacacttaataccctacaaaaaatagaaagagagtgaccccaaaaagattttagaaaaaccccaaaaaggtcaccaaagaggagaacataaaagaaaaatcaggtttttcttaagttcaaaaccaaccctctttcaaagatcacacatgttcatctttttcccaacctcaaaaccttatggcccaattgacaaaatggcgcctaaagacctctagaacaccctggaaaagtttgaacccaaccctaagtcgtttggcatgacttgacatggcttttgtctcggtgtggacagctcgaacagagccaacttctcacccccatatctctctacttcgaccatatctttgcttggaactcacatggaaaaggtaggatttggtgcagagaaaagaccgtacacgggtgttttgctaagatctgcacgctaaggcgaccaaatcggccgttgaaccctggcagaaggaaatcacacgtgtttgacgcgggctgacactcgggggcgcgctcagagcacgcccgcgcgcgaacccctgcgcgtctgcggccgcccgtgaccacgcccgcgccacggctataaagcccgccccagtgcccagccttcttccccgttgcatcccctatcccgcgcccaacaccccggagctcgcccatagctccgacgacctctccgcgacccgctagagctgcccgaggacaaccgccgtggccaaaccattccccgccctcctccgctcgatccaagcccctaggtagcttccctgggaggccgtgaagcttgccgaggcttgaaccgaggacccccgccaccggaaatgcgcaatcgtgcttgccagagttcggaaccccgccggcgcacgtggaccgggtgagtctctgcgccattttctgattcactgcacatagagcctctacgtcatcccgtggagctcatcgtgctgtttaattgaactagatcaccgtggttaagccggagcacccgccgctgacgagttcacccgcctgcacacgtggaccggccgattccggcatcaccgccgtcgagccgtacctcgttgtgaccgccaggacctcccgaagccaaccccacccctcgccggaccactctcgccgccggtaagccgcgccgcccttttccttttcgcggctactgtttacatatggggagggacctcggggaagaagaaagaaaggccagggggttttgtgcgctgtcagtgactcagggaaatagtagcgcaggggtagaaatgaatagattgatttagaaagaacccagggtcttcggtgcaaagtagttttccaggaaacctttttaaatattctgatttaaatccaaacagaactagaaaaattcaaaacttcagtttggtttacccaaatcgagtcaaaccaattttgccagatcctaaataatgtaaactacttaggcaaaacataaaaccccgaagtgttacagaaaactttaaagttttgattaaaatgattaactggtcaaaagctaaaagaaataaggaaaaatagctacactattagactggggttaagaaaatttagagaagtacttaatcacttcctaacctgtttaaaaataataaacccctctgtacacgcgattagggtagagtttccatttaaatccttttgtgcttaagttgtaaaaatatcaaggtggtttaataaagaccaggtacacgacattttt

SEQ ID NO: 17375 - DNA, 1577 bp, Arabidopsis thaliana landsberg
gtgatgaacgcttagttacaattacagcatttgaggttggttttttgcatgcttaactcttctcatatctctttgtttacttaatttgttccatctgtatattatccttggtttatgtttgctgcttgttcatcatgtagaaaaccaaagacataacctccgaatcccagagagctttagttcttgttttctctaacatgtatgagaatgccactgcaaaagtcctagatagtggcgtaacgtcatctatcactgcacggcttgtggtccggtcaaatcagattaattgtttgctgggagaagagggtcgtataaaaactacaattcagcaaagaactggtgcttttataactgtattgaacgttgagcagaacccaaaatgtgtttcagagaacaatcaagttgtgcaggtacactagcttgtaacccaagagagaactctatgatttactgcttttgtttggatattgtcttatatttttctttctaatagatttcaggagagttcccaaatgtgagagaagctataaaccaagttaccagcatgctacgagaggatcttatcaaccaatcgttccaaagggggtctcaatatgcagttaactattcagaagatccatttcctgaattgttcagtcctactgctggatatactccaacttttggtcggtcttccactatggaccctaatgatatcttccattactctagtcaagcttcatctaggttgtgggaatcaccggtatgtctctgtctcttacctttcccctctctatgtttggtttctttagctgatatacatagtataaatatagccacctgctgctccaagaagtgtaaatgatggaagtggaggattattttctacaagagatgaccttgtacttacaaggtaatagtacataacagctagatagattacgagagagtaacctgtccttgttctaaaaaaagtgacctttttttgcagtggactcaaaactgtgcgatatagagtttcagaatacgatgtgtgctctatgtttggatatggaaaggatggtcacaatcgtctactgaagagtctgagagaggtaatagtacacatatatattctgtttacttgatggacaagaaataggccaccttgaaagaaaagttggagcttaaatatcgggtgcatttgtgtcactccttgaacctgatccaggaaacatggatatgaccatttgcatatctgggacacctgatcaaatccaagcagctgaacaccgtcttcacgccatatatcctgagataaagcaggtttgatgagaagaaggcccaacctgaactagaacccaattggtttttcatccacttcagaaataaaagagctttcatctatctctttgagacattttcaatattttatttttcttgttggggatctttttgactctttgtacaattggattttcatcaagtcctgaatgaaccactttgattgattgaatgaaaaaccaatatctcaagtccctttcctctatcattggggttattattatgctgttagattgctggaacttactcgcacagttgaatgacactagactaat

SEQ ID NO: 17376 - DNA, 1959 bp, Arabidopsis thaliana landsberg
gattttattaggtgccattgtgaggtctaggtgggtctgtgatttctagataatgaaatcgatttggggatataaggtttaaatttgtttcaagacaaaacgacgttgtttggtctgtgcaataaacgacgttgttttgttctaacagggcaaataaacgagtcattaatgttgtaattttttttttgaacctatttaacgacatgactcaaatggcaagtcaacaaaaactttgttatttattttgaaagtcaacaaaaactttatgatttatttatcttccgtggagttcaagattaaatcatcccaaatttgaaagttcgtgatttttttgacatttttcccataaactttcccataaaagatttgttcttctttttgacgaaaagacttcttgtttatcattcaagatttggtcaattaatatgaaaaattagagatcgattactctaaactactttatggatgtgtttcttctacgcgtcagattgatatgttttcaccaaatcagtgttaactgttgatattcgactctaattggttttaaattaccgtagctggaaaactagctcaattttctataatttttatcagatgctctaaagctaaatcctaatgaaaaatcttcatctgttcgatcttttagtactttggaatggttcgaatcatcaattatcgatcttctttgcatccaagtgtgtattctattattttaatatgaaagaaattaacactacaacaaatatggacattgatagcagacgagaatagctcatttaccgtacctgctataaaagatgtgatttttttcggttactttataatagcacctaaaaacgctatgatagaaaaattatggagcgggaaaaaaaagtgacttagtccgccaatacttagtgaattattatttcttctaaaaaaaaaaaaactctcgatacttctctctcgtgaaaacctaagctcaatattctctctctcgtgaaaacctaatttcttcttccaaattctctgtgtgtacaagtgaaatctctatcaaatctccagcattatcgccgttcgtgaaaagccccaatttcgctgttcgtgagaagccctaaatctctatctcagctcaattgaactctcatcgaaggcatgtattctatcctctatgatttcattctctgtttcatatctctgtgatttcgacctgtttgattgtgatttcgacctgtttgattgtgatttcgacctctatgtgtgataatagtttcgactcaaatttagattgtgatttcgactgatttgtttcataaacgatttgtttcctaaacgattgtgaaacttatacaaattagggtactgatttggttacagatttgttgcataaacgattcatgtttcaatctgtaacgattcatgtgtaaacttatattgaatgagtttttttttttccaagtgctggtgattgtaatgttggggaactgaagcttctcatttctctgtactcacacaacaggttagtatcattcaaccaaattagttgattgcaatgttctgtcctttgagtctgattcgtatatagcttgttaatgttgttgtttatgtgatgagattagtatacttgcttaattatcttaagttatcgtgagattagtttatgtacatggaattgcttatgtgcttgatttggtgtactattgactgatttctaatatgaaaaactcttttaaagttgcttatggtttgaatatttacatggaattgtctgaattgttgcttattgtggattatgattggaaaattgtataatctgtatctctattttatctataaagggttaaatttatattataacatataatgtttgacaaggcatgggttcatctaaacaggtaaggaattataattatagttaggtttcatatggggtttggatacttagagtttctatttttttctttacttatccattaagag

SEQ ID NO: 17377 - DNA, 1542 bp, Arabidopsis thaliana landsberg
tcgtatgttccgtgtctattttgattgtatgttttaatgtctattgagtattgaggatatatcatatatacgagtaattttctaacaacattacattttctatgtaaaaggaacggacacattcaatgacgtaacctcacgtgcatggtcaaactgataacttgagaatacattttaccgatgttaagagttaagactactgaatttgcaatctaaactctttagcatgttgaaatattactcctaaaaagagtatagagattgaacactactcaattcattaacatgtaactattagtccgaaagaaagcttgatcacttcctcaattaaaatggttaatgcaaaaaaagcaaaaaaaaacaaaaaaaatggtttagtaaatttagtagtttagtttcggcattggcttggagtccaataaaaaaataaaaagcattatagtattaaaataataattcatgtgattacgttcctttatttaaataagtaagaaatagaaaacataaagtattcaatatttctgagtccaaaccgcaaaacaaagtctatatatactcaaaactctctccatctccaatactcaaaatctctcgagcttcttttcttaagtaatttgctctcatggcttgttcttacatattaacaccaaacccaaccaaactcaatctctcctttgcaccctccgatctcgacgctccttcgccgtcatcctccgttagtttcaccaacactaaaccaagacgccgtaaactctctgcaaactccgtctccgacacaccaaatctactgaatttcccaaactacccttctccaaaccccataattcccgaaaaagacacttcccgttggaaccctctccaacgcgccgcctccgccgcactcgacttcgccgaaaccgcattgttaagacgcgaacgttctaaacctctccctaaaacagttgatcctcgccatcagatctccggtaactacgctccggtaccggagaaatccgttaaatcatctctctccgttgatggaaaaatccctgactgcattgacggtgtttacctccgtaacggcgctaatccactcttcgagccagtttctggtcatcacctattcgacggtgacggtatggttcacgccgttaaaatcactaacggagacgcgagttactcgtgccggtttacggaaaccgagagattggttcaagagaaacaactcggttctccgattttccctaaagctataggtgagctacatggtcactctggaatcgcacggttgatgctattttacgcacgtggtttattcggtttattaaatcacaaaaacggaaccggagttgctaacgccggtttggtttacttccacgaccggttattagctatgtctgaagatgatctaccttaccaagttcgtgtcactgacaatggcgatttagagaccatcggaagattcgatttcgacggacaactaagctccgccatgatcgctcacccgaagattgatccggtaacgaaggagctatttgcgttgagctacgacgtcgttaagaa

SEQ ID NO: 17378 - DNA, 2067 bp, Arabidopsis thaliana landsberg
cttaaaagctgtattatttgctgtgagtggtattcataaaaactgtttggttctctctagtacccatttacaaaaatgcttgctgttttgctctctctcttgagatacgtcaacatatcttggcgtttgtaaattgaattcacagacgtccctttctatgggccagtattactaaagatggcccaacaaatgacccacgaatatggtagagagtttaagcgcacgtgatattaagattaacaacgtgacgcgtgtacaaaaggacgaattggcttttttcacgtgcgagaatattattggccataacatttgatcttagcatgaggtcgaccacattagattttcagattataaaaataattatctaatggttaactgtaacatgccgtcttgtcggtacggttcatacggattcatattaaaatttgtgatgactaaaaaagtatttaataaaatatatatattattaaaattgaggtagccggtgatcggtggatttgaagtacatatcgcatgcatgttccacgcgcagcttgtctctatatatgttccacgcacatgcaattcattactgcaaatttttttatttttttctcattgaattatatttgatattagaattggaaaagatataatacatatgaaaataaagagtttagactttaaagatacacaaagctcgacccatgaagaagggtttttttcgagaacattgcaaaaaccaaactaatcttatctcgagactaaacaaagctctcgaagttcaccacaaggacttcccgcacaacaaactgagaagacgggcttcaacacttatggcaataacaagatagtggaacttggtcttctccgtaaatgatgcttctttttcaaagagtacctaacccggatgaaccgtaggataatcgagaaccacttaaacctttcaacaccacaacgatcaattaattaagctaatcgttgcttaatacaacaaaagaagaactgataacgtaatccaagagttcaaccccaaactaacaaagtctaacttagtcgggaaagagaagctaaacccaaaaaagggagacaatagcccaaacaagggagataatttaacctaagctgctgatgttaccagatctcacgaagataaactgatcagagcaacaagtttcacaaaagcagaagacatgaaccgtatcttggttatgtgattcaaaaaagaattgtcaattattcgatgaaaaatagataaaatataactttatgcattaaccgtaactaatttagatatatgctttcaattattaaaatcatccaaaaaacctagtcaatctggttctgattaaatagtttgaaaattgtatgtcatgaatgggtttaaatgttgtaagaatatgtataatatcataatctaatcggctaatcaaattctccatttttaatttgtacgaatcagctatagtcattaattaacccgatctgattacattttggacatttactctcacacatatatatatcacttaatattatatacttttaagagtgtgagtgtctacaacatctacttatgagtgaaagaaatcctcctgtggtggcatgactgcgacaatataagattgaaggacgtaaatgatttttgctaagattttgactcggaaatatgcaatatttgtctgatttttacttttgtaatgtgtcaaaaacatttcacgttaaaatgttgtttttgacgggaggctcgagagagagggaccaaagatgtcttgaatggcacgcgttacttatccacttttctctttttatactgtgttcaaatgattggtaagtacactctactgtttttgtttcctgttaaattcttgtcaaaacattcagctttttaacttttttactggaaacagtaaacacacccacacactttttctatttacacacacacacactctatctaattacacacgtggcatagttattactttaggtgttggcccgtcaaaacgatatcttaattattaccatcgatcccaagatgtgaattttgaaaaactattaacaagttggagaaatgatgatttcgat

SEQ ID NO: 17379 - DNA, 2533 bp, Arabidopsis thaliana landsberg
tgatctacactatagatttatatttattgaatatacacacacttgacaagaccatgatatattttttgtattctattaacttgtataagcatcaagttttttatttattttcactgaattatatttgatattagatttggaaaggatacaatacatatacaagcatcaaagtctttgatttttttagtctacaaatcatagtttcctttatgatttaatattatatatttttcgacggataatttatatcattttatctaaaaagcttggataattaagtcgggtacgtattaagtgatggagatacctacgtaaaaccttataacatggtattgttttccggatattcgagtgagtgttccgaccccaaatgaagatgatttcctaaaaccttgtaagttgtaacatggttttagggaatcatgttaattttttaggcagggtagggaatcgtgttaatggcattaactaatagtgtgtacttaattagtaaagacatatctattaagagaaaattgactaaaccggacaattttggttagaccggataaagaccatgtggtccatttagccttagtgatcatatgtaaactcgatctagttgtaagttgttgtcatgtatctaacttcagaatcttacactcactaacacttcgagtttcttctcattggcacataacttagctccattctctttttctctctctcttctatctttcaccaaaatgccataactctctctacccctatataccaaaaattaatctgagtctctctatccatcaagagagagcatcacaatgggcaaacagagaagaaccatgatctcatttactctgtttctcacattgacaatgatgtcatcactcatcaatggcgataccgactcaatccaactaaacgacgacgttttaggactaatcgtcttcaaatcagacctcaacgacccattttcacaccttgagtcatggaccgaagacgacaacactccttgttcatggagctacgtcaaatgcaaccccaaaacatctcgagtcatcgagctttctctcgacggtttagccttaaccggaaaaatcaaccgcggaatccaaaagcttcaacgtttaaaagtactctcactttccaacaacaacttcaccggaaacatcaacgctctctcaaacaacaaccatctccaaaagctagatcttagccacaacaatctctccggtcaaatcccatcttctctcggttcaataacctccttgcaacaccttgacttaaccggaaactccttctccggtacactctctgacgatttcttcaacaactgttcctctcttagatatctttctctctcccacaaccacctcgaaggtcaaatcccaagtactctgtttcaatgctctgttttaaacagtctcaatctttcaagaaaccgtttctccggtaaccctagtttcgtctcaggaatctggagacttgagaggttaagagctttagatctatcttctaactcactttctggttcaatacctttggggatactctctctacataacttgaaagagttgcaactacagaggaatcagttctctggcgcattaccttcagatattggactctgtcctcatttaaacagagttgatctaagttccaatcgtttctctggtgaacttccaaaaactcttcaaaagctgaaatctttaaatcacttcgatttatcgaacaatttgctctccggtgatttcccgccatggatcggtgacatgaccggtttagtacacttggatttctccagcaatgagttaaccggaaagcttccttcttctattagtaacttgaggtctctaaaggatctaatcttgtctaagaacaaactctccggcgagctaccggaatctctggaatcatgcaaagagcttatgattgttcagcttaaaggcaatgacttctccggtaatattcgtgatggtttgtttgatcttggtcttcaagaaatggatttttcgggtaacggtttttccggttcgttcccgagaggctcaagtaggcttttcgagtcactcataaggctcgatctttcgcataacagtctcactggaagcatacctggtgaagtaggactcttcatccacatgagataccttaatttgtcatggaaccatttcaacacaagagttcctcctgaaattgagtttctacagaatttaacggtattggatcttaggaacagtgcactgattggttcggttcctgctgatatatgtgagtctcagagtcttcagatacttcaactggatggtaactcactaaccggttctataccggaaggaatcggaaactgctcttctcttaaattgttgtaagtctctgtttcgtatatacatttttgcttcattgcaaatgttttaccctaacaattacaagttttcttgttgcaggagtttgtctcataacaatcttaccggtcctattcctaaatctctttcaaacttacaagagctcaagattcttaaggtagagggtaataagcttagtggagaaatag

SEQ ID NO: 17380 - DNA, 1571 bp, Arabidopsis thaliana landsberg
  unsure (1)..(1571): unsure at all n locations
caagcaacagtgagacctcggttctgagtgcatgtggtaatgatgagaatgacagttcagatatggagaaagccgaagatgaagaagctaattcttcaacacgagcatttcagtggaagagaccagctgctggtacattaattgtttgcccagcgagtgttgtaaggcagtgggcaagagagcttgatgagaaggtttctgaagaatccaaactttctgtgttagtctaccatggtagtaataggaccaaagatcctaatgaattagcagaatacgatgtggttgtgacaacgtacgctattgttactaatgaagctcccaacaaattcttggtggatgaggatgagaacgatgaaaaaaatactgacagatatggtcttgcctctggcttctccaacaataagaaacggaaagtcgtggtgggtgctagtaagaagagtaaaagaagaggtagaaaaagcactaacgatacttcttctgagcctgattgtggtcctctaggaaaggttgggtggttcagaatagtactagatgaagctcagacaattaagaactatagaacacaaatggcaagatcatgttgcactcttcgagccaaaaggaggtggtgcttgtctggaacaccaatacaaaatacgattgatgatttatatagctatttcaggtttcttagatatgatccatatgcggtgtacaagtcattttacagtacaatcaaggttccaatttccagaaattcttgtcaaggttacaagaagcttcaagctgttctaagggctataatgctgcgccgcaccaaaggtactctgatcatctctttattctctttgatggttggttgagttgtttatgtggccgggacttctcaatcattactattaatattatctatgttatcttgacactttgtgattttatcggcttatctataatgtactcaataaagagagtacctgttagtttattgaannnnnnnnnnnnnnnnntcctccggtcatgtggttaataaaataacaattttgtcttctcatctgtacatttttccttttgtcttctcatctgttcatttttattttgatattttctgtttgatggtagatttttactttgctcctattatattcgtacgtggttgtgctgcacttgatggtttctgctaaatatctactgttnnnnnnnnnnnnnnnnnnnnnnnnnnnnnnnnnnnnaattaatctacctccaaaggtagtaaatttgagccaggtagacttttcagtggctgagcgctctttctacaagaagcttgaagctgattcacgttcacagttcaaggttctcctattttttcccccacaaagtatctgttcatccttggtttacaattgatgtgcacttttttggttaagaagatccatttatagcaactaaatgcttaataaatgtgaccttgtagttatgcagcaattttattggagatccatgtttctgagtgtcttgcaagtcttcatttcgtcctatgagagaacacanactagtagctgtacccgataggatgataaaatcattttccctgcaggcctatgctgatg

SEQ ID NO: 17381 - DNA, 2446 bp, Arabidopsis thaliana landsberg
gatgtttctgcggcttcaaatcgagtttttggaccattgtttcactcgccacattcgtacagcttcctccatcgatgatcaagctacaaactttctcattgacaatgtatcgcgaatgaagtaggttctctctttgctcttcttcttcggttcgggtttgaatgcttaaagtcctttttgccacgtaaagttctacgagctgttcttcatactcatccgaggatgagctcacgtattgcttctcttccggatccttagaaactttcctcgacatcaagagcttcccattagccggcttagcaatacactcgtcggacgaagaatcaggttctggcacgaactcgtcttcggatttcaactcgacattttcccttatgaccatcactctcttgttgatacattcattagcatagtgcccacatccatggcacttgaagcatcgaagatcacgagttttagtagtggtggcgctatcgggcctggttttgtattgcccttggatagtcggaaatgttttaggcccgcctttaggaacgaaggctggttgggcttctctacgataacttggccggttaaagtcataggtcggccgggatgatctatcataggctggccgggatgatcctttcctcttaacttgttgttccactaggatagccttgtgtagcatttcctccaattcttcataatgttccatctcgacatgaccatgaatttctcgattcaatcctcccaagaaccttgacatagtcgcttcacgatcctcctttatattgctgcgcaacagcaaagtttccatctgtttgtaatagtcttccaccgatcgagtaccttggacgagcttttgaagtttggaatgaagttcacgatgatagtggcttggcacaaacttacgcctcatgagaagcttcaacccttcccatgtatcaataggatactctccattacgccaccttgtagtgacgatttgatcccaccaactaagatcatagtcaaagaattcggttgcggcgaccttcacgcggttaacctcggcgtagttttgacaattgaacacaagttccattttcttttcctagtccaaataggcatccagatcattcttcccacgaaaaggtggaaccttcatcttatagccaccaagattctcaaccataagatctctttcttctctccatattttggtcttaggttactccggtgagatgagtgaccatggttgtagtattcttgagcgtttgggtctactaggtccttccttgggtcatggattcgactattcatctcctttcgagattgctctccttccgagatgacaacttgttcaacgggtgctttccctttcgctttaagttgattgttgattggcttaagctcgacatcaattattttctccatttgtaacgtgatagcatcgatgatggcttggttattaacactcttctctgagcttgattcggttgtcaccattttctgccaacaaacaacactaaaccagtcactagttcaaggagaatactaaacgtttttctaagaacagataaagaagatcgcacagatttaattatcaaatcatgctcaaaaattccataaacaattttctaaaatactagactcgtgttagattcaaatcaattgattttgcaattttatcgcaagccaattatttatgaaaattaaaacaagatgatagcgaagatgaacagacggatgggaagatgaacggacaaaatgaaacaaggtgatgaaataatgaatggaatgcaacgaaatgatgaagtgatgaaggatagagtactcaacttcagagtgtgctctgataccacttaatatgacttccctaagatcgacaatcttgaggttaagtagaggatagactttgcatttaagagatcatgagatcacgaaaaccaaaggatgtggagcaaatggtcacacaaaggatgcggatggcgtttgatttacctttgatgtagcttaaaagactttgagagtaaaaagatagatgagtttacaatgaggaaatacaagagtttaaatagagaagaagagaaggggaagagttagtcttagaacaagctccaaaaaaactcggaaaaggagaaatcataaatgaaaatttgaacaaaatatagacccctggccttccaaattcgtggtcctcttagtgggcttgggccggattgataatagggggttttggaagtgttacttaggcctcgttaaaaacctactaaggaaaacccaatcggacaaaaccttagcagggaaaaagagcacccaaagcaacacttagcccattaccaatcgtcttggaaagatatcacaaccatcatggttcttgtccaagtgtttgggtagtccgaaataccttggttaagaagattggtcttcgagcgagtcgaatatcttcttggttcggccaaagcttcctccacgacatgct

SEQ ID NO: 17382 - DNA, 729 bp, Arabidopsis thaliana landsberg
ggatttggtatagattatgattataacaaaatgagctcacgtctggagcaataataaagattttactaactaaaggacgaagatagccaagcgacagtgttatttacgaacaaaaagagttccatgcaagttgagggtaattaagaattgacttcgtaccctcaacgccattaactagtactctactcctattatgcccactaagagatcatgtacagacaaaattattgtctcaagtacgttaacagaaaataaaaaatttagatatgttgtaccttgtcaaaatgatgcaagatatggtgacggttcatgaactcaaaatacttgctgcttggagcacctgtctaatcaaaagaagacagttcgtaagatttatggttctcaaagcatctttttaactatttaacatccaaaagtgctatgcaacaataaatctgagtccataccgcaaagaatggaacagccattagcaggcatgatataaacctgtcaacataatgtgcatctgaaacctacagggaaaataatatttggtggacatcagaagtagttcggcggcacaacagtgaaagcttatgaaaccctgacgttttgagttcagaaactaataggttgagagcgtgacatgaaatactcacatgaaatgtatccaaaccagcctttgtttcaaaatattgtgcaagtcgttgcaagtctgcttcactttccttttgtagactctgcaaacat

SEQ ID NO: 17383 - DNA, 2916 bp, Arabidopsis thaliana landsberg
ttttgattccccttagaactctaactcttactctcttttttttcttttcttttcattctcattctcattcttaatcccattcattccatacacaatcccaatgccaaatacaagtctccacctagtcctagctaactcaaaaagcgtgggctaggtctacatgaaagactgttcttgtcggctcatacctaacacgttataccaagctcaatcgaaaaagacctcacaatcacacacaaatgatctttggcttgaaataaggctaggctaagggtataggaaactgctctaaaaatgagagacaactacttggattaacagagggtgatgaaatgaataagatgatccaagtatgtatatggtagccatgagttcataaacaatgcatagacatgataatttcaaattcagttcaggttctaatagatagggaatggcaacagataagcgagtttcgatcaaagtagtatagtcaagttacaaattcaaagcagggtgcgttcttacttcagagatacaatcggttatgcaacagagaactaacaacctaggcattgaacttacttcattgaatcaaaacatgcttatcgatttgaaatcatcatcatcccctatgcaaatgagcaatcctaaatgcaaacactctatatacaatcctaaaatgatatgcaatctacatgacactcttttttatgaaatcattttctgaaaatatttcaaatttttatggttattctatgccttagatgaatgcagactcaaaaatatacacaatgcaatacacacttcctgagccctcccccaaacttaaatcacacagtccactgtgcgaataaacttggaagagagtactcaggacaaatccaatcacagaaacaacaaatgaagaaacaaatcaagacaaatggtataatacaatggtgaagtgaggcgcttacctcagttgaagaatgaacgtagttgctcgtcaatggctgcctgcgattgctcccaggccatagacgaaccaccttgttctgtatcagctccagcaggtgggtacttgacctcatcagctctgtggcggccagcaccgctctgaggaaactcgacctctctccattctgctgcggccagcaccgcggtcgcgtaaactaccagactgcagaagtcgtctgctcctactactagatcgagtgagtgtggtcctccttttcctcccagattcacgaggcttgaatgatgaatgcctcgcagggacatgcagaatctcctgctctctgggctcaggcctgcgccgacttggctcagacgcgtcatatctcctcaaaggcatgtcctgagggagctgtccctgcggaatagttgtagtggaagaggagcagctgatcttgtccttcagaaacttgatagccctgaggcacttggcgagtaacttgtcctgtttcatgcaccacttctgcagcttgctgttgttcctgtgagcttcgctcaaactcctgctttccctcgcaggaggtatatgctcactgaaatgatacatgctcgtgtcaaactctgcctcatctatatcatccgtctcatcaatatcttctgttgtacctcctttggtatgactgatcttctcagttggcgacggatctctgaaagtaccggatcacaggactccggatttggttgctcttggaccgcgccgagtttagcggtagattgttccctatagtggcccacaaatccttaagctcttctctgtcaaatctgggtttggttccctttccactagggaaaccaaacagttcttccaacttcttgatcgaaagctgataccactgttcattcactgagaacgtcaagaagcctaaccccatggtatccagctcaaagtccgtgagtgcctcatacatctccacttgcagcgtggaaagaaactcgattgtctcctccttataggcagggtaagggtaagacatgagtgtctccagatgacacttctcgaacagatgctgcacgtcctccagtaaccccagctgggctaaagtctcatagcacggataccgcgttccccagaaatcattcatctcaaagaacctgatatactcttccactgtaacctcgtcaggtttgttcagcagctttgtctccttgcgccatgactctggctcatactcagtttcgatgtcctcatcaatcagctcatatctacttgacatcgccctctttcctctacaaatttcagctcttctcggattacgtcgggctgcagagcgttcgaattcatccctgaagctctggtaaacatgttgctctcttggtctaccggaccaggactcagcttcatccacattgttatcagggtcaatagaggattctccactgtagttactcattccgaagcctaaaaacaaatgtaactcaaaaatatacgttaatacgttagttccaacaaaaccagaaacacaaaccacacaaaccaaaaacaggtcgagtaaaccagtcgagtaaaccgaagctggtttttaaaaaaaaaaatattcgttttgtgggtagctggtcgagtgattatggagggccgagtgaagctatggggatagagtggtgaaaacgacgaggttatgcaggagctgcggtcgagtgaaccaaacggcaaggttgagttgcttccttggagaaagaacaggaagtcgagtagtttggatggtgtgtagacgcgatcgagtatgtgtagaggttatgatttcttggtcaaacgaccatgagcgagagggaacgggtggttgactgaagttggcagaccggtggttccagttgttgtggtactggtgaggtccagtgaaggttgagaggataacatatggctgtgagtggaagcgattccgtaaagctgaaccatgcggccttgactgaagaataggacaactgataactcttaggtagaaa

SEQ ID NO: 17384 - DNA, 1856 bp, Arabidopsis thaliana landsberg
acgctaatggagttcgcgtctgggttgatatagtaaaggtaaatgatgcagcagtttggaggcattcttctaagtttaagtgtatggaagatgcgttcagtttcactatagcatggctaaaggccaaagtagtgctcgtctaagctgatgtaagatgcattttgtactttcttttgtgttgcatggttcaaacttttgttgagacttgatacttgaacgaatgaatcaatggttgttttaaaatacttattgtaatagtcagatgatatgtactgtattttatgtagatgtttctattaaattctttttatatattgaaatttttgcaaaagcatatctacgatcaatagaaacaaaaatcataaatatatagcataaaaataaattttacatagaacatggccaaatatcatagctacataatacaaaaattataatagaaatattgttatactggtagtatattattaatttattatcaattttttcatgagttttagattttttttaactagtccatttggattagatgaaagatgtaaaagaagtaatgtattaatatatatatatatatatatatatatgtttagctattgcagtttaaaataaatatcttattttaactctatcagactatgtctgatttcagaactcatacatcgactagcgaccagcgacatcatacattgttcgtttgtctgtcgctgtattcagcgacctattacagcgacaatcgctaaaaactgtcgatgtgttgttcgtttgactgtcgctataaatagtcgctatatttttaaaatatttaattatttttcgtgctaatgtatattttaaaatcaaaatgtaaattatatatatcatacaccatgcgaaaaaataaattaatatatttatttattttagtattatcaaatttaatttgactataattagtttatgttatttgaatttaatttattttaacttaatttaataaaaattattttgattaaagtagaactcaaaccgttcatgatatcgcagagaaaaatattataaatttgtttaaatttgtttaaaaaatattataaacgaacagggccttacatgagcaaaacttctctaacctatgaaaatttatgtcaggatattttgtgaacatatcaaatcaaacgacaatcgcgagttttagcctttttggatttttaaatttaatattatatcctttaaaaaaataaaagtgtgattgttgtgagttttcgagaagtgttaattgttcccctgcttttttaattttcgttccaataccttttaattatctacaaattatttatcttgttattgctttcatttacttgcaattttcttttgttttaacttaaaaactacgaacaagttttttgtatgcaattgttatttgttaatttgagtcatgctacatttatatttattatgtatcatgatatatcatatatatttgaaaacataatcacacaataattagcgtccaccagtgcacagaaataaaaaaaacttttgacgaggtcaaaatataaatttaaaatatagtttataaccataatttatcatatttttacaattgatttaatatacaaaattggatttaaaaatagatgtttaatatacaaaattaattaaaaaatagatatttaatatataaaattatgttttaaaaattggaaaaagctaggtaagcaaatagattttaaaacgaggttattggaaaggaaaaaaaaaattgaatgcaatatcgtaataaaaatggaaaacatataaacaaaattaaacacttgaaaaataaatagatgctcagttaacaaaaaaagtactccataagaaaggatttaaacaattta

SEQ ID NO: 17385 - DNA, 1221 bp, Arabidopsis thaliana landsberg
caggcgagaatttaaaatggcgacatatcattttagactctcaatgcaaaagatgttgtagtgaagatgagacattggatcacttgttctttacctgcaaccatgctcaagctatctggaaaagctctccactttcaaacgcaggtttctttcacaacaacttatcctttgatgacaagtttagactagttctccaagtttgcaacaatgctagactggatgatatcacaaggcaactacccctatggatcctatggcgaatttggaagagcagaaacttgctagtatatcaaagaagaggcagttcatggagtgatgatatacaaaaggcaataacggacgcatgtgaatggttaccaacacagagtgaattgatgacaagggctggccggggacatatgcaatacggatggaagaaaccaaatcatggtttcatgaagtgcaattacgactgcagctaccgtcaagggggactagacactaacgctggatggatcatcagaaacgaagctggaacttttgttatggctgcacaaagtaaaggtcgccaatgcaactcggtcttagaagcgaaacaacaaggtttattaatggctatgcagcatacttgggtcagaggatacaagaaaatcatattcgaaggtgccaatagaagtgtggcagagtgtgtcaatggcaaagctcgaagttttgagttactcaccttgataagggatatgcaatcctggcagaagaaattcatacaagccaaagtcacatgggtgcctagaatgtgtaataaagtagctgattgtttggcgaagactccattcccaaataatacttctttttcatttttctcttatgttccatcttttgttgtacaattcctccatgaggattatacttcatcattataataaagcctaaagtttgaagtttataaaaaaaaaaaaaaaaaaaaattataagaaaaagatggcattcctgattattatttttgagaaagtagcattcttgccatttattcgtctaagtggtacaactaggacccgtccaaagatttgggcttcctgaaacaaattttttttttgacccatcaattagcaaaacagataaggagaatcggacacacaacctcttgaccaataaaatattacacaaacccgtaaaatcataatatatattttgtgatgtctaaagcatttgcttgtatatagcttccgtcctgggtacaacaca

SEQ ID NO: 17386 - DNA, 1137 bp, Arabidopsis thaliana landsberg
atcaaggggtttagaagggttacctaagtttgatgattatgctagtgttaaattagcggattatggtggtaagttgatggttttgtgggacacttatgtccctgaaagtgagtctaaggagaagatgatttggtgcgcagagatttcgcttcaaaaaaagtgcaacaatgaagagatttgggggacggtcgagtggttcgacgctgtgcttacagtccctgaggattgtaaattcgtgcgtgctattgctgctactgtttgatttatgactcatgaggcaggtttgaatgttatgactcaggttaaaatcgctttctttttcaagtacgtcacacttgaaggaatgtcttgtgttgtttggcgggatgcaaaatctgcactcatttactctgtagatgattaagcttgttttgtgactgtctcttttgagaaaaaaaaaaaaaaaacattttctcaaactctttctgccatagcttagtgatggacactcttgagataagcgggtattgtagtttttgttctgatggtatttctgattcatttgtataatgtgttagcttattttgggacagtgactgactgactgtgaagatatatttgaacactcttttgtatgggttgcatagaaggaagactacggttctctttaggttcatgactcatgagaattaacttttgcaagatacaaagttagtgcttgtttgtccagtgtacattcacatttatgtaactaaaatgacctagttgcaagaaaaaacagaggtttgtattataaggcaaggcttatgttcatgtcctgtaaactaaaggcccataattcacatggtatcttttggcccatgggctaacatattattgattttcctcgcgcaagataacgtgtccgagatctctggaatctgaaaaaccctaaaaggaagtttgttccttgataagttgttttcttttcgctagcgaatttgtttcagaaaatttatgttcccaatgtcttccacatccagatcttccgccgccaataatcgcaaagatccaccgcgtaagaaaaacaagcagacgaaatcaccggtgacgagagaaccaacctcgatcgattcacttcctaatgacatgttattgaactgctttgcccgtgtctct

SEQ ID NO: 17387 - DNA, 1107 bp, Arabidopsis thaliana landsberg
  unsure (1)..(1107): unsure at all n locations
catcaatgtgatatttcgtagttgggataaaaaaaagtctactttggtattagtttacttcttttaaaaccgggcgagaagattgtcgaaaaatcaaggaaagagtgacaaactttagaaaagtttagagggtattactgattcttattttacaaagaattttgatgactctaataaattatagaaagtaaagggatgttattagtttgtaagttaaatagaattttagtgattcaatcaatttttcttattagtttaagatttgtaaaagtaatctaaagtcttcataaatatgaagttattggattcataattttataaaatcaataaaagttttgtgttattgaattaaaacaaaaaaaatctatgattgttgatgaattaaattattatattattagttatatatgttctatactaatcaacaataaaattatattttaatttattaacaatcataaattcttttgttttaaatgaataacacaaaactttaattgactttataaaaaaataaattcaataatttcagatttatgaaaatattaaattctttttataaatcttaaatcaataacatcacactttcactaactttttaaaatcctaattgaataacaacatattcgatgtaatattttaattcattaaaactccatttaaatacaaacacaaaaacagaataaaaaagattcacaaacctattaacactcactaatgatccgatggaatatgtggattacaatagctttgaaacctctnnnnnnnnnnnnnnnnnnnnnnnnnnnnnnnnnnaagttgaacaaaaacaggcggatcagtcggtcgctgcttatgtggaggatgaatggagtggtgccggtgaggcgaattcaaaacgccgaggtatttattcgttgaaacatttaattatatattttaatagaaaaaaattaaacatttatgttttctgtaatctcagagagatttgtaataaacggtttaggtaaacgatagttaagatgttgtatttcaaaaaaacgcaaaaggtatttattcgtatttgtgtaagtaaaaaatgagagtttgtttaactctaaaattgagaggtccatatttcatttttta

SEQ ID NO: 17388 - DNA, 1751 bp, Arabidopsis thaliana landsberg
aaacaacaagacactttatttctttcggcgaaagctcttttcgaccacaaaaagacggacgacaacctagcggttctttttaccaagggtttggcacgagatcaagtgattcaatcatcaagagcaatgggtttaaagcctatgaatttaagatgtcgctttgatggataccccacctatatgactggagatctcaagaactaggttcaaaagggaaaactaaatcaaatgaaatctatttggagaattgtaagactactagtcgcagcccagtttccaggatgataaacagtgcttcttgtacatataaaggataagcaatgcttttaatgattgagtccaaagctttgatatataagtggagttttacaggagacttcttaaaccaaatgctagtgacatatcacctagtgagtgtggaatgtggccgtttctaggagaatgtgaggctatattctctaagttcactcatgaaatctaggattgttcaaggccaaaatgaaaacaatctagagaacttgtttttacgagaaaaagtagttgggttttacctgttgtctaggtttacataaaaatttgggtggtttaagacatcatgttcacctcctggccaagtaaactcgacagattaacagtgaatagtttaaggctgtaaaacgctactatctcatacacatctattttgtcgcatatactcttgaaagttgagtctgtaaagtctaagtcagtttaggttatcgagtcagtctaaagtctcaaatgtttagagtcaattctattcaagtgggagattgttggaactcaattttacacaagtggctctggccaactctccggtgacttttcttgtgatggccgtcaccggaatgaccggattatggagtctttggattccttgtaatgagccttattagatgtaaaaattgaagtttattttgaatgagaaattgagtgtttttaaatctggatttcggggtcctacatttcttcgtcttggctggctggttttcgtgtaggaaagaaggtatctgttgaaggaatttcctgaattagtttcttgtggagagaactcaaaacttttggaaattggttgtggtaatggcagtaccgtgcttccgattttacggtataattctttcgatcttcgccgtattattcttccgatttagctttttggagttaacctttatgtgttttatctttgtttttgtgtagtggaagcaagaacattactgtgtatgcttgtgattgtagcagtgacgctcttgttaggactaaagagaacattgatcgcgctatttcttcggttgataactttcattctttttgttgtgacttttcgacttctgagtttccagattgggtggcatgtgatcgttgtcgagacaagtttatgcttaaccactcaggttttggtctctctgtagcaatttatccatacacattgttctctcatacacgtcctagctaatcttgtatatcttcattaataggagggagtgagagcaaacattgcatcggtggggtggattttgtcactctggtatgtgaacatcgctcatttagttaagaggaataacaatgctcactgtaggaaacagtaatgtcagatattctgcagtggaactagagtagttgctctcatggtttttataatgtgcccataagatagatgtgaaactgaaatttatgtatctaatcttctatgatctgattcttagctattaggcttttccacatgtgttatatgc

SEQ ID NO: 17389 - DNA, 656 bp, Arabidopsis thaliana landsberg
gccggtaagattatataatctgaatgttagtgggaagagtagctgtgtatctatctccttgtttatcttgtatgatgtttttttattggtgcatatgattttggtcttgaatacgacattgaaactgaactctgctgtgtatcttactttgacatggctaataagagtgttactgcaagagcaattgctaatatcaatctttactgttgtttatagctaattttacatgtttctctgctgcagactgattgggaaggtggattctttccattaacgatgcacttcagtgaggattatccgagcaaacctccgaaatgtaaatttccacaagggtttttccaccctaatgtctatccatctggaactgtctgtctctctatccttaacgaggattatgtaagtactctactgtttctttctttgcatttctccatgagcaaaagccagctttatcctcaagctctcttttgttatgtgtatatccatagggatggagaccagccatcaccgtgaagcagattcttgttggtattcaggatttacttgacacaccgaatcccgctgaccctgcacagacagatggttatcatctcttctgtcaggtacataaaaaaatgaaaactctaaacacaatattaggttttgaaacataggaa

SEQ ID NO: 17390 - DNA, 2663 bp, Arabidopsis thaliana landsberg
ctccttgcggagccatttctccctctttttaccggtccaggtactgataagactcaagcacactttaccacatttgtatagattcgggttgattctaagcccgcccgaatggtaatgaactttctgtcaacaacaaaatggacttccagagtcattaagggttccaagtaaaaaatagaaaacagaacacatattgtttctgaggacatactggtggcactgaaggataggtatctgggaactgaatatcgaaaaagaagagaccgtcatggtaaggagttccctcggctccaataattacagctctcaaaatatctattcttgattcacatgctctgacaaatattgtctctgtttgccaaacaaaaaatgggatagaaacttaagaacaaatgtgaataagtgttgctgcagtctatacacctacctggcaaattcttgtcaagaattttgcactctttttgaatatctttcacccaattcttctagtgctggagagtaaaaagagagatggcgggtaacattaaagttggtgatatgaaagagagattaaggatacatcaacccctatcgagagaataaatatatcatcacctgctttgaagatttaccctttgaagcatagtgatgatctgagaaatcctcgacggtgtcaaatcttttaaaatccctcagaaactcttccttaagtttcctagcattggaagaatcgtgaactgaagaaataggctcagccgctataggatgagaagaactagcagaagcatcataactaaaagggtttggagtaggattggtgaccatcactacatcaggagtctgaggttgaaccgcagaaaacgatacagaagaatagatagcctgattctgctgaggcaaagtataatcccataattgaggaacattagtcgttgccagagatactgttccatatcctttcatggattgacttctcataatgcttatacttgatttcgcagttcccttactgctcgaatttaaaccccaaggtaccgtcacctctgcaccagctggaacatccttaggatgtagaacgtcttgatacattgagtagtcatcaacatcaattggttgattagcaaattcactaaaagggatattcttatgaccataatagtcttggaacgtctctaagttaagcagcgacgatccatgatgatgagattgaacgctgttgacccaaaaggagtcaacttgtattggcttccctacgttcttaatatcaacaagattggtatccttaacaacaccaacattgcggaattcataactttccacatcaatcacttcaggaacagcctacaacaagataaaagcaacaaactttaccatcaactacgattgataaacaaatcaaaaacagagaaaacaattgaaatttcacaaacattcacaagagacgaaccaaacacaaaatctaaacgtaagcttattgatttcacataagctataaagctgatcactttcaaacttatgaaactctaagaacacaatcaatacaattcatgaagaacaaaacccatcaatcaaacggcaaagagaaacagttgaagcatagattaaccaaaccccacataaaccctgaaatcaaaaccaaaccctaaaacacccagatgatcattcacgcatcataagcgaacaaaattccacctttatccaggtgaatcagcaaaattctgcatagaaatataaaaatcgaacctttctgggtttacgagttctagaacccgaagcgatcagaggaggaggagggatctccaccacgtcaggctccattgacgaaattcccaaagtttttgaaaacaaatataaaaaaccaaacagtgagtgattatagaaaagagaaagatttgggcctcgggattatagggaaggttttgtctcttcacaattcgcgccggagtatatataacacacacccaaacagtgaagattttactctatcgactctttttaaacacgccactccaaaatttctcatactctataatctctattttttttttttttgtcgagttctcaataatctcttaatttaattaacttttaatcatatttgttttccaaattaatctcttaatttaattaacatttagtcaatcaaaaggtctccgtcgattatccttaatttgctgacgtggcaagatcgacggttctgatgggtgattaggaaggtgaagctaggaatttatacccgttggatatgaggataggtttttataatcaatccaacggctaacaacagaggaattatcattggaaatcaaaatggaagattagaagataataacaccaataaagtaaatttataattgattttactatttcaatgataaatttggaattaaataaagaagttaaatatatcaaaaatcagaaataaatatattggtgtatctagagttttgaccaatatataaccttttagttgctctatttattacatgaccatttgtttaaattcccaaaaagaataaaatcaacaatatgttttttgatacatgaaattctgtttttaattactctcaaactttgaaaccctctgatcgaagacacaaaatatgagcttcgatccatttcgtgcaagcggattcaccgaattaaacaatgcattcatctctaagtttctttgtatcaggaca

SEQ ID NO: 17391 - DNA, 1218 bp, Arabidopsis thaliana landsberg
tgtttgaaagattcttacttctttttttcatgtaaaattcagacactctgtggatctcttgaccggagttacacctgctatggtcagtttcatacaagggagaagtactgagacatcattcagtagctccatcgcttccttatacaagagacgtccaacctctattgcaaattcgtttgtgtcttccacaagcaaacaaccgctgctctctgagaaagacgatgtatcattcctttcatctcaggtcgggttatccaacaccgatctctcgtatggagaaccaaatttttgctcgtttccccaatctgttctaaatggtaagacgtagtagtatcgatattgattttgtctcaaaagtctttagggtttgggcattcggttcggttgaacagagattttatcgtcataacaaaaagaaaagtttcaatctctctttaagttgaacctatttttggtgaaggaatcaatgtcctttgtggaataagtctactcacaatgccttacgcggtgaaagaaggaggatggctcgggctttgtatactcttatcctttgctatcatcacttgctacactggtatcctcctcaaacgatgtcttgagagctcttctgatctccgtacctacccggacattggtcaagctgcctttggatttacaggccgcctcatcatctccgtgagttatatggaaatgatttacatatatacttcacatatctccaaactaatatttagggttcttgatctctgctgagagttgcagatacttctgtacatggagttatacgtatgttgtgtggagtatataatcatgatgagcgataatttatcgagagttttccccaacattacattaaacatcgttggagtatctctagattcttctcagatctttgctatatcagctactcttattgttcttcctacagtttggctcaaagaccttagcttactctcctatctctcaggttccattttctatataaatgatcataagatccttccaatatagcttcgagattcgttcatatattctttaatatgtgtgttccattcttttagccggaggagtctttgtttcgatcttgctggctctttgtctcttctgggttgggtcggttgatgcagtcgggtttcacacgggtggaaaagctcttgaaatcgataacttacccgtcgctattgggatattcgggtttgggttcaggggtcgtgcagt

SEQ ID NO: 17392 - DNA, 338 bp, Arabidopsis thaliana landsberg
  unsure (1)..(338): unsure at all n locations
cttttacattcttgggaggtacnttatgtaacataccccttttttacatctatccaaagtagtgccagcactactgtctatttttttaatttgatttctttcgtcacaacacctaaggggttttccgttgagagattctacgagtcatttattaaaccacgcgaaaagcacgaatacttatgtcaacaatagatttaagcattttcttctcaaatatcttacattggaaaagcangaatacttatgtcaacaagtaattagagtttttttctctagccttctatatcntgatacctccaaggcagtgttacaactcctcctaattatgtacgaattgg

SEQ ID NO: 17393 - DNA, 511 bp, Arabidopsis thaliana landsberg
gctttgctcctggttgccaagattcttatgagatcatcatcagcatataagccttttccttgatcttctcgtgaagtatcttagcctcggacctaactaacgtcatgttcacttcatctccatcgtacctaaaagtgctcacaagaggtaccaagagctgcataaacaaaaacatatgtcacaaatttatatgcattcttgacatagttatacgaactgagtttgttagctaggaatcttaattacatcaataaacatatgagatttcatctagtatacaaaatagatgaactagatacatttgattttattggatatctcagatggaattaagctcatgaaactttcacataattaattatataatacctttcgaatgtctccagatgtgtggtatgcgacgtcttcctcgagggaggtcttgtaacgggcttggtatgcttgcttggcattaaagagctcatgagcagatctagtaccagcgatttcgaacagaaccccaattgttttt

SEQ ID NO: 17394 - DNA, 2191 bp, Arabidopsis thaliana landsberg
  unsure (1)..(2191): unsure at all n locations
agagagcgagaaaaaaaagattgaaagaaaatgcagagcttgagctaaacgtcttatagcgattacctcaaacgacatcgcttaacatcatcaatagatacaaccacttaaccggctcggttatctttctggttcgtttaaatccccgaatactccgagcgagttagagtctttccttcaacggcaaaaccaaaacctctcaagagttccttttattgttttttcaacatcactctccattttttgtaaaaataaaaatatctaatttttcttgtgtggctctccaaacattttcacgaatgttgttcatcatcaacatgaagaccattccacattcaattcttaacccatattcgaagattcactcaatttttgggtctttttttgatttttttattccgagaaaatcccaaacggataatgcacacaaggtgttcgacaaaattccccaatactcaaaattgtgggtctctctctgtttgtttaaggcttgtgtcacgtggctctcacgtgatataaaaagccagcctcttcttcttcagtaccttacggttataatcgttgattgttcccgcctctactctcacaaatctctctgaatcatcgtgatccacaaaacaaaaccttcgagagcaagaatcatcgtgaagaatcgttactatggcgtcttctttcaagaaggatgttatggcggaaagactctacaaagacgctgaagatctcatcgctaaaggaaatcacatcaaggccttggagatacttgaagatttgatttcaatccattggaatgccaatgacgcatggcttcttcatatcgaacaaggtaatgttttcgtagacctagctgaaaaagcagaggaccgtgacatggaagtcgcatacttgttgggttgtgttgcttgcttttcgcaacatgtgacggtatttgaactttgtgcacaatcactcttcatgttgggcagaaaccttgcgtctgtgtcacattacaagaaatgcttgaagaaagcaagagaggctttatctgatagtaactctaagaaactgagttcttctactccagtggctttccgagccatagtatcccgaaagaagaaagacctcgagggttttatcgaagatgcagagtccatgatcgctgcttccaagacttctcctttacaaaaacctgagccaaaagttcgggacccagagaaaactccagagccgtctaaggatgattttcagcggtttaggtcctattgggtgggattgggtgttaagatcaaaagggactttctgaaagtaagcattgcaaagcttacaagttttgtcgggggaatacgtaaaagaaaggcacaagaagctttggagcaagctctcgcttccaagaaagacagaaaatggacattctggatgtgtagaactaaatgttccaagaggtgctctagtgttgaagaatgtaggaagcattttgaacaacaacacgatgcagatttcaaaccttcttcagaaaaggatatagtcaagcggataggaaataactgggctcgtaagatatcggttggaggttgggaaccagtggatacagtagctgccgttgaaatgatcaagaatcggctcgcagatgtgaaagcgtttgcacctaagaatggatggtccgaagagtggcctttagctgcagatgaagatcgcagtaagttactcaaggaaatcaaattgctccttgtgtcactttgtgaccataaaattcttccttctagcattcgagagtggctgatgcgttttccggttcaacatcttgcaaaacttgatgtttccgaacagagtcttattgattctcacctagtgggaacacctcagagtatctgttttcttgaaagtcatgaactcaatcaaatcctagactttctaaaaaccatcaagtgtaaaaggaatgatggtacagatctggtttgcagagcagtggacagtttcttggatcatactcgagtcaaagaaaagatcgactttgaccctcagttttcatttctgcttctggataaaagactgctaaaatgcaaagatgttccattcgatgatgaagggacaatcaatgtttttgatcccaatgctcactacgccaaggcaccagctcaggcagatgatatcatatcctggntaactgactaccattcagtagatacgatcttttccagacctatcanggaacaca

SEQ ID NO: 17395 - DNA, 2170 bp, Arabidopsis thaliana landsberg
gaaaatacttggaactgcccatcatcgacatctcgaatttctgtgtcatgatcctactaaactcttcacatgtagactcgttagtagacccaaatataatatcatcaacataaatttggcatacaaacaagtcattttcaagagttttagtgaagagtgtaggatcggccttgccaattttgaagccattagcaataaggaaatctcttaggcattcataccatgctcttggggcttgcttgagcccataaagcgccttagagagcctatagacatggttaggatacttactgtcttcaaagccgggaggttgctcaacatagacctcttccttgattggtccattgaggaaggcactcttcacgtccatttgatagagcttaaagccatggtaagtagcataggctaataatatgcgaattgactcaagcctagctacgggtgcataggtttcatcgaaatccaaaccttcgacttgggagtatcctttggccacgagtcgagctttgttccttgtcaccacaccatgctcatcttgcttgttgcggaagacccatttggttcctacaacattttggttaggacgtggaactaaatgccatacctcattcctcgtgaaattgttgagctcctcttgcatcgccaccacccaatccgaatcttgaagagcttcctctaccctgtgtggctcaatagaggaaacaaaagagtaatgtccacaaaaatgagcaacccgagatcgagtagttacccccttatgaatgtcgccgaggatggtgtcgacggggtgatctcgttggattgcgtggtggactcttgggtgtggcggtcttggttcttcctcatcctccttttcttgatcatttgtatctcccccttaatcattgctatcatcttgaggtggctcgtcttcttgattttgctcttcattattttgagcctcatcctcattttgagttggtggagatgcttgcatggaggaggatggttgatcttgtgtacttggaggctcttcggattccttaggacacacatccccgatggacatgttccttagcgcgatgcatggagcctgttcttcacctatctcatcaagatcaacttgctctacttgagagccgttagtttcatcaaacacaacgtcacaagagacttcaactagtccagtggacttgttaaagaccctatatgcccttgtgtttgagtcataaccaagtaaaaagccttctacatccttaggagcaaatttagattttctacttcttttaacaagaataaaacatttgctaccaaagactctaaaatatgaaacattggcctttttaccggttaggagttcataagatgtcttcttgaggattcagtgaaggtagagccggttgatggagtaccaggcggtgttaatcgcctcggcccaaaaccggtccggagtcttgtactcatcaagcatggtcctcgccatatccagtagagttctattcttactctccactacacaattttgttgtggtgtgtagggagaagagaactcatgcttgatgccctcctccttctatttgtgaattcttgaactccgttccattatcgcttcttattttcttaatccttaatccgaactcattttgagcccgtctcaagaacccctttaaggtctcttgggtttgagatttttcctgcaaaaagaacacccaagtgaagcgagaataatcatccactattacaagacagtacttactcccgccgatgcttatgtaagcaatcgggccgaatagatccatgtggagtagctcaagcggcctgtcggtcatcatgatgttcttgtgtggatgatgggcaccaacttgctttcctgcttggcatgcgctacaaatcctgtctttctcaaaatgaacatttgttagtcctaaaatgtgttctccctttagaagcttatgaagattctttatcccaacatgggctagtcggcggtgccagagccaacccatgttagtcttagcaattaagcatgtgtcgagttcagctctatcaaaatctactaagtatagctgaccctctaacacacccttaaatgctattgaatcattacttcttctaaagacagtgacacctacatcagtaaagagacagttgtagcccattttgcataattgagatacagaaagcaaattgt

SEQ ID NO: 17396 - DNA, 1711 bp, Arabidopsis thaliana landsberg
tccccacatacaacatcatcatcatattcccctctctgcattccctcctgaaaccatgtactgtaccagtagaagcattcctaagaaaatctacaaaaatctaaatcagaaaccgaaaaaagaagtatcatagctggtagatcagacagcggttgcgataccgtcgaatctaggacgtgctctatcagttgaaatcccttcttccactgacttcctcttgttgttgatactcaatgtttgctcctcttgttgaactaatagcagatcttgttgcagaggcaagatttcaatttcaatgtttgttgaatctttaatctctggatcagctactgcagtggggactccattttcgacttttgaagttgtctcaatctcctccagcttctggttcttcaactttgttttcatcatatgaggtttcaacttgttaagatcagccaatcttactggtttcaagaaaaactcttcagctccttcttctaaacatctgttcatgatcaagacacaagaaatttttcaattaattcccggggaaatgagagattcaaaccacaatctaaaggggaacaaactcaaacttcataggttcaatctttctttacctgctgattcttgcaggaacgttctctgaggacatgataactactggtatatctctaaaagctgatgattcctgcaaaattgtagaacaagataattcccagattaatcaaaagattttatttatacacatcaaatagcatatattctcatctcctattgacattctctcactttcttgactgaaaatatgaaaactttcctcttaaattaggaaaaaaaagcaccttgactttcttgagcaaatcataaccagtcatgccaggcatacaataatctgtaattataagattcacttcaactacctgttgaaagcaaccaatcaaacacaacaacttcaataacaacagcaacaacaacaacaacaacaacaacaacaaaaacagaagaaaaagtgatttacaaaaataaaagagcaaacctggtgattaacaggagccttagaaaacgcatttgggtcgttactatcaatactttgtcttaaacccagaaactccaaagcctttgagccagaatcaacagttgttactataaataccaaacacacagaaaaaagcttagatctttcttcgaccattatcaaacaaagattgagacttttttcttgtaacacacatttataccttgacacgaagacttttgaagcaatctctcaataagtttccgatcaaataaactatcatcaacagctaaaacatgaaactgcgattctgctgccatacccattgcagaaacttgaagataacaaataaagaagatcttatctcaaatcgatgaacccagatgtaaagtcttcgactttttttttttgttcttcactagaaacaatcaattattttctttcctatctccgggatttgatgcgattttagttttaaatttacgatgctgaagcttaggtgaggaagagaaataaagagtctgcacttaaaacaagatctgattgattataactctttttatttttctccttctaccaaatctttgcaaaagagagggaaaaatgaatagaactaaattagctttgaattgtggagaaagaaaagaaactaatagaacaaaaaacaaaatattttgtttttttttaagaagacagcgcagaggaaggaaa

SEQ ID NO: 17397 - DNA, 1624 bp, Arabidopsis thaliana landsberg
cttatgcaatgtctcgtctatggcgacaacatagggtgctccccctgtgcgtttctccagcaccagagccttgggagggctgcagactccgggatcacagtcggctagtgcagatccggctgagacaggagcggctctttccgttcaataaccctagtaccggcagagggctgctcccatccccataggttgcgccgagagtggagtttgcccaacagagagtcgataatgcctacaaaacggtggagctgccactgtacgaaggagggaacccggatgactggttgttccagatagagaagtgttttgaacgcaacggtactccggagtatgcaaagctcgaggaagctctaacctgtctcagaggttcggcgatccggtggtggagacaggccaagtttcgagaaaggataaccaactgggtggaatttcaggaacgtgttctgataaggttcaaaccctgtagaggtgagacagctttggacctattgttgaacatcacccagacaggaactgtggaggagtacagagagcgttttgaagagataaccgttgagttaccacatgtttctgatgctgttttggagtcggcttttctgaagggcctgaagaagaagattagagatcaggtgaagttgagtaggccgaaggatatatatgacatgatagagatagccaagctcgtcgagtctcaagagaaggaggggttccaaaggccgttcaccaagccatcttataactctccttatgttccaagctctaagcctttgtctccagggtttgctaagggcaacgatactaacactctaaggagaccagcgagtggaggaccgaatccttgtcgtttctgtggggataagtggtttcccgggcataggtgcaaacaaaagctgaaatgtatggcgattgaagaggagaatgagttggaagctatgatggaggaggaacctaatgagcagaatgagacggcagagaccgctgaagaaaaagaagatctagtgggtcttgagctacactctatggctggcttgacaggagagaagtcaatgaagatccgagggaggataattgggaaggaagtggtggtgttggtggattccggagccacaaggaatttcatttcagagagggtggttcaggaattgcaactgcatattactgagaataatgggttcggggtagtagttgctggtggagagataagaaggggaagaggcaaatgcgaaggagttattctggaagtccaaggagtagagatcatggaagacttcttagtgtttgatcttggagaaagtactgatgtggtgatgggttattcttggttagccacgctgggggacacaagggttaactgggacttaaggaggctgagttggaagattggctctcggtgggttactataacaggggaccctgcactaagcaagagccagatatccctgcagtcgatggagagagtgattagaaggcagggagatgtttacttactggagctaacatcccttttcgagcaggagagtggtcagaaaaagggagtttatgaaaggaggtgaggcggtagtgcaacagtatgaggaggtatttgaaatgcctagggactgccaccgaagggcagggagcatgc

SEQ ID NO: 17398 - DNA, 2007 bp, Arabidopsis thaliana landsberg
cacgaggcgtttggttcggcggctcgtgccttttcgacagccattttatttcttcctcatgggaacataatgcgagtctcaggtgcaaggcgtccaagattttttgtggtttggacaaatttaactcctttcggaattcggacttgtaccacatcccttcttcagagcagagagagtcgcgacgtcattgattccctcgactttggctagggtggatcagaactttgttaggaaatccctaagtgtctcgttcagctgttgagatagcgaccaaaggtcggcatcagacgtgcccggatcgattagcaccgagtattgcttgaggaagagcgtcgatagctcctgaaaactgttgacagaatttccttcgagtcttgagaaccaatctagggctggtcctttcaaatgtttaacgaacagataacagagaccggtgtctctttcctcaagccgtaacttggctcgggctatagagattatgaaagacttcaaatgccccttcaggtcggatgacccgttgaagtactcgatccttagctttcctgggtctgaaattatcgcgttagagatcttgcgagtgaaaggcgtgttgtgggattccactaggatgcagtcgatatttggggctgaggagactgcgttgtgcatctgtgatcgtacgagcttcatctcggtttccgccttggctagggagagtttgatggcgtttatttccagcttcctagcgtattcctcagcccatctaacgttttcttccaaatcttcgccatcggagacttcgatctggtcaacctcgtcaacttcggctcggggaattggatcccgcgggtcggcttctttcccttaatccatcatattctctcccgaggctactggttctgctcgggtttcgctgagccctggaggagtttgccgaaatggcctcgttgtgttaccgggtgtgttgaacacaagtcttgttggattgagatctaccgctgctcgccgatcaggaaagtgtcgtgcgccaaagcgattggtcctgacctgtccttgagaagtagccgctttgagctgttgggccaaggatcgctttgcttgctcattgttgttcaccttcttctggagttgtgccatcatgctcctcagttctgctaggactgcgggagtggcgacttcgggagcatttgtctggattggaggaacagggtttccctccgcgtcaacggtggtagcggggatctggttgttggtcatcgttgcttgatcggtcggttttgtgttcttggagaaagagaaatctcttcccctccttctagcgccaaattgtgagagtcgaaactcacacaatcgaaattgtacttagggtatctgtgactaccgcttacgttgttcttgatattaccgcgaaactctcaaagaactacagaattgtttgattaccgatgacggtgttcttgatattattattgaagagatgatgatttgatcgtacaagtgtttagaaaagtagaaaataagtgtttttgccttcaaaatcatagcgttttgatagcttgaaattgagagtgtttttgtgcgtatgccctttgttagatctttgaggcactttatataggactttggtaaaccgcctctcgcgatattctcggaagatttccacttatctcagagtcggtgatggaggatctttcataaatggagattgtcctaattctttgggaacttcgggaaaacttttagattcgataatatcctcggagattctccaatatcatttccgggatcccggctatgatatcttgatccttcggctggttttgtacaagtattctcctagggtgaatttaacaatcgtgggctcggaccgaaggctgcgccttccaagccgagcccaagcggtcccgaggtgtactcaagcttggctcgagtgtgtttctggaacaacacccgaacaaagtatcgtttatcccaggtgtttccctgggtcctgaagtggtatgcgtcaacattagcgtccaagcatca

SEQ ID NO: 17399 - DNA, 2498 bp, Arabidopsis thaliana landsberg
tgtggggatcgatgtgaacagtcctttgtcagttgggacatgcttctgcatcttactattccgacataattgggaagatcgaaagcataaacctcttgagcggacatccaatacaggtttgggttgattatgaagacaatatgcttaatgtttcgatggctcctcgtgaagtgcagaagccaagtcagactcttttgccacaacacattaatctttcagatattttcccgaacagaagacttttcgttggattctctgcagcaacagggacagctatcagttatcagtatgttctttcatggagttttagcacaagcagaggatcactgcagcggtttgacatctcaagactccctgaagttcctcatcctagagctgaacataagaacctatctccattgtttattgacctgcttggttttctggctatcatgggcttgtgtactcttactggaatgtattttttcaagaggggcaagtatgcagaaataaccgaagaatgggaaaatgaatttggtgcacatcggttctcttacaaatccttgtacaaagcaacaaaagggtttcacaaggatggatttcttggaaaaggaggttttggagaagtctacagaggaaaactccttttaagcagagaaatagctgtgaagagaatgtcacatgatggtgatcaagggttgaagcaatttgtggcagaagtggtgagcatgagatgtctgaaacataggaatcttgttccacttcttgggtattgcaggagaaagcatgagtttcttcttgtctctgattacatgaccaatggtagtctcgacgagcatttgtttgatgaccagaaaccggtactttcttggccacaaagacttgtgattattaagggtattgcatctgctctctgttaccttcatacaggtgctgaccaagttgttctgcaccgagatatcaaagcttcaaacattatgttggatgctgagttcaatggaaggttaggggattttggtatggcaaggtttcatgatcatgggaaagaccctgctacaacatgctgctgtgggaaccattggctacatggcaccagagcttgctacagtgggagcttgcactgccacggatgtgtatggctttggtgcctttttacttgaagtaacatgtgggaggagacctgtggaacctgggttgtcagctgaaagatggtatatagttaagtgggtctgcgaatgttggaaaatggcttctttgctaggagcaagagatccaagaatgagaggtgaaatctcagctgaggaagttgaaatggtattgaaactagggttgctttgcacaaatggtgtgtcagaactgaggccttctatggaagatattgttcaatacttaaacggaagcttagagctgcctgatatctctccaaattctcctggtatcgggtcctttaccccactgattatcggatcaaacccccctgtctcccccagtaccaagaccttttacacttcttcctcagccaacgattccacatttgtcactcactcaattatccatggggatggacggtagctttgctcctcttctcttagatattttttcggaatgaggaaaagccatgctagggcttgtgtgaaggtactttggtttggcattgtgctccccttgtgaagtctatttttgatatttctcaaagacatccagcattgaaaagtagtgtttggagtcttttgtagaaatgctgtaaagctttgtaaattttgatgtttctttacactttactcttttatgtaaccgtactatctgcatatctctttctacattagtttattgcattttccaataaataaggcttttgttcatatgtttattagttgttcttcactctgtctgctaatttgatctcattctgttacttctctgtacgataaaaaataatttgtatgacaagccccagattagcagaaactagtgttttggttcttggcttgaatgatgcaatgaccttccatctggggagggtcggtttcagtgtgatggtttcatgcacaatctgtatttgagtaatctccgacttctttgactcctgtgtcaaatgagcatatatcccatcttgttcggacttttgttccatctacaagtcctggagttcaggttttgttgctaatgtcgttgctatgaatctcatgcttgttttggatttttctaactgttcacattaaatcttcatctgttttcttatattccactggttttcttgaatagttgaactgaggccagtttcgtcaatggagctgattgggtacaagagagcatcatcaactttgtgatcgaactgataatagaattagagatggttggttgtttcatcccatgacaggtaaagtttagaggtttattcttgaaactgttaaaggactacacttatgtttttatatccgcgacatattcagctatggtctgaggtaatagagagttggtttcctcatattttatcataactttcaatttctaaagga

SEQ ID NO: 17400 - DNA, 901 bp, Arabidopsis thaliana landsberg
atcctcctcaccaacaacctatatccgtaaagcctcgtagatacattcctcagaatagtgagagagtcttggatgcacctggaattgcggatgacttctaccttaacttgttggattggggcagttctaatgtcttagccattgctttgggagacactgtttacttgtgggatgcgtctagtggttctacatataagcttgtgaccattgatgaagaggagggacctgtcacaagtattaactggacgcaagatggtcttgatctggcaattggtcttgacaacagtgaagtccagctttgggattgtgtttccaatcgtcaagtgagaacactgagaggtggtcacgagtcaagagtaggatcattggcatggaacaatcacattctaacaactggaggaatggatggaaagatcgtcaacaatgatgtgaggatcagatcatctattgttggaacttacttgggtcacacagaagaggtttgtggtcttaagtggtcagaatctggaaaaaaaactagcaagtggtggtaacgacaatgtagtacacatttgggatcatcgttctgtcgcttcctcaaacccaactaggcaatggctgcataggtttgaggaacatacagctgcagtgagagctcttgcttggtgccctttccaagcgagtttgcttgcaactggtggtggtgtaggtgatgggaagattaagttctggaatacacacactggggcttgcttgaattcagtagaaactggctctcaagtttgttcattgttatggagcaaaagtgaaagagagttgcttagctcacatgggtttacacagaaccagcttacactttggaagtacccatctatggtgaaaatggctgaactcaatggtcatacatcaagagttcttttta

SEQ ID NO: 17401 - DNA, 1403 bp, Arabidopsis thaliana landsberg
gtaactaattttatttttttttgctaataatatatatattttattgaaaaatgaaaaaggtttaagacatacaattaagtaaatcctacaattttggtcccatggcaaaaaaaaggataaaaacatggtaactaaattttttgaaagagattggacgttataatgtaacggaccttgaagaggagatgcttccaagagagtatcgacgccggaatacttgcatgacttgcaataaaccatgccttcaactgccacaagtctcctgctcatcttagccggcgatgacggtggagtcattggagaagcggatgaaactgcattggtgtagatgaaagtcaaggaaatagaaaggagtaagagatatttgagagcttttgttaccagacccatttttgttctttgttagtgaaaaagatagacaaatgagattgtctcattaaaggccatatttaaagcactagccaaagccgaggcatagttctcaccaaaaaaaaataagtgataaataataatatccgtttctcacataattataagaaaatagatttatgctcctttttagtttttaaaagagtttaattagtttgttttgtttgtgtattattctgtggaaatattatatatatatatatatatatatatatatatatatatatatatatatatatatctaactctacaataacatcaaggcatcaatatcacatgatatatgtattataacttatgttccctcttaacgaaagaataccattaatatatgatatatcataattattattttcttaaaacatcatttaaaatggaacggaagagtagtttagatattatagtttcgacttctgatttttgttatgatattttgtatagataaacaaactattcaagtcattcattaaaataaaataaaaaacaactcaataacatactattgcttaataatgctccttcatatatagtaatactattgtcaatggattgtgcaagccaaagacatgaccttaaagttttcttatggtgatagagccatggagggaagaggctataaattaattaaagtagttggtgcttcaagttgtgttaatgatatagtccccatcatgacaagttgtgttacttattcaacaaaaaaatataatatttttaatttttaattttcttagataagattacctagtgacaaaatgttaaatttaacaatgtaaagttactatgtaaatgcatgggcaccagtaatcacgtatcttgatgaaatatatccctaatccaagcgagtcggcatttattggtgaagaatctcaagtctcatagtcatcgctagttaacaaatctttttggacaaaatagccttcgttaaaaagtcgcattactaaaccttttgcacttttaaaatcagaaaattt

SEQ ID NO: 17402 - DNA, 1164 bp, Arabidopsis thaliana landsberg
tacgctatgattcagacagcatgatcacatagatgtgtatatataacgggcaagtaaataagtctcagctagtccattgtattgtatgtgttggcatgcaaaattatgattatgtttcaaagaagatttattttagcacgttaaacaattctagacgcaagcgtgaaacattaataaaagacgagaatttgtttccgtttgacgtttaagtgtacactgaaaatattttttagtaattgcgaatattctatcttttataggcgtaaacttgttttttttttctacgtgttaatgcggacataaacgcaaaattagcgtttgcagtaattgcatcctaaataacatagagtttgtgtggttaattgaattgtatagggacatggatgaccgggagtgcacacataataacggccgtgatagggtcgggagtgttgtctttggcgtgggcaatcgcacaacttggatgggtggcaggacccgccgtactaatggctttttctttcataacatattttacatcaaccatgcttgccgattgttaccgttcccctgaccctgttaccggcaaacgcaactacacctacatggaagttgtccgatcctatctaggtcagattcgctatctatcttcttcttcttttttgttggtcaatcactctgaagaacctttatgacaagtagtattaagtttcatgaacttctagtttaaactcgctctaaaaatactaaaagattacatttcaatatatattcctgtgttatatatacacatgctgttttgtagtaaatattatgtgaagttggtcttaaaattgacatgatgtaaatatcacgtcagtttttataaccgattcaaattaaacatcagttataacaagcgatgcaaatattatgtgaagttgcatcagttgttaataaatcgatgtaaattatttgcatcaacaagatacgaatcgtttatttaagtgatgtaaaatttctttacatcaattataagtaatacaaatattcaatataagtgatttaaaatgatattttttttgtagtgatcccatgtgaagttataattcattctttcagcatcatagtctcttggagttttctctttgtcctcaccacacttattattctcttcccttttaactatcaaaagataccctccct

SEQ ID NO: 17403 - DNA, 2299 bp, Arabidopsis thaliana landsberg
  unsure (1)..(2299): unsure at all n locations
ctccgcaagtccgatacctgggccttcctataatcagcagaagtatgtcatgatctgactatcttccacttcttgaaaatataaaagctcggatctcttcttagactgcacggttcttatcaattcgcatgtcgccttcagttgattaaatttataaccacgggcatcacaattttatggctatcgatcttccgattgccttgtcaatgaattaaagaacttgagattctcatgtttgcttttctttggtcttgtccggatcttaaccagaaaaaaaagcaaagattgcttggagtgacatttgtaaaccaaaccaagaggaaggtttgggattacatttgctatctgaaacaaatactataagtatcttgaagctaatatggagaccggtctcggaaaatgactcattatgggttttatggagacacaaaaacctgcttcggaacggttctctcttgtcagtttgtggtaacacttactctggttccttgatgtggaaacaaatcttaaaatactgagacttagctcgaccacagcacaaaatggaggtaaagtctagaagggaaacttatttttggcatgtctccttgtgccctctggggaatctatatgcactcttaggctcacgaggaagtattgacatgggagtagttgttggttattttgttgctgatgtccttgtgttgcggtatgtttttcaactcacaattcatagcttattgtgagagcgcaatgaacggcgtcatggaaaggcaccaactcctgcccccatacatgctcataaaattcattgatatgtccgaaatagactaagcgcaaatgacgggttcctctgactatgatggtacggtggcctacgtttctggtttcaaactcgcactcaataatctctccttagtgtaacactttcaatttttcgaaactgtgaaacattcatatttcatgtctcattcatagtaacactatcttcttttatcaataaattttacattctacaaaaaaaaagtaataaaaaaaatcttctcatattttcatatattttaaagtcaagttttcagatgcataactatacacaactttggatcgttatttacgaagtatttttacattactacagcaatatatttgcgtcagaccttccaaatttatggaaattacatgacgtaaagtatttgtttcttaagaagccgatttaaattgatatatatatatatatatatatatatatatatatatatatatatatatatatatattttagatgatgattacaacaaattaagtcacttttttctttctctaatgttattttcttcttgtgtcaacagaacctcagcttcactagagttgacaacttgaacgagaacctcataaatattattgtttgtaaaagtgaaagtattattcttttggagatccacagctaggaaaactgaccatatttgttttgaaatacaagtgggattacattacattcttcatttttttttgtcacagccatctcctatacggcttttatcatttgtagttcggaagaagaaacgagaatgagatatcatagttgagtaatctgttttgctgaacaagataataagtttgacaatgtgacaattcttttgttattgattgaagtatagcaaaacatacataaaagctttgaatctttgagaatgaaggatggccaagcagttgatgccataagaagttgtcagattacacaatattacaacaataacagagaaaataacactagggctatgaggttatctctaaaaaagtagatcttttgatgcagtttggtagtcccaagcatggagctctggatatattatatatatgggttataacttataaagatacaaggatggaagtttactgataaagcatttccggggagaaaaaagctaacatttgttagattcaaattaacaaggaagagaaatgtgaaaaaaaaaagtttatatcatgtataactaaaatatatagtagacatgttgcaccaaaatccaagttgtgttttggtttatatttatcagtgtgcaacagttaacgtgtagctttcnnnnnnnnnnnnnnnnnnnnnnnnnnnnnnnnnnnnnnnnnnnnnnnnnnnnnnnntcaatgaaagcaattagtaaaatattnttgctcgtaatgggcttatatagtttatatgggcgcatttttttttttgaggccctttcttattgttagactccggttaacctttgctgatcttactcgcagaggtccttaaacaagatatgctacaactgtccaaagaacaccattacaatga

SEQ ID NO: 17404 - DNA, 804 bp, Arabidopsis thaliana landsberg
tctagtaacgtgccgccagtgtgctctaaaggttgctggagctaaaatagtgaagtgttcaatgtattgcatagagtgatggggtacaatatatagactcaaccctaaccctagtgggccggcagcccaacattggtgccggcccacacacactcacgcacacacagtctaacatccccccgcagtcgcagcgggggcaccacacacgatgagactggagtagaggccaaaggtaggagccgacgggtggaaatccccccgcagtcgcagcgtcgtgatggtgtgcatgttgcagctggagtagagaccggtgcgtgctccaagaagacgatagccctagatgccgaggtagccgaagtcgaggtggtcgcggtcaggagacacgtagcagaagcctgatcttcgggaggggtcgacgttcgagcgtcaacgatcggcagggcgacacaacaaaaggacaccggcaggccgaccttcgtgcttcttcgatcgtccagacgtcaaggagccccgccaggatggccgacggcaacgcacgcgtctgcgccgatcatggtgttcgcgcccgcggcagaatagaagggaaaacgacagatccggccgggaaggcactgacagcgacggatccagccgggaagacgcgatccagccaaagggacgacggatcgagccggaaaggttgcagcaagccgcggcaacgacggatccaacgaaggcgatgaaggggtgggcgacagggctggtccaccgggcaggggcctcgccggaccaggcaagggatgatgacggcgccgacgacgggag

SEQ ID NO: 17405 - DNA, 974 bp, Arabidopsis thaliana landsberg
ggagtatctttagtttaaaaagctcaattgtttgaatctgtgatttttttttgcattttgctcatctctgattacaagaaatttcttcttcaattttggagttcaatggagagatgtcgaaatatgaagaagtggataatgaagtttgaacttctttctacttctctttcaaatctctccatctctttctcttcctctttttcttcttctttggtttcttcgtttcagtttttttttctttttttttaaaactgaaccatagaaactaaaccgaaaccaactgttgtggggtttggttgatcctattaagggtattttggtctaaaaaccattcaaaagacaaatggtgaaaaccacatctcactttgccaaaccatgagagcaattcttttttcattcacttatgtgaaaatttcttttctttttttttaggaagttacagtagttggttaccaatttttagaaatcttttcaaaatctaaaatttgaatactagctagctagcacaaaagctagtaagaaacagagtatgtaatgcaaggggaaattatcttgggatgttccgctaccgctacatcaaaaccgccgggatcatattaggggaggcaatgtaacgatgtgattcgagagctaatatatttttgacttttgtagttctttttttctgcttgaactaaaaacaaaaaaaacttctctattaactatttgtgaagatacaactatcaaattgtatattcaacattatttcaattgttgttaatattttaggttctttttgtgaattcttgttttgtttaatgaaaagattataataaaaagtgtgtggctagcttaattgagttaatgttcttatactatacgacgagagaatactctcatgatgactgtgtgttttcaataaaatatttcgctgaattaaataacggattcaatttttcatttttttgttattgtagatgtcccttgggtgaaga

SEQ ID NO: 17406 - DNA, 1440 bp, Arabidopsis thaliana landsberg
aatatccagaagagcacttggatgatgattgtgatgttattgcccctaatgttttgttgggcctatcgcaagaaactgtggctgacagcagcaggttacctccaaaaggaaagaagaagacatctcccagaaaagtcacagtgttgcggtcaagcaaccggattagggacagtcccgtcatgtccaacagaagagagagtcggcctaccattccggtacagcagcggcaaacagctgttagagggtcgactaaagttcatgttgttaggcctggaaaatgggagaagatacctccaaatccaccaccatcttttattggtccgtttgacccgtttgttgttccaagtccagagagagtgaaatgttttcttaaaaaaatggaacggagagtgtaattacaggccctatatattcagaataacttatttgttatcgcaactaacttgctggtatatggtaccatgtagatcttatgctctggttgatggcgttgtaatggagaatactgaatttctaactatttacgaggcacaaacactactagatgaatcagtaagttatacatgcaatctgtgttgtttcaaataaaactgtgtgctcactgcttctttagtaggcctaccaatattaatggtgtgtgctaataaaaaaactgacttccacaaggaccagatctgttagtgaggttcatccagatgcagctggataaaaagaagctgttgcgttttgattttctactgtcacgtttcttgtcatagctacgacgccagtacaacaaattttgtgcagcttcagataagagtgctttttacttccccacgcttacaagagtcccattcatggtgcagccgaaatggtttgatgaggttgatgtcatctactgccgaatgcaggtcgagaggcagcatagggttgggcttgtcatcaatttgaagaaatgggaagtcattgtattagactgcaagagggaagtattgaacgacgagcatgtggcgaagtacatagaacacataataatcatgctcctgtaccttattcgaaagcatggtgtaaacgggagaatgctaacacagaggctcgatcctatgacaatgagtagacccaacttacagttcaatgtttcgtcattaggtatgtttgtcttccatgattgagttttgctaagtgtttcatatttgactatatgacatatatatttcacgtgtgtttttcaggccttgttggaattatgtgtgtgatcttacttgagctacattcagttaacgccatggactattgtgctaaactagacgaagagaagatgcgaggggcagctaaacagtacgttatcaaaatgttcaatgccttgtctccagaaacacgtactgcttgagtcttacaagtgcaaaagctggcaaccaaacccgaaggttcttatgtaatctgtgactctttgttttt

SEQ ID NO: 17407 - DNA, 633 bp, Arabidopsis thaliana landsberg
ttttcttaataaaaaaggtgaaccgattcattaaattcttatgatcgattgcagcgatatatatctccatcacgacatggatttgatgccacggaacaaagcagcgtggagtgcgtggaatttcttgggaagtacggaaaagaaagtatgtgtaacatactgtctcaatatacttcaggtatacaaaacaatctacatgcttttaaatacgggtttcgcaagaaagcaatgactttaagctaaatcttgatgatatctactggtgtagaaccttggcgatggtgaaccattctttgtaacacttaacccagacgagaccccaaagaaaacgttgctcaagtggaccactggtcaccctgtaccttcagttgcagcttggacagcttcacaagagcttcataagattcagggcaaacgtaatatatggttctgtggtgcatatcagggtaaatcctagattttaataacctaaaacaaatcacttccctcttgtccttgtctaatcttcagctaaatttttctttcaggctatggtttccatgaagacgggctaaaggcaatgatcaaattctatatataatcaaagcctctctgtatgacacattgcattttgtaataactcacaattaattt

SEQ ID NO: 17408 - DNA, 1677 bp, Arabidopsis thaliana landsberg
  unsure (1)..(1677): unsure at all n locations
tcaaaaccataggtccgtttatcttttgtcttgctgaacttcgggtaatgtttacataataagtaaacaaaagtggcatcaaggaatgccaccatgtgtttacgatccaatgccaccatgtgtttacgatccaatgtatttctggtctcccacgcaatccttatgttgtttatgaacatgtccataacctgaatgagaggaaatacaagtttgatgcaattgtgggatacactggtaatagaaatgatttgtattactnnnnnnnnnnnnnnnnnnnnnnacatagaactgtttttagatccacaatatcttcaacctcagcggaggtgagtgtgagttccctccccaaatttatatcccttcaaaaacatggacagtttatcaagcacgatattaatgaaagagttggtaagctgtacaagggttacccaaataattaccctttcatgctgaaaatcttgcttattttagccagctgcccgacatcatatctgatgtgatcatggaaagtacaaaagacttggaatttgatcaagagcttctagccgaggaagagcttgaagcagaggggcagcttgaacctgaggagcattttgaaccagaaaacgagtttctagttgagaaagagtataggaaagatgttatcttaacctcgttggttttgatacatgatcatcaaatgggcatgtgtctcatttatactcttttttccttgtcaagttttgtcccaatggtttttcttgacaaggtttttaatgaggcaaatgattcacattcaaatcacctatttgatgatccaaaccatggtataacattcacaagttggcccaatggaatatatatgaagtccagcctattttatgaccatcacaagcccaagaagagcccaaaccaagtgggtaatttgctggtcaagagaagtgacgaaaatagcatttcaagagtcattttggagccaagaagtggaagggttatttttaaactttcaaactagtctttatttctttttattttccaaggtagtcttgtgagtgtgttctaagacttccttcttctttataaactccttgtaatctcttatgagaactcatctatctttttatcaaaaactctctcttaaaaatagatcatggatccattttcgtatgtcaaattttgatctttctcgacttatcaaaaggcttttccgcatccttttgtggcgtcattcaatccatcatctcgtctttgagtcgtgtgtcgtctctattttgagaatatccactccagatctttcaagtgccgaaattgggattgattcatcaccatgatcatatcaatatccccatgtaactgtcctgctgctttgttgcgttggctttttctattacatgtgggatggaagaacttaattaataactattacatgaaaactagatgaaatgtcacaattggtaatcaactgagaatattannnnnnnnnnnnnnnnnnnnnnctggaaattggtcagcattttaacctcctgaatagcataatgatagagttcagtaagaaattcctctcatttagtgaagtgcactctatttactcacgtgacaaacttttatcatgtaacacattgaactaagatctatatagcatgtaaatgttaatatacatgctactttattaaatgcatgtatattagaattagtcct

SEQ ID NO: 17409 - DNA, 2034 bp, Arabidopsis thaliana landsberg
agaactagtccaatatacagtactcttttcggttagaagttttgaaaaggcaagatgaggttttgatttatgaagtagtccaatatatatgcacctactttgtgaagttttcatgtttagtctttaggttgcatgtaaatatgtattgtttgttgagtgcctaataaatgatatatactcagtgaacaagttgtagaagctcacgactgcgaaattacaatttatacctgaacaacactatagatggagaagttgtgtgttgttctttaacaaatacatatatatggtggtgtgtagaataatgggatgcaagttatcaacatttgcctattttatttctaactacacaattatataaactttaagaattttttatgataatcttatagctttcattactgactccgtccaaaactaatatattttattactatggttcattttatttttgaaaaaaaactagtgaatgaatgaattaaatgtaagtgaaagagataaaaaaacaaatgagtgaaatataagtgaaagagatataaaaaaatataagaataattttgtattgctcattcttcagcataaaaagagcgagatatttttctttaaaatttgcctatttttagtagtatattaaacataaatagatattagcaaaatatagataattgctttattttacatcttatctttctaaatgggcaactatatacttgtcatatatatatttttaaaatcatcataaattttttatttttcactagtattatatttgtcgatcaacttgggaaatgaggaagataatactttttgcaaacaagttttctgactttccatttaaaggtcagattcaatgtgaaaagcaactagctataataccatttaaccaatgatgtgtcaccacgtgtcaatattggcgtggcatagccagtcccatgtgccacgtgacgtggcagatcccatcgacgttggaatctattttgcttctccgaaagcaaatattcgcacatttaatgtacatctacacttaataaaagcttatttaaattaaaaatcaccccaaaaaatttaatatatttacagtttcagtcccttaagtaatagacatcaaaacgtgcgattttacaaaacggaaaaacgataaggacttactttagagaaagagagacagataaggacttaaatgcaatatcttatcagatcgtgttgccgtcactttcctggaaagatacaagccattatactctaaaagaatataaacaaaaacaaatatattattcaacattggaatatatatactgtatgtaaaggcttccttagggaagtagaagaagagaagtatcgggagagagagaggcgtgcgatttccgcatcgaagaaacagtacggagttttatccgctccgattctggtgagtttttttttcgatttcgttgtccgtgttcttcgctttctcggaatttgtgtgtttttggattcttcgtatattatatgttgctttgacactgatctctgatttgatttatgcggctactcgatttttgaaatctgatcgttgttttattcgaagattcgtcgtttgttttcaatctctgttttctcatagtgtaacttgaagctgacaattagatttgaatgattttgatctctttgacagtggaagataatggggaaaggaggtgaagattgcgggaataaggaaactaatagttctgaattggtcaagtctgatacttttcctgcttggggtaaagatgtgtcggaatgcgaagagaagtttggtgttagtcgtgagaaaggtttgagcactgatgaggtgttgaaacggcatcagatctatggtttgaatgaattagagaagcctgagggtacttctatttttaagctgattttggaacagtttaatgatacattggttcgtattcttttggcggctgctgttatttcctttgtcttagccttctttgatggcgacgaaggtggtgagatgggtatcaccgcatttgttgagccgcttgttatttttctcatcttgattgt

SEQ ID NO: 17410 - DNA, 1280 bp, Arabidopsis thaliana landsberg
tttgatgcatcatatgttttaactaacaaatccggcaaggtagttgccaagtatgtatgggggcaaacacaagggatcaaagacttgtgtttgggcacccaaagttcttgtgtctaatgccaaaggacccaaaaccatttgggtacctaaagtcaagaactaaaattgttttgtaggtttatgcatccgggggctcaagttgggtaatcgacagcgggtgcacaaaccacatgacaggggagaagaagatgttctcctcctacgagaaaaaccatgatccccaacgagctatcacattcggggatggaaatcaaggtttggtcaaaggattgggtaaaattgctatatctcctgatcattccatttccaatgtttttcttgtagactctttagattacaatttgctttccgtttctcaattatgcaaaatgggctacaactgtctatttacttatgtaggtgtcactgtctttagaagaagtgatgattcaatagcatttaagggagtgttagagggtcagctatacttagtaaactttgatagagctgaactcgacacttgcttaattgctaagactagcatgggctggctgtgcatcgccgtctagcacatgttgggatgaagaactttcataaacttctaaaggcagaacatgtgttaggtctaaccaatgtatttttcgaaaaagatagaccttgtgtagcttgtcaagcaggtaaacaagtgggaagcactcatcacaacaagaatgtgatgacaacatcaagaccactggagctactacatatggacctcttcggacccgtcgcctacctaagcatcgggggaagtaagtatggtcttgttattgttgatgatttttcccgcttcacttgggtattctttttgcaggataaatcagaaacccaagggacccttaagcgctttcaaaggcgggctcaaaacgaatttgagctcaaggtgaagaagataagaagcgacaacgggtccgaattcaagaatctgcaagtggaagagtaccttgaggaggaaggattcaagcatgagttctctgctccctacacaccacagcaaaacggtgtggtagagaggaagaacaggacgcttatagacatggcaaggacgatgcttggagaattcaagacacccgagcggttttggtcggaagctgtgaacacagcttgccacgcctttaaccgggtcaaccttcatcgcctcctcaagaagacctcgtatgaacttctaactggtaacaaacccaacgtatcatactttcgtg

SEQ ID NO: 17411 - DNA, 1232 bp, Arabidopsis thaliana landsberg
gaattgtaccttgcaagcaagttaggagtaaaagctttatctggcctagtacaattagcaagattcatttttccaccgatagcactcatataaggtacttggggacctataaaatctccgttattttcacaaggtctaaatggatcatttttaacatttaaagatctattgaccattggagtacttaaaggatttgctttatccatattaaagcgctttaaaatcttttttgtataattggattgatgcacaaatataccatcttgaaaatgctcaatttggagaccgagacaaaattttgtcttttccaagatctttcatttcaaactcttctttcatatgagttcgtgcatcatcaatctcctttggagttccaattatatttaggtcatcaacataaacaacaatgatcacaaatcccgaaggggatttcttaatgaagacgcaagggcagatttcattatttacataccctttcttaagtagataatcgctttaacgattataccacatgcgttcggattgtttcaatctgtaaagtgatcgctgtaatttgaccgcatatatatctttagactttgatgagtctaatgccttgggaacttttaatccatccgggattttcatatataaatcattatcaagagatccatagaaataagctgtcactacatccataaggtacatatctaaattattagatgccgaaagactcattaagtacctgaatgtaattgcatccatgaccggagaatatgtttcttcataatcaactcctggtctttgagagaaaccttgtgcaacaagtcgggctttatatcgtgtgatctcattttgctcatttctttttcgcacaaatacccacttgtgtccaacaggtccaaagacattttttttattaaggaagtgcaacttaacttgcatggcatttttccatttctcccaatccgaccttttctggcactcggataatgtcattggatccggatcatcattctcatgatcgatctctttagataaagaaaagaagaatattccattttcatcatcaatatcatctctatcccatatgattccatcatgggcatagttaatgaaaatctcatacttttctctatcgtcccgaggacttagttcttcttgaagaaccttttcattttcttctcccctttttttttctttcggggatttttatacttttgatgcccacaagcctcccccactttaaattt

SEQ ID NO: 17412 - DNA, 2864 bp, Arabidopsis thaliana landsberg
  unsure (1)..(2864): unsure at all n locations
aaattgcttacaagtcattccatttagccaaaagaacctttaagtttaggatctcacttttacatacaaagatccaaccatcctatatagataattaaacaacatcctacataaataagcattcttaaaagacataatcttaaatcctagttcttgtcaggctgcaaaaacatcaaacactttgttagtccatggagacatcatgaaaacagtctgcttgggtgcttcctctttgcctttgccacgacccttgccacgagctttagaaggatctttgccttcaccatttttggttcctagaggacgccttcgagcacgtcatcttcccttttgattagctgctggagcacttgaatgttgcagaatttgagtggactgactttgagaacaagttggtgtggactgactttgagcttgctgccacctccttggtgcattgtgtatgctccatggatcatcattatcctatgacaagtcaacaacgcaaatcaaacatagctaagagtagacaaattatagggaaaattcttgagtaattaccttactcttccttggtctccctcttttgcgtggaggagctgactgtactgtggcatttttgcaggatcctttactatgtcctgattacttgcagttagtacaagtcacagtacctccttctcttgattcctttgtcagataagtcgttgattcacctggttcaagtatcctagcaaagttcttaggacgccctcttcttccttttatcaggcacttgaattgttccttttcctgtcttcttccacaacatttttccattcaatggttttatgtttttcttgtagttggattgccagacagttgtcagaaagcggctatcaacatagctgcatagaagaacaaagtatatcagcaagcatatttacaactcaatgagagtcgagttgattaaaacttatgcttggatctcggttatgttcattgatgacaaagattgcatgtggacaaggtattcatgtgagattccatttgttgcaagcacaagtcatgtggaggatgttaactctgaagcttccaataccttccaacacctcataaacgtgctcactacttttgaggacataaccgaatttggctgacttgtagtttgcttctagtatctccattatatgaggtggaaactttgtcttgcatgtagcagtcttatcccgtctcttggaaagacgctttattgcttgtcttcttacatcttcaagcatatttatcacaggtttcttcctcgcttctctgattgttctgttgaaactctcacataagttgttgctaacatcctcacaacttgagcttgaggaagcatgtctttaactccattgagcaatcctttttgcttatctgaaatcactgtcaaatctccacctaaagctaaacccaaacccttcttgaatctatgactcattatcctccactctaactacagcccaagctacaaggtagattctattatctgcatccctccccacagctgctagaatctcacccttcaattcccatttcaaaaatgaacccatctaggccaaaagcaatttttccaagttgttcttaacgcatcaaaacagatataaaacttgtcaaattgctgcttactatcagctttgggaatggtcatgatgtctatgtggatacgctcattagatatgtgcagttcagcctcataattgtatagctttgcaaattgttgtttctgcgtttctatcaccaaatttaaagccatcctgcttgctttctggcatatccacttagagacagagattgtgtacctcatcattatctcatcttcgatgtcagtccaccacaaagaagggcgccttcttgcttcttctctgaacatccgagcaataaccctatagtgacccgcataagggcatcgggtacggcaaaggaccgaatgagaaaaagttgctcgaatgcatggccaatgcaccgcatgtgcccaaaaaatgctaaactgtcaaagggcaaacatggacaagaatgggcacgaatgggcaaagatgggaaaagtttggcgtaccgcgggcgaagtttgccacgttggccgtggaaccgacgtgtggacacctcacttgcggtgacatgcgaatcaagtcaccaaccttggagtcgaattcggctgagtcttggagccgaagctgatggggcaatggaatgacacccgtagacacctgtcgccacgccatcgcccgagacaccagtcgcatgtgggtgcggcaactgtctagacatgtggcagcgggcggtgctacatggccgaccttgggtggactataaaatgatgctattctcagtccattttcatttttgaaggcgagagagactgtaaggctgtctgaccgataactcgtccgaaaccaagaaaacttgcccgaattcagtaaatcttgcccgtggtctaggaaagtctgatcgtaagtgcgaaataatcgcatgtggtcgagagaactcatcctagtgagaagtcgtcgaccgtgattaagagattctgcccgcgactaanaaacttaccgaatctgtgagttgtggtcgaattgtttgtttgtttgcatgttttctagagcttgtctttagatcatatgcatgcttactcacttagacttaaataatcggaatttggattaagttagaacttgaatcgtaaagtgaatatgggcatttgacgaacttgatatcactaaggaatggaatggactggtgcatgattaggctaagtgaattcgaacttgactaagtttacttgatgaattgagatatgattcgagggcttacttgccttgttagattgttaaacttatgtgagatatgctatgaggttgtgaataagtcttagc

SEQ ID NO: 17413 - DNA, 1077 bp, Arabidopsis thaliana landsberg
  unsure (1)..(1077): unsure at all n locations
gttgtatataaagctcaagaggatacaattggaaagttaactcataagatagaagagttaaatagcaccattctagaacttcaaggaatggttaaaggctacccagtattgaaattgaggattggtcagaggagcctggttcaggagaagaagactactctgctgatcaaaaagaggcttattttgaagaaaaatcgaatgagtattcagccaaccatatgtcaagagaggatgcagagtatgattcaagcagtgaagattcaacaactgaagatgaggacttctatgttaatctcttcaaccttttttctgactaagctttgtaagagtcaagcttagtgacttaaaacaagctcacttcggaggaagtctcatgtctatccatgtgtataactatctattttccttgttatttttgatgtttttgtttaaagtgtttcacgtttatttcattgaccattatgggctcaacggtcgagtaaattcaaaccaagtcaagataactctcaaccgttgatcgagtagaatgaggaggagtgttttgagctgttgatttgaatgaccatatgagaggagcatcaccaccgtttgatcgagtgacttcttgagattcattttggtctgtttggtcgagtgaaaaaaaaaatagaccctcttcgtagagaccgacgcctcgtgacccgcctccattgaaacactactgtccctttgtcttcttgtccccccccaatcactttggtccccccattgcaattcccaaactcaagaacctcatctctccacctcaactcaacaaactcaacctggacacaatgtgccctaggaagcctatgctcctttgccaaaaactgcacttgctcaacttggcgtagagcttctgctctcttagccttgttagcactgcccttaggtgttcctcgtgggtttcccgatccttggaataaacaagtatgnnnnnnnnnnnnnnnnnnatgaactcgtccaaccactcaaagaatatcccattcatcattttcatgaacgcggcgggtgcgttggttaacccgaaagcttcaccacgaatncgaaatgaccgta

SEQ ID NO: 17414 - DNA, 2085 bp, Arabidopsis thaliana landsberg
gaaaaacaatgtcctctgttttcgtttctatattttctgtttttcgttactcttcacttctccttttggggatggttaaacatcaccacttgtacgagttgtctccgatggttactggttggacgatttgtgtcatggttttgaggatttacaaaaaatttctcaacccgaacgctttcgaactacgtcttgttttggccgatgaatgggtaaacaattttcctcaatttgttttgcaatttgcagaatttttcgttttccagtgtatccctcacccctaaaatgttgttttcacagggcacccaaatagaagcaacaatcggtcctcgtttctctgccttctactttgacaggatcaaagagaatcaatggaaaacaataactacgtttctcgttcgacctaactgcgaagcaataaaaacaactcctcatcagtttcgcattctattcatggatcacaccattgtcacttcttccacaccaagagaaacaggtttactgaacaagttcactccatttgactacattgtggatgatgttgttggcaacgataccttggttggtaagtaaattcttttttataaactccattcacttttttcaaaacattacttttttaatagatatctccaacatatctcttatagatgttatcggggcactcgttaatgttgggattctgactaataccgcaagtaacgagaatgatatggccggattcaaattgccgttcacgatcatggataaaaagtacatttcttaaaacctcaatttacagtttttttcaaacatatcatgtttatacattattatagtaagtatataaccacatatttttacatattttcagcaaggatacattggtatgtgaggcttatggagaaattgcagtggacttggagaaaagatttcgagcatttcgcaagaacaatgttgttattgctcttgcttggtggaagattattagattttatccaggttgtaactggtttaagattgttagccatgcacctatattaaccatgtatccagaacctgatgttgaggaagttgaagaaatcaaaatggttgtcgactaatagaagatgattagaactatctcatcttcttttattttttttcaaagttgtaatatttttataaatgataagatatattaataaaaaaagttattcctttgttcaaatttctcatttgtaataattgtaacaaatattttattaagtagtacaataggaatacggtgtataaattaagtgcaccttactaaggaacggttatatcaagattacaatctttttatcagaaattagcaaattgcttgagttttaaaaggaataaaattggtgatctgaaaatattgtttcccaacatatctaatttctcaacatatatttgtttacatgactgatagggtggattgttgaaacttttagttgaaatccataagaaattactatcgtggattgttgtttatggataggttaataaattactttcctgtcttttataccctaattataaacgatgtattctcttacttttttccgcatctgattttagttccctcctcaacattgagaaactaatttatagcgggacaatttaccacctattataaattgtttaatataaccgcagaaaaacttaaactactctttccttaataatctatataaacacccaacattcattaatgtttttcccattacccatttcttcagttaaaaccaaataacagagaaattatgcagaagtttacgaagataagcaacaatgaaacatcatctgcctcagatgttaaaatggttgttcgtccaaacctaaagtacttagtattctacagttttaactacaactttaataaaaatactaacaatctctttcgttattttcaacaggttgctgctatcccagaagtttacttgctggccccgatgcttgctaaaattgttagctacgttgcagaatctggtgttgattctttgaaatcctttgttaaggctggtctgttatttaaagcggcagtctattccaaggaaacactaagttgtgtccgccttgacagatctcggtattttatgt

SEQ ID NO: 17415 - DNA, 1708 bp, Arabidopsis thaliana landsberg
  unsure (1)..(1708): unsure at all n locations
catgttttgggagtctccaacttcgttatttcgaggtaaaaaagtgcctactgctttattccatgctaaagctcttcattaatataaggtacgtttactagaatattcgagattccaaatcccagctcacttgagcacatgatttgattttgaactccccacagactcggtttcctccttttccttgagccaactttattctcttaacgtaagtataacgcacataattctttgctcattcagattactggataaatgatcccattgtttttatgttaatagtgtgtaacctgacttgtatatagctattgtacattgtgggcctttttagattgattcggcctgttaaaggccctgttgctgtcatcgaacacgttctactcttgtcgtgttcgaacttgtatctttattatttaaggcttcgcttgtgcctcaagaaaagaagaaatcacaaattgaagaaaagtttgagaaagaaattacgttactgtaattgcaaatgaagccacgacgtggattataattgaaaaaggaaaaaaaaaacaatcttattcactgaggaaatttacaattatgctttagttaaattagcagttttattggtctctccttttacggtttaagtcagaaatttttaggttaagctttagctataaataacagattcttctagttcaataacaattattgttcaagcaaaacttttcattttatcttctgaacacaatttagagttcttagtttcttaccaaaagtcccaacatctttgcttctagctcaggcgttcgtcaatcaaatctataagaaaagttgagaagcaatggatccacttcttgtataagaacttctattccatggagaaattaaccgggctcaaagtatgagctctatctggtatgatgtgatagttcttatggtaaaatataccgttttcaggcttttgatagcaaagtttatttcaataaacttaaagtaacataaacacaagtaggggatgtgatagcaacaaaacaattatggtatcagattcttagtcttgtggtaaccccaaaaatatgaacaagttgggacagtaaaggaatggatctttgcgttgtggatcttgttctttgttaatcttatccgaatcttactcttttgagctgaagcctaagttgccatggaataaagtcacatgtttctttcttcaacgccacgactctcttttttgccaaatgaatcatcttcttgcactatataacttttgggatcaatgggtctcttaaaaacctcctcttaagaaaagattggtgatcgcaaatcagacatgtcaaacgtgagttttcttgagttgcagtacaagctctccaagaacaagatgttgaggaagccttcaaggatgttctctagagatagacaatcctcagggctatcttcacctggaccaggaggcttctctcagccttctgtgaatgagatgagacgtgttttcagcaggtttgatttggataaagacgggaaaatctctcagactgagtacaaggtggtgctgagagcgctaggacaagagcgggcgatcgaggatgtgcctaagatctttaaggctgtggatctggacggtgatgggtttattgattttaggnnnnnnnnnnnnnnnnnnnnnagaagtggtgggattaggtcttcggatattcgaacatctttctggacttttgatttgaacggcgat

SEQ ID NO: 17416 - DNA, 1226 bp, Arabidopsis thaliana landsberg
ttgtaagttcccaagtagagtagccaaggtacttgaattatttccagtaattgccatatcatccacatatagcaataacatgatgatgtctttaccttttatgtagacaaaaagagaaggatctgacatgctgcagaagaatccaaactccaaaagataagtgctgaacttatcaaaccaagctcttggtgactgttttaagccatagagtgatttatgcaaatgacatacataatctggttttatagggtctacgaatcctgcaggctgagacatgtacacagtttctgagagatctccatgcaagaatgcgttcttgacatccatttgtttaatttcccagcccataatggttgcaacatgaaggacagaccgtacagtagctgttctcactacggggctgtaagtttcaaggtagtctatcccttcttcttgatcaaacccttttgctactaatcttgcttatagtctgtccagtgtaccatctgcattgagctttgttctgaagacccatttgcagcctaggacatgcatatttggtgtataaggtatgagagaccaagtgccagcttcttggcagttgtcaaattctttatgcattgctttgttccatcctgcatcttttaatgcagctgtgactggtttaggttccggatatgcaactctggatgttagaagcgcatattttggattaggtttcctgattcccacttgtgatcttgtcaccatgtgatgaccttgagactgtctaacaggtaaagtagcaatctcttgttccactgtattcgcagtagatgaaacttggttaggcacactgacaggttgacttgttggtgttgttgttgtagaagtcgctgaagcctcagcattatcctgactgtgtaatgtaagaggactgttgcctataggaacagaatcaaagtctgccgtacactcagaaccctctacattacttacagtaggacatgctgaagttgttgtaatagccgaagactgatttgttgtaggaactgaagttgtagcatcaaaaaataagatggttgactgactatctgaattttctgactcttgacctgtattacgtgttgtctgatgttggaaactcttgtgccaggccaatagaagcggtgttgatatggactgaggccctggtgtgattctgtgaaatgggaagtctaactcatcaaacactacatgccggcttatgtatacacgaccagtagaca

SEQ ID NO: 17417 - DNA, 4573 bp, Arabidopsis thaliana landsberg
atcaaataccggcaaaaaaatagaatatcaattaattatttagcccatcaaaatcaagtgggtattcataatgattctggataaaatacagaattaagtaagtgattttttttggatatatatatatatatatatatttttttttggtgtgttaattcataatgattctggataaaatacagaattaagtaagtgatttgtttttggatatatatatatatatatatatatatatgattttttttttttggtgttatatatatatatatatatatatatgtaatattttctcattatttcaatttttatttttgcaaaagttatatatacatgattatctgactctcaaataaaacaaaaactagggttagctgaatattagctaccaaataacattttatcaaccggtaaacacacattagaccataacatcttgatatgtaaccgtacatagttcttgatgaattttttcgtacattactatacaaagtgatatattaattttctgaaactaaaaaaacgttatgcttaaagctgcatatattgtaaccaaagactttttaataaattttacattacaatgattcaaaaaaagaaaaaaaagtgatatattaatttctacaacacatatttggaaatttttgtaactgaatgtcatcatgtcccgattatccccagagattttgtatatgaacctctttaaaaaacaagtctcaattgtttgtttcttgcttttagttttctcaagtcttttgctattcaagagtttatcgaataagtttcttgtggatcaatatcactatctaatttctaacgattgattttgttattaatatagatgatcataagacttagcttggtctacattttttgtggttcttagggttttgtgtgatcattcttcgagtaaggtgaggacccaagagccatcttgccccttcaaatcttttgttggccgtacattcatttacacttaattaggatattcttttcttaaagcaaaaatagagtttaacaaataaaatataaaaataagataactctagtctttgatctttatcgactcttctaatgtcggattgattcaagttttatagtatgattattaatgagaacgtcactaagataatcaagtgctaatcataatcctttgcgaaggctgttttttgtaaatttaaacgagactttggaggagctagaaaggatcagtgttgaagatttgggagagatcgcgacaaggacgtgaaatggatgcgacacgtgactttcacgtgactggttccctcatcgctggaacacataatccactctttcacctattgggtcctacaatagcttcttatctttgactaaatcatttttcatgttgtaataagtaactagaagatgtgcatatacgatacgaattagagaatacatacgtcctgataaaaatagaatatatatataccgacaaattaatcattttgtattcttggaaaaattatttcttctgctcacctaacattattaaccactcaataaccgttaatatagtttgtcaattgtcattgagctgaataactagttaaatacatagtctctaaatgtgtatagtgtaaattggaccaatcaggaaaatgagatctaattattcattccttttccacagggtccttatttcttcgtcttttttttttttttttaataatcctttatcaaatgtacatgattgtaaactgcaatattttttatatattaaaaaatatataaaatatctgtaaaaaatgattccaagattccctaatatattataaaatgttaaattaaaatcacaaatctttaagtctaaatttttgaatgacgtaaatgcaattctctttgtataatataattcattaaaatatttaaaattcaatttgtaactttatttatagatgaatttttatatattgtatgatatttatatagcttttttaatttaaaatatttagcttacaaaatgtggttttaacatttttggattaaaactttgagttttagttataaattattctatcataaaattatatagcataagatttacccgtacatagcacattttcttacttagcttattttttttgaataaaatgtaaaatttattcgaaaaaacatgtttacatcaagtgcaccggaaatttaatcgttttaaagttacagacactgaaaaaataaaagagaacccggcctctttatcttgttgcaaaccagactgtcatgtgcttctcatatcttccatctccttgatcttttagggaagatatcctattcctaacatccttgtctagctttctcattagttgagtcggggagtgtgcttatcgccatgtcttctacagtttctttctctccaaattgagtagattacaatctgaaaagaatatcttagtagaaataagcgaaccttatcaagcgtgttgtccgtgagcagccttagaatcacgttcctatcggtagagaattttgcagctaggagtttagaggtgaggctcgaccaaactattttagagtaatggcagtcgaaaaacaagtggtttctagtttcttacctagttattttgcttaaaaatcagtaattactacaaatttctaataaatgaataaataggggggggggctatggatcaaagagtttaattgaattgaattggatacataattacagattttcagtcattgcaaaagattttaaatattcttttcaattctaacgattacattttcagcattttattagaattgaatagaattaaaaagtactaataatttttctaattctctgtttctaatttcagttttgctaacaactgaacctatttcttctccacagtctccacttgtaaatctctaatcatacgtttcaaaatctacaacatttcctcctttttcttcgtcttaaaaccactctcaatactgctaagtttaacagatcgcataacttctccgcttttctcgctaaatcctctctgatcattgtagatttccaaacatcttctttgtattcttctcggagttcacgtcgataacgagagctatctccgcagctaagggcgtcgatgatgattatgcacaatgacaagagtactctatggtgtaaggaaccgttttctgagaacaagtaacattaggcttgaaagtttggagagtacttgaagacaagaatcaggaacatcaacaatactaacattaggcttattaatcgtgcaaaaggggaaattagctgcttattagcctttacattagatcgagcagaccctttacattagccttatatatttccatccaaatcacaacttaaaaggtaagaatttgttttgtgcattttgcactaatatttctataaaattcttgacaaatgagttgtcatgaaaaattacaaaatattgaataacacttgaatttagtagaattaagaaattgagaaactgaataatactagaatttataaaatgcctaattcaataacactagaatcaacattctaataaattccgtcaaattcattgctccaatacccccccccccccaagtaattgaaatgggcttgaaaccatggggccggaaattttcactttgtattattttgatgaagcccaatagactttacggaaagaccttaggtttcaagtaggtttttaagttttatgaaacagagaaacatatacgtgttcgtgaaggagaagacgtgaaggtaacttggactataaagtgtatagtgttagcgaaaaggtgaagcagaataaataaagtgttatgcgttatcaagtctacctaatataactagctagggatttctactcttgttttcataatcgatctacggacatttctcggaacgtggtcaagattcatgagtcttctgttttttatgtctctgttcaatttggtttagagattagtatgcttatttcatgtggtttgtggaggctttttttgtcgtcgctgcaatttgctaatcgcatgtaaacaacgatattagcagcaatcacaaacatcagagacaaattgagcctaaacgtagagaatggatatgatctgaaaccaactatatgtttctgaatcagcaaccctataataatctttaaataacgatcaatggaaagtaaattggcatgtttttttatctaattggtacataaagtgattttcgttgttgttgtgttgatttgcaatttcggagtgtcctcgtgtatatatgtacatatagccgtcaacattttgcaggaagaaacagagaggttaggtcatcaacgttgccaaggcttgttgttgccacaccgtcgtggccatgtacaaaccaagagttgcggtgtcgtcaccgtgaaggagaagaggagtttggtagagcaaccggaggagattgtcgctgcacctgagacaccacgccaaggagaaagtgagcataataatccactaaagcgaaagaaagcgattggttgcgtgggagagaaagctgagatgtaggcgagacgtcaccactacgaatggagattaggttcaaaacgaaaatgaagaattttggagatggtgcatagcataagacaagcaaaga

SEQ ID NO: 17418 - DNA, 866 bp, Arabidopsis thaliana landsberg
  unsure (1)..(866): unsure at all n locations
aaatttctacatatatatatatataataataataataataataataataaacatatttttaaatgactgaataatattgtctcatccaaaccttaacctaagcaaaatatgtatttgcaattgaatcaaagtaatgaaaaaattcgtgtcgaaccggttcatgttacttatgtaaacaattttccacatttttggttcgtttgaaccctaaataatatctaatgataaaaaaaatgaacacgattaaaaataccttctaaaatgctcaaatcaaagaaaaaatgtgaattagaagtagttaaatatagctaagtagaaaatatagacatttagaggacacgagtttcattttcattggaaggaataatttattaaagaccgattccagttcgagaatatatatgtgtctttgttcaaaatttccatattataacttatagggaatattaggcaatgggacacttttttgagtctcaattaggcaatggagcacttagaaggaagtacacatttttttaagtttctttactactacatcctcaaccggatttttatccattatgccatcttctccaaaaaaaaattctattttaccacccctaattttggaatttcgttttcatttatttttaaatcgaaatttgagtgcaattactaaataaccttatgttttcannnnnnnnnnnnnnnnnnnnnnnnnnnccacgggttgaaccggatccaacccattctaaatgggttntccccaaaattgaaatttttaacctaagtaaaatttcaatttctcactgtcgtcgactctgctccaaacacgttccgtctccggcgattcaaaaccccaaatcataaaacctacatcgtctttt

SEQ ID NO: 17419 - DNA, 946 bp, Arabidopsis thaliana landsberg
taatgcaacagaattcaaatttcaaatccagaatcatacgctccccaaacagtgtcttgtcgctttgatgtctaaggttatacatgtaaaattacatgtgtttccgacatacccctgtagctcatgcctattctcttaattcttttttaattcatggctattttgtgtatatactcaaaaaaaaatatctttatacatttgacaaaagttgaaaaaaaaaaaaaaaagaagaagaataagaagaaaaaggagggaggaccaaattatctcaagaaaaactatataacaaaaagccaatgagaaaagtctgaaggaagagaaacgtcaacaaacgatggctatacaacaagaataaatacatcacatttttcagacaaactccaatttcacagtgaaaataaaaacaatgacaagctccgatcaatctccgtcgcacgacgtcttcgtctacggcagtttccaagaaccagccgttgttaatttaattctcgaatgtgctccggtcatggtttccgctcaactccacggctagtacgtctctctgtctcttcacttctccgatctttatcttccttaagcgtcaagaattgattcaattcgatttatttttgcagtcacttgtatagacttaaaggtcgtttgcatccatgtatttctccttccgacaatggattaatcaatggcaaggtattggtttcttctttgattttgtgttttggatcttagaatataaccttgatgtttttgttgttgtagatactaactggattaacagattctcagttagagagtttagatatgattgaaggaactgaatatgtgaggaagactgttgaagttgttttgactgtaagttactacttcaatattctctaatcacaatattatgatatctgatggttagcttaaggaatgaagcttttgattcatcaggatactttggaga

SEQ ID NO: 17420 - DNA, 851 bp, Arabidopsis thaliana landsberg
acaacaactgttatcataaaatatcaacacaaacacttatattcagaatcagattatgcatgagagaagagaagagacaagaaaaagaaaaaaaggatcgtacttggagagaagaacaacacaagcaccacatcctcctgaaccaaaacaacaacaacaatatcagacaaacaaccataaacagttagaagaaaggatttaaaaaaaaaaaaaaaaaagcaatcaccttcaccgcagctgagcttaacgctcttgaaagaagtctgataacgaagaactccaacaaagttcttgaagggtcaacagaggagagctcaagctcgaacctttgtccattaatggcgaaaaccaagctcattatctctctttttctctttctctctatctgtgtctgtaagagtgtaacgtatccgaaatattccttgtccacatagaaagacctcgatgagatcttgaagccagagtgaatatcgctttcaccactaaatcgggacttttgacttgttaactaatacattttgtgtacacttctctgcctctaaatggtaaaaaagatctgcccacaaaaatataatataataacatgtctagttgcaaaaagaagactattttaataagagagtgatagaggaaaaggatcaataaagacagctcaattatttgtgtgaaaactgtaccgcaataatatatggaagtgaaacatataacacaaaaatatacaacacacacataagagtatatcatataatgacttctaaggaataagagagaagatgttagagtcatgaaggatatctgaataataaaggttgaagttgaggtagtcccagaagcgagagagcgcatatcga

SEQ ID NO: 17421 - DNA, 1336 bp, Arabidopsis thaliana landsberg
accgtgacgtgtagtggagggtatgataaatggtataacaatcctgcaccaaaccctaacgttttaatgggagcacttgtcggaggacccaacgagaacgatgtttatggagatgagaggagtaatttccagcaagctgagcctgcgacggttactgttgctccgtttgttggtgtcttggccgccgttttttaattttgtctctcctcgttttgcaaatttgagtatgtttgctttatatcttatataagtcataggtttaaggtctaaatgtaacttggctttaaataaaataaaataaaatccagatatttcacaaataaataatcttcaacggtaaactatctacatgattggatccaaattgacgaaaaaaaaaatattgtattcttaaaaagtttgaaaacgtggttccattaaatcttcttctctacaaaagtgttcccttcttgacaatcacactcaagtctaacatttttacagcgaaaaagagtttgtacattatcagaaattcatactactgagaggctataagtacattctttaccctttttccatcactcaatcaatccccaacgtcgaaaatagctcaatagctccctgagaatatcaaaaaactttattagacccaaattttctcttaaaacaaaaattgcattttgaggtattgtttatcttctttcactcacagagcaatcatcatgaaaacaccatatggtctccccaagaaggtttgctactgagagaactgtaagctgaggaaaatagttcttctctgacaatggaatcgtgttggttatgatcacctcttgaaacagtccgctcgatagtcgactgattgcaggagggctgtttccgaatatagacacaaatgcatatgtcagcttctttctctttttttataattccaacacagagaaaatatttcatggacttacctaaaaacggcatgagtggtacaagcgtatacttctcttgctccttcttggtgtaacagagccgcacctttgcttatggttcctgatatgatatacctaacgtaagtatctaagcacaatggggaatgtttacagatatgcagaccgtgacttattactcacctgctgtgtcaatcatgtcatccaccattatggctactttccctttaacatccccaattaagttcatcacctacatgaaacgggttgttaaatgtcaaaatccagacttggttaaaatgtattttccaaaggtttttctacctctgcaacattgtgcccatgacgtcttttatcaactattgctaaaggtgcatcagataacttcttcgcaaaagcgcgagctcttgcgacgccac

SEQ ID NO: 17422 - DNA, 786 bp, Arabidopsis thaliana landsberg
ggcgtaaaacaagcacatctatcttaaattaccgctcctttctattaacgtgaaaccttaaggagaatctctacccttaactaaactcccctgagtctagatttaatcatgataacctaaccctgagctaaactctccctgagcctagacttcaattctccaagtctctggaacaaccttcaaacatcaccaaacaagcttcatcacataagcaccaaacccgtgaaactcgtcgcacaaaaccgcgaaactatgtcgtaaaactatgtcacacacacccttagaaagctctcaataatatatctctatgcctcagctctcctcctttccaaaacttcctaactcctccttatatagccaaaccgatactacaagaaaacatgctttttgagacccccaaaaaagtcctaaaatggtcccaaatcgctatttacgacaactttggaactatctcaattggtcgctaaaaaacgttcgcaaaataaaatggtcacaagaacgatggttatttgtgacccctttgtgactaatttatgtgatcaaatatcagcgacggtttagcaacagattttaatagttgtatactagggactaaattgtgaccataacaaaagtcgtatattaatgactttttagtgacaaactacaatttttttttttttttttcacaaaaagtggtacttttataacaaactgagttgcaaaagttacaactgtggaaacatccatagaaacagagctaacagtttaaagcattaaaggtattaaaaatggaacttttaaaca

SEQ ID NO: 17423 - DNA, 1450 bp, Arabidopsis thaliana landsberg
gtgtgttagcattcttttccagaaaaaaattcttatgaagaggataaaaagttcaacgctagaaactgttctcgaggtaattactaagccaaaatctggtgatgcttggtcaaaaaggtaatggatttaaatgttatttttattatatttagaggaaattgtgaatcactcaaccgaaagtccgaaactattctttgaaacggaaaaattgaacgttatatattataaaaaaaaagattaaaaagaatgcatttttttttttagttagtttggtggttttattacaaactaaccacatgattaatagatatgccctgctgctatcacacaattcacaaatcaatgtgacaataatgcacatgctatagaattgccataaatccttaggcatgtgagtgattaaaggattgaaaaccccattgtcccactacaaatagaataatctcacatgtacgcagcacgcgtctacaattgacatccaagttaggtcccaactctcaaggaaaacttaatattgcccacatgactcaaaaaatattttgtttttagatgttatgtttgttacgtctaaataattttaattcacgtccacaatttcgttacttaggcactttaattggcctcaactaaataaaagcttgggcttattaattagtggagggaaagacaagggtaatccatgagaaacttaaaagtatataacacatccatgagaaaatgtagctagtgtttagaaaacatgagaaactgtctattcttgcaaaaatcaatcccgttaataattgatatccttcatcagctcagcctcacccacacagaaatctaaaacgatttcttgaaaaatccagagatgaaaatgatgatgatgatcatacttctcttaggctcaatgatactaaccattctctttttcaaaaaacagtcgagagggaagaaaagcaacgcacctccatcaccaccgagactccctctaataggaaaccttcatcagctcggccgccaccctcaccgatcactacgctccctcaaccaccgttatggtcctctgatactcctccactttggcagtgtccctgttcttgtagtctcctccgcagatgcggctaaagacgttttgaagacgcatgaccgcgtttttgctagccgtccacggtcaaaaatctttgataagattttttacaacgggtgagatgtggccttgggctccttatggagagtattggaggcaaatgaaaagtgtgtgcgtcctccatctctttagtaacaaaatggtacgatcctttcgagacgttagacaagaagagatcagcctgatgattgagaagatccggatatcaagttctttgcgggtaaatctaagcgagatcctggtgaatcttacaaacaatgtaatatgtagagttgcttggggacggaaataccggcggtaaaccgatttaaagacttaatg

SEQ ID NO: 17424 - DNA, 2060 bp, Arabidopsis thaliana landsberg
gcctgaggcatgtgttgtattttctgtttgggccttgtaatttgtctttttaatggaaaattatgaattgaagaaaaaaactgtagtttcattatcatgttttttttataaatatctcatggaacacctaaaatagaaaataattctcataatcataaggactaaggagagataagcaaacctaacattcttatttcctaagaatacaaccgagcgtttaacgtaccaacaattgtatagagatgcgtctagattttttagtaagtgaaacagaattcacaaccatagagaaatgttgttacaatcttgtatttgtttgactatatatatgaatgaaagttacgcaaataactgaataaaaaaaggagtaggaaaataagaaaaaaaagaaaaaaaaaagataagaaagcgtagaaattaggatgaaatgtaatgcttattacttatcttcatgtgaagtttctcaaatatctatatatactttgcagccattttgtaaaataaatcttagagttggaacttatttacaatggttgtcactggcttttaattattgattttcttttggcaataaattgattaacaaacaaaaaatattccaaatatattccaatcccatatatcacgcagatttctccaaaatttgaactagatttcgaaaattatttaaaacaaaaaatatttgacaaactaaaatacaattgcaatcccttaaaatgagcaaaacgcacctaaatacatttcttatcagttcactaaatcttatttctccaatatttgaattagatttcgacaactatttaatacgagacggtatagcacgggtgaaatccattagatatgtttagtttcactgaacgggactagatggtaggacggatttgaatcgatagtaatacgaaacggtataccacgtgtgaagtcctagatataacaatcaaaatataattatattatcttaaatactaaacaaaacaattataaaataaaaatataattaaattttaaattatttagttataatctagattttaacttaatgaactgtacgttattgttcttatattttaaacagtaaaagttaaacatagtaagagttatacattcagaaaatacaaaacattaaagggaaaaatgcttaaaaaatcccaaacaaattttaatttggaaatttaatacccaatacttttggattgaaataaaaatacatcacttaataaattgttgccaaataaaacactgtattttaattattggtcgaatcggacatataagttaacagccgttaacgggtttaacaaattaaatttttattcgtaaaaaaacaaaataatcccccgatattcagcggattaaaatctagtttcttgtaaatattcaattcaaaccccaaaaagatacttaatttttttcaaaaatgatttttcgacatcttaaatgtgtttccactctcaaaaactatcgctgatccactaaatttcatatccatccaaatccaagttttacttttacttaaaagcgtaatttactaaaattggtgatcttaaacagctttctattctcaactttctcctttccataatttaaaaatagatcttcttttacattgagaatcagcatgattggagatggctagtgggcataaaaagttaggaatagaccacataaataaagcataaatcatataattataacaataccttttattggtaattggcatacactttcaagtttatatttggattatttcattagcttttttaaaattaaaatgtagaaaaccacttcctacaattagaagaattttattttaaaatctacgacaaaagaaaagatgttccttttcaatcattctacttaaatctttaggaccaggtttaaacaaacttcatgtcggtatgtctctcattgtcaagatctgaagatttgtttttttttttttgaaagaaagaaagaaagagacaaaacttcaataatttacttattttattcgagatgaataaagagtgaaaaattcggataaagcgggtcgggttttaaataaaaatttgattcggata

SEQ ID NO: 17425 - DNA, 982 bp, Arabidopsis thaliana landsberg
gtttttaaatagataaacctaaaccctaaaaaatgatagtatataaggaacccaagcaataaattttataaattttgtaatgaaatttaggttttgatttgtgaaattaacaaaattattaataatagtaacattctagaaaaatatttgttaagttggtataaacaaaaaattgagagataagagatgaaagactataatgaatataagggtaaaatagtcttaatatgaaaaatatggagaatatcatatgagatttttttattaggttagttacttaattattaaatttttgttggttgtagttacaaatttccctaaacaatttctaaaatttgcgtagttcagattctgaatccgccacattcaaatttttgaattgacaaataccactgcacaatagacgattttgtaattatgatgcctcttaaaaattaaatatattttaatgtttaaagcacatgtttgttacgttttaggtctgggccggccctcatcaaacatgcgactttcaacttttttcagtttcttgctgtgggtaattcatgtaacaccccaaatttgaaagaggggagaaagttaattgatcatttaaaaactgtatgacttcagggaaatctatgatttgattcaaaagtccaagacaagatctgtaaataaagaaaggttaagggactaaactgcaaaaacgaaaaaaaatgagggcaactcgggttcatcgttcccaaatcagagggatagtttttggcaacttaaatctccgtctctcaacactactatatcgtatatatgtgcattttaaagccccaacgatttagaagccgattacatagtcaattggaggctttgatgagatttcaagacctttcttcatcaactttgatttgattatttttgggcaacttgtgatcggattttgttgtgagttacgtcgatcgcgcttctccatattagagctacagatctgggttgtacttagctt

SEQ ID NO: 17426 - DNA, 1696 bp, Arabidopsis thaliana landsberg
cgagcaagcaaataaattcttcaaataaaatcgaagagcacaattttaaatttgccaaaagttcttctggtggtactgaacatatagagaaggaagaaccatcagggaaggggaattggatagagaataactaccatgaatttgagcctgttgttgaaaaaatgagagcaggatttagggataattatatggctgctagagagggtgaaactcgggagccaggtacaattgctgaaattgcagaactttaccgcagtgagtataatgatgagcttgagtggatgaaggacgagaagctaagggacattgtcttccatgttcgagataatgagctggctggtagggatccatttcacctgattgatgatgaagataaagctatgtttttgcaaggcttggagaagaaagttgagaaagaaaatgagaaactgtctcatctgcatcagtggattcattcaaacattgaaaaccttgactacggagtaggtaatcttctacaactttgattgagactcagtttgctcaatatcttacgtacacaaattatgcattaatcagcttgtcaaaatatatctcaaccatctcccttcctcttattattcagatggcgtcagtgtgtatgatccactagaaaagatcataccgagatggaaagggccttcacttgataagaaccccgagtttctcaataactatcatgaacagcgtgaagcactgttttctgaaaaagctgcatctgtatctcctgtgaaatatgaagaacagagctctcatcaggaattatcagagtctgcttcctctgagaacactctcaccccttcatctgaaattacctcaagccagccaaagattgttgtagaaggaagtgatggatctgttagacctggtaaaaaatcaggaaaggagtattggcagcacacgaagaagtggtcacgtgggttccttgagttgtacaatgcagagactgatccagaagtgaaagctgttatgagagacatgggaaaagacttagaccgatggattactgaagacgaaatcaaagacgctgctgatataatggaaaagctgccagagaggaacaagaagttcatggaaaagaaactcaacaaactcaagagagagatggagttgtttggtcctcaagctgttttgagcaaataccgcgagtatggagaagataaggaagaagattatctatggtggttggaccttccgcatgtactggtatgttttcctgctaaacagttgactgacattggagaaacacaaaagtccttgaaaatctgatatgtcttttcatgttttagtgccttgagttgtacacagttgatgaaaacggagagcagcaagtagggttctacacattggagatggcaacagatctcgagttagaacccaaaccacatcatgtgattgctttcgaggacgctgcagactgtcgaaacctctgttacattattcaagctcatttggatatgctacgaagtggaaacgttttcattgttccgcgcccgccaaaggtaatgaatttagccaatgaagaaactttaactagacgtgtttctgttatcaattcaaagttgttctctttaacctacacaggatgcatatcgagaagccaaggcgaatggatttggtgtaacggttattaggaaaggagaactgaagttgaatattgacgagcaaatagaagaag

SEQ ID NO: 17427 - DNA, 1942 bp, Arabidopsis thaliana landsberg
  unsure (1)..(1942): unsure at all n locations
aacttgagtatattgctgatagaggatttttagtggactattgtcctgtaaattttactcttcacaatgaaagagttttctctacgtataatttggtgtcacgtttatttttctgcattaagcttttgctgccaactcacaaacgcatataaacgtgggtaagattttaatatgattatgatgcgctgtgttgtgcgtatttcatagcatcttgatggcattgaaatacgattttggaaacaacctccaatgcacttctcatataaccatcatagaggaggaaaaaggagaaaacaattatttcatttatttaaaagcaaacgatacaataaacttaaacatataaaaacaaattaggatgagaaagggtcttgtgcattattaatctgaggatgaaaagacaatcctatatctatcacttatttagttattttaatgaagtagattatctttttgaattacgctaaggcttgagattcatgtctttagacaaatcatcggcatgttgaatgctgaaagtggagaagcaatgatttttgaagaatctgcttgatcttctcataacgtgcatttctttaaggaattgatccaacatcttttctttgctcggtaatgtgaatttaccgtccaagagctgactgagccaccttaaatgtaattctgatgatttcaaattagagctgctttgaacatatccgatgaaacccatgtttggtatcaacggatggattgttcccctgaaaattttagtaaattagcatcgttattatataagcaacggtccaattttatataagcaacgattattatataatcgttatttattaacaattcttttaaaaattctatgtaaatatatagtcttataaacccgtaagaccacaaccgtatgagccatataattttttttcggcctagaaagatattgtaaaactatatattattatcgttttaaccatatctttaggtgtatgcaatttttacattaaatgaatctttagaattttttgaattgtaacacatgttttcttaaatatataagcctttttcaagaacaaaagacatgtatattttgttacagtatcaaattagcacaacatttcggaatagtttagaacaagtttactattaaaaaaaaaaaagtgtattaaaaaagtgtacgtacctgtataaaggcatgataccccaaggaaactcaagccatgatcgaaaaggttcagggacaatggctttgagcttcttcatgccatcatatcctgtcgcaagtatcacaacatcagcttctagggtagtgccatcctcaaactcaatcccttcatcatagaaccaccaatttgttgtccttttgaaacggatcattcccttatccgnnnnnnnnnnnnnnnnnnnnnncacgagcgccatttgacaagaagcatagtcctcctcgaatgcatggtccggtttaagaccatatttctctaacggaagcttccacaaaacatatgattcgatgaatttggaaactgtggcacgctatgtttgtcaaatacattgtttgaaaacaattagaaagtttgcatgattgcatgcaaattatatataggagacgaaattgagtgtttgaagaggacgaaccagaagagagaagattatagtaaagagagttctaaagtagctttggttaggcctctcatgaatgaattgagaagctctagttgagtagaacaagaagaatggtagaccccaaacccaataatgtgggatcacccaatgtggtgttctcaccaccattgtgcatgttttcccttcttttcctgaaaattttaaatatattatttagttcaaaatatttttgagattttaatcatattacatgattgcctaatcaaagacttacctgtaataaatataaatatatatatatatatatatatatattataccttgatgagctaaggca

SEQ ID NO: 17428 - DNA, 2295 bp, Arabidopsis thaliana landsberg
atgaacttgaatatatgattgaaggtcaaacgtttacgctcggttagtattatctatatagaatgtgatgaatgcatttatactcttttatgaagtgtttggttccttttttatttcacagaaccaattctcaccattggaacaacagagtttgtaacatggcctgacaaatggacaattgtgaccgcagatggtggtccggccgcacagtttgagcatacaattcttattaccaccctggtgcagaaattctcaccatatcatcatgaattatatcacaaaatgttaaggaatttacattatgaaccatccatttctgttgtaaataagataaaaactgtttggttctgagcagttgatgttggtgtccttggcaattcctatccctccataggtatagatggtggattggttctgagcaaaaattaatcacatgaacattcacaaattaaatctaaaatcgagtgattcattgttgtgatatgaaacaaattatttttatggcacctctaaaatgattttggataaagatcactggataccaaaaatcattgcacatgtgatgagtaattcattaatctgaagtcgaaactaactttaacgatgtgatgtgaaaacaaatttaatttggcctttctaacgatcaaaagactggataccgagtaatgtttgttttgtcacattcttttgcataggactcggcataaaactcgaaatccaaaaaccgaaccaaatagttataaaacccgaagataatgaatatataccatgcacagctgaatcttatagtaaaatatatacatttgattagtttattatgagtttttagttttttactatgtttcaaaagaacatagtggttgtgtttggtttaatgatactttcagaaaaatcttaatttattatctaaaaagtaattaacaatttagggcatgattggttctccatctaccacccgtaaacgcagcgtttgcggttggtagcggttattagcgattggaaccaatcatagaaaccgctagatatcgctttggaccggtcgaaatcgccagttttcaaaagctccttcccgcaagcgtttgcggttagattaaaaataaaataaaaagtctttttttagttaattaaaataattgtggcttccacccaaaccctaatcactataattaaaataatctaatcttttatatatcttctttttattagaataccctaatcaatatattgtaactctattctctcaattatggcatccgatgaatataaaaaacaagacataagtatcatctatcattttattcactcattagctagtgtaattctttgactatttcatggcatcattgtttttattttattttgtattcttttgagttttttgattgaatacatgtttcgatttgttttctcgattagaaattatttggtcggacgagatgatatattgtatttttatttggtcagaaaatcaagttttctaatattataaatttatcataatatattgtatttttatttcttttaatagtaatatattatatttattttggttattttttatttaattactatcgcatccgctggtttaccagtcaaaccccgcaaacgcacccattatcaaacgctcaaccagtcgttcaaaacgcttgataacgcttaaaaccgcaaccgcccgtttccgcaaactcccgcaatcgcaaccgcatccgctgtgtttaaaccagtcagacccttaatttggaaatgtcgtttgctaagattatttttctttaaatcgatctgtatatgaaagagtatgcacgtctcaaagtgtttaggaagatattttcaagaggaaaggcattaaacaaaaagagagtcataaggatatttcaaagatatgataaatatatattgaaatattgggttgtatagagagcaataatttcctaatggaaagtaggaaatatgctagtttggcaaaagggaatgaggacatgaattttttacataagagacaggctttgtttgggttagccaaaatatttaggaaaaaaaaagagagaaaaaaaaaggttttgttaattagcgagctagagttcctcgatggaatacgttttggtttctaggttgtgttcatagatcaaagatgtaatttaaaaagaaaaattaattttgtagtgtggatttgagatagacgtgtgttgtgataaaacgttaatggtgtcaagttaagaaaatgttttagactttttagtattgagtaggtccatttaaacagactgctactgtaaaattgtaaatgatgattgatgc

SEQ ID NO: 17429 - DNA, 367 bp, Arabidopsis thaliana landsberg
acagacatgagataaccatacgaccgataacagtgggatttttttaattttgcataagaaagattgggtttccatcagacctggattcattggctaatgcaatgcgactccacggtctcctactattttacttctcaaaggttaaccaaaggaattggttattccacaaaggggtatcatacacggagaacctctatcccgttatctatacaccatctgttgcgaagacctttctggtttctgcaataaagcttacgtaaatgaccgcttaccgggtataagagcattcaaaggcagcccccaattaaaccacttcctcttagctgacgacaccatgaatttcagtcgcttcgatccatgaagctgc

SEQ ID NO: 17430 - DNA, 1335 bp, Arabidopsis thaliana landsberg
ggctctctctactctgaagaaggtgctgtggtacaagttcgatttccaaaagaagttaaatctgtccaaaccacagggaatccgggacgccttgcaccgagcctcggattatggttcccatgaggaagaaatggaactactataaaaaggcacgagctgccgaagcaaacgcctcgtggtgaaaaatcccaaccaatcgctttgagccacaaaaagggcgcccaaggcgtgacgttcttacaccatgaggggtgaaacttctctggagcccacaattatcaagccgatacaccccgaggtcgaggacgaggccgcaaccgaggtcgtggacgagaatcctatacttggacaaagaaccaacccgcaggaaacgagcaggagtactgcgagttgcataaaagctacggccatcatacctccaggtgttgtagtctcgggcgaagtttacagctaaattcctagaaggcagaatcggtggaggcctgaccatcgaagacttagaagcagagaaggccaaaaccgagcaggtaaatgctatggcgaacctcgagcaggtagcccccgcgacaaaccctgaaggaccgaagagaggtagaggcaaccgcgaggtagatgacgataaaccggaagctgctcggggaagaatcttcacaattttaggagattcggccttttgtcaagacacaacggtatcatgatgaaccccgaggaccaagaaaaaaacgctttctacacagagcaaggaatcttttgctaccgagtgatgtcattctgacttaagaacgtcggggtaacttaccagcgtttcgtcaacaagatcttcgcattatagatcgggaaaacaatggaagtatatatcgacgacatgttggtaaagtccatggaagaggaagaacacatatcccattttcgcatatgtttccaacagcttaacctctacaacttcaagctcaacccaaccaagtgtcgcttcggggtaggatccggtgaattccacggatatctagtcacgcatcgcggcatcaaggcgaatccgaagtagatcgaggcgttattagggatggcatcgccacaaaataagcgggaagtgcagcgcctaaccgaaagagtcgcatcccttaaccggttcatctcacaatccaccaagaagtgcttggccttttacgatgtgcttcgggggaacaagaaattcgaatggattacccgatgcgaagaggctttccaggaactcaagaaatacctcgcgaccccaccaatcctcgcaaaacctgtaatcggggaacaacactacttatatgttgctgtatcggacaatgcagtcagcggagtgttcgt

SEQ ID NO: 17431 - DNA, 1235 bp, Arabidopsis thaliana landsberg
ttttttaatagggttggatttctaaataaagtacttataatgaaaatgcaagaaaatttattaaaggaaactcctaataatcttttaaataattgtattgtatgtatagggagaatggtcaattacaaaacttatttttcaaagagttccgaggatgattcttaatacaagtgagattgcagaactaagacaacattgaagataaaaagttgatcactcagtcaagggcacgacatggactccaagctgattaatcatgttacttgctttcccatggaatccaacaattttgtaaccttctttttttagtacaaagctagagttagattcacatccaacgggtatagatgttcgtttgttcgtttgaatcctgagcatggttataacttcgacttcagttccatttactttattgtaacaaccatccacggctgtaatgtattcacttggatattcaagctcgtactgccaaaaaaattaatgaatcaatgtaaaatgtcaagataataaactcaaacccaaaaaataaaataaaaacatccaaagtaatagttaatcacctccttgacttcaaatagtgttttgtttccatgatcttctccaataacaacctgagtgttgctatcgtacacaaccttaaggaatgcgacacaatttttactttgtcctacgtacaactttctaacaccttcgaaaacaccatcgtcccatgaatctccttgattaccaccttgtgcttgtagtttctccgcagtaggaggaggcaatggagaaaaatatgctccaatagcaacaagatcacgatcatcatgtcttccatagaacccaaccacagcacatcctttgcttgctaacagaaatttggtaccagacgcgattccaattgttgtagaggttctcccttttgatgttttaaatgtcaatgacgaaattcttatttcgctacgactaaagcttttcatagtcccctccacagatgtgatcaattcatttggatagtcaagctcgaactgcagtggagtaaggaatttgtataagatacttatcaatatatatatcttatagtccatgaatatattttgagtttgcgggatctataacctctttttctccgtcttcttctactatactattccacccgtgttgacgcactgcaactgcgcggttatagtaatgaaacttaatacaccttacgttcatgacattacttgtggctgcactccgttcttatgaaa

SEQ ID NO: 17432 - DNA, 1246 bp, Arabidopsis thaliana landsberg
aactcaagaatatcagcatagtccttggcagtgtagacacgaagcctctgggcaacggttgagaagtgctcaaacaggttatcatcttggccatcatacattaaatgtgcaggcattgatatctttttcttcatcatatcagccaggcccaagatcgtgccatcagggtcaatttcaaagagcttctctacaatcttggtgtaagcagtctcatgacgcctctcatcagcagcaatggtcccgcatatctgcgcaagtttcaaatctccacgatctttcgccagtctggcagtgtttccatgggagatgaaggtcgctctttcttgaaatgatgtgtagatgaaacccaagtaagggttgttttcagtttttggatcctaaggacataagacaaatcgatcaatcatacattgaatattaggaatacaaactttacacaatggaaatccgtaaagtgattaatgtggcagctaagcagcactccaattctatcttcagaacttgaaacataaaaaatgcgtatgttgctaacatgaagatttgcagatagtcattgtgaagtcaatataagccatactaagaaatgacaagataagttccaaaaaagtaaaactgataaatggttccaacttattcctcttctgttcccctacctatggaattttaacaatcaattcaaacaagcatgtaacgattgtatccccatccccagtcacttcctaaagcgcaaatgcaactttaggagattatgggttaaagcaaaaaagaaagttagcagagcttaccattccagaaccaatcaggtactgaatagtcttttcaatctgcctcatgtctacccgaccagacagataaagatacttgttaaggagatccccatgtctattctcctcagcagtccaagccctggtccatatagcccaaggagtaggactagctcctgtctcatccctaacaccatccaatgtgttcaacatggtctggtaagtaggaagtgcttcttcagtgatcatatccccaacaagcaccacaaaatagtcatcaggaagttccttgcacctttcccttagctccttgacttggtcatagaatccttccgactcaggttcgggaagaaaatcggtaggctgccacgatttctcaacaggttttaaataagtcaacagggtttcatcagcccatccttctaaagacttaaagatctctaacttttgtggcggcattgaatgtttgacttggacatgca

SEQ ID NO: 17433 - DNA, 1510 bp, Arabidopsis thaliana landsberg
gttatttgctttgagtttaatgcattattcttctctaatccctgcttttttttttcatatttcggaaaacggaaattagattcaaaaaagataacgtcgttacaattagtatatcatatgttctatatgaaatagattgaaatcagaaattagaatgaacaatttagtgattaacttcaactttgaagccagcgttggaaactagcctcatatcgacggtccttctttcgttgaatggtggtgattctgttacgcatttgcttgtcgatccattgtattagagtggctgcagattttggagattcatcatgacgtcttcgattcctctcatgccagatggtgtaaacggtggtttgaaggatgtatttcatcaagaaacatgctacactatccttgcgttgggccgagactatggtgagtagttgagtccagtcacttgtatagtgttgctgaaacaatcctcgagcaagcgcttcacatagtttttaacattactatttctcaacttctttaaacaacatgcataattcttctctaatcttgctttttgatttttagcatcactcatttatgcatcaatcgatctgactctgtgagacgacaaaagctgggaagtgtgagagaaaaggtttagcaatttagttgcacttactcaatgctcaaaatattatagatgttttcttcttttggtgtcacgaaggattttctttctttgtatatgtacatgcaggcttgtcgaaacccatgtccaaaaacaacttgggacaaaaattttgttgttcatgcatttttgttggagtccctgactcttgtagtgttggagaataggacaaatgaagaagttctacatgcgactatatcgtaagttcataatccatacaagagcagaaagctttgcaaaacacataggccagattttatcaattaccaccgacttgacgtttccacgagtcttcgacgatcagttcatcaactccccattcctcgtaactgattcagagtcataagtaagtcgcaagaaaagaagatatcaaatatgaaagaagagctaaaagtattgatataactaatgcaatctcacctcatatcaggtagataacgtctaatggtaaatggaatcttcctttgcctaagctctttcatcgcaatcttaagccaaaccatacaataaacaacacaaatgttcatatacatatcaaacgtttactgacaaatggtgaaaaaaaaaaactagaaggaagaaggcagcacctcaagtggatcagtctcaccctccagctcaaccataacaggagcattcatgctgtatcagccaaaaacagtacatagagtcaaactttctgagcaaacttaacaaagattgttctcagtagctgaggatatatacttaaaaggggacagaaacttaacaaagattgttctccgtagctgaggatatatacttaaaggggacataaacaaagagtagctgaggaggatatatagttaaaggggacagaaacagacctaa

SEQ ID NO: 17434 - DNA, 1487 bp, Arabidopsis thaliana landsberg
cagcgtgcctattttcaccaaaaaaaaagaaaacatacaaacataactagttatctaatgtatacatagccattaccaaaagtctaaacgtcaaacggactcgttgaagattttaacaacagagggacgtgctctgcacatggcttccaaaggcttggctttaggcattgtaacacctttgccttcactcatatccacttcttctccaatcttctcccattccaaacactgaatcaatgatccaagagtcaggtttataagccgatgagccagtccagaaccaggacacgcccttcttcctaacccaaacggcattagcttctgagcttctccttctttctcaaacctctctggcttgaagctcattggatcatcccatagctgaggatctctgtgtatagcccacacattggtcaatagtatcgtgccacgcggcatatcgtatcctgcaactttacaatcttccgaggcaacgtgaggaagaagcatgggagccgcaggataaaggcgcaacgtttcagacacaacgttttggagataaggcaggtttgagatatctgattcatccataagcctgtctaaacctatctttctatcgatttcatctctcgccttgttcaatacatccggatggttcaacacgttcgacaatgcccattctaacgtaaccgctgatgtgtcggtccctgctagtatcaaagcctgaaaattgcacacatacacgtcactaaactagcatgtttcataccaaaatatgacaaggagtgatctaaagaattgatcgaaaaagggtacttacgagcatgtttcctttaatgatacgatccgtgaagtaatccggttgggattcttgcagagtaagcaagtgatcgatcatagtgtttcctttctccttagcttctcgtttctcatcaaccaatccttgcaagaactcgtcgagcctacccgccaacttcttaacccgtgtctcgtaatctgaaaccaaccgcaaaaccggtaagtaatcaacagcgtttccagcaccagcacaagccaccacatccgctataagctgccggacacgtttagcctccggatcatcctcaacaccgtctccgtagtaacgttttccggccaccattcttaaaatgttgttgaatgttaagtcagataacattgatttcatatccactttcacaaactcctacaatgacagaacagagagtccacaaaacagagtatagttagaataaaacagagtattaattaaatccaaattcgtgattaagagctaattaactaagttttaaagctcgcttacttgtgaaaagttccgagaaagacgaaacacaagtcgtcggatctcgtctttacgaatagacaaaaagctattgagacggtgattggagaatatctcgacggagccgatgcggcggaggttacgccagtggtcaccgtaggaagctgcgatcatgggtgtgtaatcggccgcaacgtgtttagcgagg

SEQ ID NO: 17435 - DNA, 561 bp, Arabidopsis thaliana landsberg
  unsure (1)..(561): unsure at all n locations
tatatatattcaaattagtaatataatgcattttatttactataattagtcttttattataattattatatttattaatctattttttataaatatttaaagtaaaaaacttacagcaataattttacagcaagaaaagttacagctacagccaacacagctacaacaaaatctccacagcaaaaaatctagagttacaccccaaccaatcacccacttagataacatcgtattttagctcaattttactatgtttttattaggttttccattgagaaatcaaaagttattgaatacttcaaagctatttccaatttcgtatgtttcaaggaacaattatgagttttcaagcaaaatagagtaaaagtcgatcaaatcccatttcaaaacagtttatgtatatcaaaagtttggcatctttttgaggttattgaggagtattatgtaaatcagtaaatatataatagttatctcttaagatcgtatcttgtgtagcaagcttaggatattctcttaggttaaagactcctctgnatatatatattttgggatgaatcaagc

SEQ ID NO: 17436 - DNA, 1709 bp, Arabidopsis thaliana landsberg
ggtctgtgatacgtccgcgtggatttctttatacgtcaccaaaatctctaatagaatcgtaaagcaacctttttacgatcattatctatttatcttaacttacattctagatatttgcattaatcaaagatatctcaatctatttaacaatcttataagagagtctttgtctattgcaaactctaacttcctatcttttcgtgtaaataacttaagactgtgaggatgtctaaacaaaccttaccaagtatagggagaaatagacaccaattcggtttgatttactcaaaccaaacaccaatttgaaagctgagaggcattttagttccagttatatgataaagtactaaacacaaaccaaaaccaaagtattggcctaaaatataccaagccaaagttgtagaccaaactaaatgctggacttactactagacaatatcggaaacacgatttaagaggcattttgtagtcgattaatgggcttctataaatgggctttagggggacagaacttcaactgggaccaaaatattttctcttttgtgaaatcgacaaaagaaattcttaaaaacgaatgaaaaccaaagaaagaaaataccttaaatgcagacacctaccataaggacgaaagagagagtgcaacgtattagaaagtagccagccacaaaagaaaaaaggtaaagagagagaccaatcacaggagataacgctaagataaggcttcttacatttaccatcacatataacataacgttactattattctaaaatccaaaaaaactatatgttataacattggaatcatcagtctctaagcagtatcacaccaactcaatatggctaccaccactgcagcagcagcctcaggtatttttgggatccggattcaagatcctagacctggaaccggtagggtccaagcccggttcgggttcagtttcggaaaaaagaaaccggctccaccgccaaagaaatcaaggcaggtccaagacgatggagacagactagtttggttccccggcgcaaacccgccggaatggttggacggatcgatgatcggagaccgtggatttgatccgtttggtttaggtaaaccggctgagtatcttcagtacgatttcgatggacttgaccaaaaccttgccaagaacgtggcgggtgacatcatcgggatcatccaagaatcttcggagatcaaaccgacgccgtttcagccgtacactgaagtctttgggatccaacggttcagagaatgtgagctgatccatggaaggtgggccatgcttggcactctaggcgccatcgccgtagaggctcttacaggaattgcatggcaagacgccggaaaggtacactcatacagtcgccgctaacgtaatttgacacgtggacagtctcgtcattagttgaaactaaattagcatttgttaaattaaaaaaaaatgaggcataggtggaatcaagccaaaaaaacatgcatgcaaattttaaccactaaaatggaaataggtttaggcttttggttttggagttttgttcagattatttggagtctggtatttcgagttcttttgatttttggatttaacaaatatgagaaaataagagaaaaattaattttagctagtactatatgttttagtttgtttcaaatgcattttaacctgaaaatggttaaaatttttccaaatgattttaaatttttttta

SEQ ID NO: 17437 - DNA, 1227 bp, Arabidopsis thaliana landsberg
taactagggagagatctcacaggattcagatttacatgatttatgtttaataacccaaataaataaataaacacgtgaaaactataatttctcaatggatataacactataaaacaagattggttacggttcaaacattttgacgaaaatagcttaataccaaactagaataataagcatgtggaagaaaatattttggaaaaatcaaaataattccgtggaagcaaaaattaagaagtgcaactttcatgataaatagatcctaaataggataaagcccataattccaaacagagcccaacacgaaaataaaaaagaggagagtcatacgttctatctttattactaaccaagtcaaagggagtctcataataagtgcagcgtaaagaggtttccatagaaccagaaaacaagtgtctttaagagagattatgaaccaaaccactgagtaacgagtctttacatgaaccgccaagtactagttgcctcatctcctcccctcgagcttgagaaacacctgaaatattgggcacactggtcttaaacatgcaatatagctttttgattttaaatgttgttttgacaagttaagcctaagagagaggattcgtcttactcttaccattttaaccatcttgtacctctcattgggtggagacacgtttcatgcacagttacaagtttactgacagtagattgcttgatcgatattagaaggaattggtttgatttcggtcccaagttcttgctcagtctgatacctgttttcaaaacatgataaatgactaagaaaactttaacagaatagaaaaaccggttagaacattgaaaagaaggaacgacatacattttgaaacggtcctcataagttaccaaattcacagccaatccaaggtgtccaaaccgtcctgatcgacccacctgaacatttcgcaacatgagttaaaatgaacatgtaagaaactagatcacaaaccagttttgtttcgactaaccctgtgtagatatgactcagaagtcctaggaaaatcaaagttgatcacgacattcacagcttgaatgtcaattcctcgagtaaacagatctgcagtcattttccaataagccagatcatcatcatcataatctacacttggtcaatgttcaaagtacatgctaaaaaacacaaagcttaccagtgcaaacgagattcctgcaagcaccattgcggaactcgtggaatactct

SEQ ID NO: 17438 - DNA, 760 bp, Arabidopsis thaliana landsberg
  unsure (1)..(760): unsure at all n locations
gaaatcaagctgcaagcttctcttctttaacataagataaagttacaatttcatattcatgttccataaccttagacggcaaaggcaaaagcggcccaaatctctcgtttgtaaaatcaaaagatatgatgtgatcgacaatatcgtcttctgctttcctttctttagcacaccagtaagtgtttccgttgagagaaacaccacggtcacaacagtatatacaccagtgtggagtgacatcaagagttgtccatgaatcagagttaaaatcgtaaatttcataccaaaaatattgatttttgggtgctcctaggaaataatctacaaacctcaataattggaagctaccacgagattccttatccttgtatcctagagcgtaaatgaacctgtctttgtgtggacggtgagaatatctgagttggatccaccttgtttgtccgcaatacggattccaaacgacaacccttgtatcgtcttcttttaagaagcataacaannnnnnnnnnnnnnnnnnnnnnnnnnnnnnnnnnnnnngttcatcaaggaaaataggttgacgtttaaacgctatagattttttattccttttttttttaaacgctttagatggatcaacgtcgtcgtcaactacgacccccattgaataaagatcgaaattcatcatagcgatcatcatggactcctcttctcttgttgctcttttactaatgtacaacttcctaaagctcctacttttggatagagtgttccaacttag

SEQ ID NO: 17439 - DNA, 1554 bp, Arabidopsis thaliana landsberg
gatataaacccgagccctaatgacaagtggaagcgttctttgtggatccatcatttcccgcaacaacctccgtagtaagaagggcaggtcttgcatcctctgccaagggaataagaatttccttatgagcgatttgacattacaatcctacttatggggggattcatggaagtcttatatatctcaaaaactaaaacacattcactttttccacaaaagaccaaacaagcaacttaaaacacagagatagaacacatacctgaactaaactacttgaacgcccgccaaagagtcggttgtaagtttcaagattaccaagaacctccttaactgtagcgtcattacggtctctgattgtttcctctgaaggaaccaacaaacttatcggacgacgacacaagggacatttgcatggccgtaatgtagatccatgcctccaaactagcataatgcagttccctacaatgatagaattagagtttatatctcatgcactatattatgtgaacatacagaatcttaggaaacttagcaaacaaaatctaaaaatttatgttaccagtaaaacaactctgaatagttaatttacaagtccaaagcaaaattgtctagaaaacggaaccaagcttcaggggaaaacgaaattaagatcgtcacaactcgatttgatcccataaaggaagctaacgaagattcagagaagctagctacactcgaattctgtgactactgaaactaataaccgatcccgaaacgattcgagagaaggagaaacgaaagcaaataagaaggagatcgcaccgcagaaccagtgagagcaattggattggcaaggagcgttgaagtggccatggcatatcgaacaaacttcgttctccggtggcgcattcattgtcgtcttcgtcttcctcctctgctattagtctctctcgtcgcagcgtcgttcttcggaagctctatagagtgttaattatgacttttccgtagcagttaagtattaagaaaataattatcggaaacacgtggcaatagattaagctaagacgcggctacaaatatgcaatctgagccgttcaaaggcttctaattgaggtcatcaagatgagtgaataaccatgcctgttaacgcgttggtggctttgtttaattatatgtatatttttaatttaaggccgcaaaaacagaaaaaaataacaacactaaaattataaattagataaaatatggattgagttgttaaaactactcgatcagtcaatttagtagcagctaaaaacatatcattaatccttaaaacctgtaacttagtcgatatgtgaggagattatttgatgaatgaaggaacagtagaggcaaacaaatcaacggaggaattatttctcaagtaaaagaacatgagatttttcaaaacaaaaaaaaatgagtgggtcattaacaattttgacatcagtgtacaaaaccacactgagaagcccaagtttttttttaacaatggaatttctcaaaaaaccttgtcctgcaagatcgattaccatttcgtaatggaaccctatc

SEQ ID NO: 17440 - DNA, 2609 bp, Arabidopsis thaliana landsberg
tcttcttcttctttttctttttcttcctcttcttcttcaatcaacatctttttaactttcagggttcatcaatctttgaactacaagcagaagataaaaaaaaaccaaatcaaatctaaatccggtcaaaaaaccggagaaaaaaccggctaaagacgccggagaaaagcccgacgaaacaagaaagagggtatcttgctctcgggagataagccagccaccatcgctaaaagtagccggtcgatgccggaagctgagccagccaacgcttctaaggaagccagcgatgccggagtagaagccgaccaaacactgttgataaagccagtcattgccggccaaaaaagctgaaactctctgaaagatgaggagagagaagagagagaaaacctatcaacgtgaaaataattacatttgagtttatatactcaaaacttggaagtaaaggtaaattaaaatatgattgttagaagcaattacaccaataataaaacgacacgtgtgcactacgtagacgttagataaccacagcaaaaggatatgtattctcgaggcgggagagagaaagagaagagagtgagagagatcgaagaacatttacacacatcaatggcgtctctgcaactctgcgacggttatcttctcttcaagccctctgtttctcctcgattcctctctcaacgcatttctcatcgcctaatccctaaagcctcatcttctcctcctccatctccatcaccatcatcgtcctcttcatccttatctttcagtcggcgggagcttctgtaccaatcggcagctgtatcactctcgctttcttccattgttggaccagcgagagctgatggacagttatccgaatgggaaagagtgtttctcccaatcgatcccggtgttgttcttctcgacattgctttcgtccccgacgaacctagccgaggtaattactccttcttcttcttctttaattttccgttcttaagttcgaaattgttttacttactgattcttgcttgaaatgtcaattagggtttttacttggaacgagacagactttgttagagactaaagatggtggaagcacttggaatccacgttcgattccttcagctgaagaagaagatttcaattatagattcaattcgattagctttaaaggcaaagaaggatggattattggcaaacctgcgattttattgtacactgctgatgctggagagaattgggataggattcctctaagttctcagcttcctggagatatggtattatatcttgtttcttctggtgttttcagagatttctattgttgttgtttttgtttatgagaatgtgtttgttacaaatgttgttgtaggtgtttataaaagcgacagaagataagagtgcagagatggttactgatgaaggtgctatttatgttacttcaaacaggggatataactggaaagctgctattcaggaaactgtttcagctaccttgaacaggttcgttaccctctctttggtttatactagggaattggcattgtcttttccatccagattcaatagagatcaaagagtagaccttaattcagtatttcctatggtcttgcagaacagtatccagtggaatcagtggtgctagttactacacgggaactttcagtgctgttaatcgttcacctgatggaagatatgtcgctgtttcgagccgtggtaacttctttctgacatgggagcctgggcaggtgagactcaattaaggctatgaagaaatacatttatacttgtggtttgcttttgaactcttagtcctttttatgacatagctaggtgaagttttagcacttgcttaggctcagtcttattgctgattttgattttgattaaaaagtactttgtctaagtaaacggtattatgtgtcttacaagggactaccaatccctctctttgttcttgtgtgtggtttgcgtgctctttagactgtcattcaccatagtattggtatattgcagccttactggcaaccacacaatagagctgttgctagaagaattcagaacatgggatggagagctgatggtggtctttggcttcttgttcgtggtggaggactttatcttagcaaaggtactggggtaagtacagcagcaagactctcctcacttcttgcagttttattctctgaaaatttccttttcttctcgttttggtatttacttgcgagtttctgggttcttttgccacttagaggatgaaaccaaatctagccatgaactaagaaacacaattttcttttgttatctgctattccctggactaataacaaggaaaataaaataaaaaaactgtttccttgtgatttaaattctcttccaatgtttcaacttccaactgcatctgattttgatctcctctgttataattgctcagattacagaggagtttgaagaagttccagtacaaagccgtggctttggcattctagatgttggatatcgctcagaggtaaatgagtttccacgatgatcactcaaaactctgaatctgctccgatctttacaccatttttttttttttttgggtattgcaggaagaagcatgggcagcaggaggcagtggc

SEQ ID NO: 17441 - DNA, 569 bp, Arabidopsis thaliana landsberg
tcataccgacttccaatctatggggtactttgcttacatggccatcgacagcctcccgggaaatcaattcttcgaacgcttaacgcttctcttcgttccaacaagccggagattcaagtacatgttctgaaaatgatctgttttttatttcttcaagttattattattcagatttctcttcaaagactgatcatgcattgttgttttcagggtcttggagggagcacacgcgtcgttcgtggagaaagttccttacaagtcaatggctgcgttcacactgttgcagatattctactttgggctgtgctatggggtgacgtggattccggtggctggaatcatgtttccggttcctttcttcctcttaatagctatcagacagtacattctcccgaagctctttaacccggcccatctccgagaactcgatgccgctgagtacgaggaaatccccggtactccgagaaacccgctggaactgtctttccgggttagtccatatcttagcaatatctacatttttgaggatcccggactttggactaaaccatggaggttttcttgtcatc

SEQ ID NO: 17442 - DNA, 1187 bp, Arabidopsis thaliana landsberg
gtccttcgtcatggcactccagaacgtggcccagacttggtattcttcccttcggccagggacaattacgtcgtggcagaagctcaaggacatgctggtgacaagtttccaaggctttcagacgaagccagtcatagctcaggccttgttccaatgcacgcaagaccatgaagaataccttcaggcatatatacgaaggttcttgcgattgagggcacaagcgcctacggtgcccaatgagattgtcattgaagccatgatcaaggggctcagaccaggaccaacagtgcaatattttgcaaggaagccaccacaaaccttggagaagcatctccagaaaatggacgagtacatcagagccgacaatgactttcagcaaagaagggaagaagcctacagatactctgagatgatcatgggctttagaggaaggctccaccttaggcatgtcaggacgatccataatcccagctcaagcgacaacaggggaaatcatacccaagggcaacaacacagctcccaatcatcaggggcacaacaaagttccttcaggccaccagctccaagaggtagagggaggagaagcttcggaggaagatatggtaattagcccaggagactgttctgcctattctgtggcgaagataagggacacacgacaaggacgtgccaagtcacgatccaaaagcataaggaaatcgctgaagccgaagctcgcagaatcagccgaagcaggtcttgcacactgcttcgtgccactctccttacatactagaatacgtgggcaatcaacctacagcctctgttgcttcggcaagccattcacaggcttcttcgcctcagcttccatcgccaccaccactgcagcccacttattcccgaagccagcagccagaagggcgtcaacactcccagcaacaacgtgacttcagagaggatccgaagctcgtacagtcaatagcactgtaccagaatcgaagcacatattttaagcgatatcctacctctgaaatgcttttgagttctatgtcattttgctttttaataaggaacatgtaatgtaaatttagttttaaattcttgtaatgattttgtttctactagaatgaaaatatcttcctcacagaattacgaagcccaaaaatcttcttcacaaaattgccgaagctacaaaagtcgttcttaag

SEQ ID NO: 17443 - DNA, 3071 bp, Arabidopsis thaliana landsberg
aatatgcacgccaattttaatcgatccgtttgggagacacgcggatcctgatttaaacaagatgggtctctattcagttgcttcagaacgcgttttaacatatttggcccattaacacttcattctctactcctaaagatcctaaaaagctcaatattttgcctccgaaaccaatatattcgctcaaggcaagtctgtttcttgaagatattctgcaaatcacaacaaaataggtatgattcctatattcgattgagatagtatatttagatatgatatagattacctaaaaatccgcaagtccaggaccaatcttaacgatcctgccaagctcaatattttgcctcatctccaagatatttactgcttcttgaagatattctgcaaatcgccaccaaataggtatgattcctatattcgattgagatagtatatttagttatgattgagattaccaaaaaatccggttgtgatttagggtttcatttctaattcctaaccgtataaatactcaatcaataacatcaattccgtcagcattacttttattcgcagcctatcacatagtcaacgagtttacctttagatttgacgtatctaagtgatgtctagcctttcaaaacaaattggcgtgtccgagtcaagatccttcatctgtggaggcaaaccaaagatgcatcaggagaatcgttaaatgtcatcatatgtgatgaaaatgtatgcttgagtgctattaattaaatatataaatctatatttattcaagaagcttgattgtaacatgttgtaatgtgttttttgatttggttttgatatagagatgtaagatgcaggtcacccttagaaagcattatattggcaagtttcagaggtcaataaaggttggtgattgcaagatcattgataccttcactttgagtccttcgactggcaagtacaagatatcgagtttgagctatcgaatgggctttaaccacaacacagatttgattacatgtgatcctgtatcagatagtgttttccttgattttgcagattttgaaggggttaagaccgagagttatgatgagaatgttcaaattggtacgtattttctaaattcccaatcattctttaactcaaacaaaccagagcacacagattttgcataatttaagagagtattttaataatgtaagacatattaggtcaagtggtcagtgtggggaaagtggatgagattgtggctcaaaacaaaccaaacaaaaaactagagtttcaaataagagatggcaggcaagtcttctcaattgttctacatattttgattcataataactatgttttcaaacaagtaatattgatatcgtttgttgctatattgaagcaatgagtgtttgtcttgtactttgtggggtgtgtttgctgagaaagtatttagtgctttaaaaagtgtaaagcatgacgagaagacagtggttctgatacgctatgctaaaatcaataattttaaaggtatccactcttcccttaactatgtctaaatttaacatattggatgtatatgtgcatgtcttagttaacatatattgtataattctgttaactaggtgaaattagtattacaagtgcttttgatgtttcagaagtgataatcaatccagttcatgttcctgaggttgagctgttcgtgaaatcgtatgtgcaaaatatattatgaccttctttgttctgtttaaatttacaaacatgttaactagacaaaagcttatttgcagactaccaagtgatggccttgctctcactattcaggataattatgtgaatcgtgacattattaagttaaatcatataatttttttgtttatcctgccaaaacaattgttgatttacttcatgggagagatgtaagtatattttcactaattcctaaatgatgtcacgtttagtttaagtacctataattgttattgtattgaaaatcaggttgggtaatggagaatacttggttctatttttgccattgataccgattggggatggttctattttggatgtcctaaatgtaacagaaaaactgagctggttaaagaatcaaccagcactgttaagaggatccaagcacctacgaaacctaagttctggtgtgataaatgtcaggagagcatcacaaatgtggaggcaaggtaagaattactcttttattttgtaaaagataaaaacaaattatggtttctagaagtccttgcagcaaataaacaggtttataagtgtatattaatttaatatgtacaatacattttactccacgtacaagcttcatgttcgtgtaatggaccagacagctgaaattaaactcatggtgtttgaaaataatacaaccaaatttattggaaaaacttttgaagagttactggatggacaatacaaagaggtattattttatatactgtcattcaattattagctatatgtctatggtagaatgaagagtactaatgtgagacatgtgtatagattgaagatcctacgatcatacctgatgtcatcaaaaatttgtgtggaaagacattccattttctggtcagtgttgagaaagccaatatttatggtggtaaagatatttacaaagttacaaaggtgcatttgagaacagacatagccaaagtagaatcaggtttgcttgaaaacactcattatgatccatcatcaattgggtttgaggatcaggtatgatcatattctccttaaaacaattcaaactgcttattaagtgtttgtattgataaaaaaactatacttctcaatttttattgtatagggtaaattgatgtagactaatagcagcgagaattgttctgatgctacaaacactgaactgtcttctccttcatctaagcgtggttcagctgagttgtctgatatggctgatcaatcgattaccactaagaagttatgctctagggttaagtcagaaaatggagatgatgagattggaaccaatgtgatactaaaaaatgctgataaggttaaagctatttcagatgatgttggatgtctactgatagaaggagttgttaaagagattgagt

SEQ ID NO: 17444 - DNA, 1333 bp, Arabidopsis thaliana landsberg
ggaaaaccattcagttgaatcttgtggtgttcaggtcctactggccctcataatacttgtattggacgtgggtggatatggggatgggaagaggaggccatcgatgtttactacaaaggtaaactgcctaagtggttgacaaaagatttgttggctgcagcaaggatgaatactatgtggtaatttttcgtacgtaatctggttttggaatagcatgcgatagttttccattgatgattcacaacatgttacacatcacaggtgcaagaatcagacattctagaaaatgagtggcttcatctgtatgctgagattgcattgtactccaactggaaatggcatgcggtatatgttcttttaccttcctttttttactctcgaaagacatgatgtttgcttcgacttctgtacactaaccaaatgcaatgtattttgtattatatgaagagctcgcttctaccattaaagatcaagtatgtaattgtacagactcgaaaaagctgtgaagagtcgccgcacctgaagctcaaggccaacaacgctatcttctacatgggtttcaagggcagtggtgatcatcatccgagtggtaagcatgtcgagtaccaagcaatagtacggaaaaccttggatggaaaaccgggacacattcgtctagaagttgactcttggcaagccataccaagcgatctaattggggaggatgaaccgttctagagtaaacctgaaccggaatgctcatcctctgctgctcaataaaaagttaccgtagggttgacttcaagtcctttgatgacgactatactgtgaatctgtgattacttgttctcaatgcaataactacaagtctcttcttcttcctctttttaaagcttgtcttctacttgtgattacttgttctgaatattctgatatcaatcaagacgagtatggaatcaccaagagctctaagaatatatatttttttatcatttttttccttggatttttgaagagtaagaaaacatatatgattttcatgagaagctgaagctgagagaataatatttagagttgtattatcgtgaattgttggtaacgatgatggaggctcctgggactagggttgggagatgggagttcacttccattgagagcaagtcggcgaggaggagtttctttgaaacaatgtgataggcggcggcgattttgtatgtgggagacggtgaggggtcttcctcatcgtctcccccctcatcgtctcccggtggatagtcacaacatcgtcaacgtagatattatgttaaaaaattcgacatcttatggtatttaatatgacgattaaaaagagaga

SEQ ID NO: 17445 - DNA, 2268 bp, Arabidopsis thaliana landsberg
  unsure (1)..(2268): unsure at all n locations
aaaaacccgagaacggcctcttcggccgaggcagcctggcgcaccggacactgtccgtgatccaccggacactgtccgtgcaccaccggacagtccggtgccccagaccgaaacagccccttggctgtacacagccaagtcttctcttctcttcttctttctgtttctaacacttagacaagatattagtacacaaaaccaatgtactaaggcttagaaacgtacctttacttgtgatttgcactttgttcaaccatgggcatattctcacttttaagcacttgtgtttgcactcaatcaccaaaatacttagaaatggcccaagggcacatttccctttcagaggacaacgcccgacatgtcccccgctgggtgccggcgtcgtcgactcgctctggaccgacagccgacgaggtgccgcctcctgcgtggccacggttgccccgtctcctcctcctgcggcgaggagggtggcggggcaaccctggatgcggctcttccgccacggggggaagacgtcatcgagttcgccgccgccgggcgagctaacgaccatcgttgttgctgtcgcgctgcggggggaggagtaccatgtcgtagctgccatcgagggacatgaactcgagactcccgaagcggagatgcgtcccaggnnnnnnnnnnnnnnnnngactacccatctggaactcaacgggaaggtgttcgttaacacgcagcagtcccctaacctggcgcgccaactgtcggcgtttcggacccgggggaccctcaaccgagccaaccagtaaatttgtcgctgcgtgcccctgcctagatgggttggcgcaagatggaacacaaggggaaaacgcggcttgtattatctcgcaccaggggtgtgctcgtagtaggggttacaagcgtcacgagagagagaacctgttcgttagctcgttcccccgcgcgaccccccccccaggaaggccctgtacctcccttttatagatgcaaggagagggtccagatgtacaatgaggggtatagctttgcgctaacgtgtctgacagaggagtgcctgagccctgtgtacatgccaacgtggctgtcggagaagtgcttgagccctgtgtacgtgataacgtggccgtcggagaagtacttgagccatgtagaagcacaactgtcgatgctgctgggatcctgctgacgtttctttgctttcgtagagagttgagaacaaccgacgtcatggacgcacgcagggaaccatcattacctgttaccggagtaatctagatgggacatcggtcttgttccttcatagcctgaggcagctagctaggggtagggtaatgatgtatcccctgtggtgtagtcggtccgaggccgaggtcgggtgaggtggagacttctcctgaggccgaggctgaggtcgggcgaggttgtgactcctctcgaggccgaggcccgaggtcggacgaggcggaggccttctcccgagccgaggcctggggtcgggcgaggcggagaccttctcccgaggtcgaggctgagccgaggcctgaggtcgggcgaggcggagctccctgttgcgcccgaggctgaactcgggggaggtcgtgactcagctttatcctggtggttggcatagcagtcggaacggggcgtacaacactgttttcccgtcagatcggtcagtaaaggggtgaagtgactgcggtcacttcgaccttgctgactgaggcacgcgtgtcaggataaggtgtcaggcgatccctgcattaaatgcgcatgcgatacggtcggttggtagggcgatccgaccgaggtcgctgcacgacaaagtccacccaagctgggcttcaggcgaaccgagggtgcgctcactgnctgaggagaccctcgggcgaggcgtgaatccgtctgggactactgttcccgcccgaggccaaggctgggctcggatgaggtcgcgtcccttggtagacgaggccctgacttgaaccgtgcttaccagctgtttatggtttgttttaaagatgttctccagccacgtttgggagtactgggggtacccctaactatggtacccgacaatagctttcggcaaccttcgatcagaagtcattaagctaagaaacgaagccttggagaaggacaaaattatactttcattggtgagtaaagtgaaggaggatgaagcgaaatacaacgctcaagccgaagctcataaagccgaggttgaagaccccccgaaaaccctcaccgaggctaatgagaatttaacat

SEQ ID NO: 17446 - DNA, 584 bp, Arabidopsis thaliana landsberg
gaaattactggatattatttcaataacttaaataatgagtaagaagggctaaagtattgcttgtagtctttgaaagctcagaaatagccttcttcaccttcttctttgtttccacatttactctcccttcctcgaatccgtccgtacacgtgccctcgtcggtcaaagccgagctcacccacgtcttcacgttctttaaatgctcctccgtagttttccctccgcctctgacatacttcatctcggcgaccgcttgcttaagctcgtcgatagtgtccttcatctcgtccacgcagtccttaaggatcgagacctcatggcttttcgcggctttggccttttggagaaggttagagacgactaatgtggcgtttttagcggatttgacgttgagatttagcgatgttgtgcatagtttgattgggtcggacttgatggtggaggaataggaggacagacaggtgtagcacattgtagggtatgttgttgaggtgcatgcccgttttactttcctttgttgtggatttggttcatgcctggtggggcggcctccttcttctggtaaattgaattgacactttttt

SEQ ID NO: 17447 - DNA, 793 bp, Arabidopsis thaliana landsberg
gtggaacctatggtatgagaagtagcaatccttgcggagcctcggcaagatgactaaagctggagtgtctgcgggcgcgctacaatgagcggaatcctacttgcaatgcctctatcttgtattgatgtctacaaagcagacttatctatcggtattacggagtcggaatcacaggtgtgtgtagttgtatagatcaggagttgaagatcgttcataccgatgagctttaaaatcaatcaagagcttgagaaattctttaaattttgtaggttcatcaagaaatgtctttttcacagaattgagatatgaaaccgaatcatccatacgttagctgccgtggtactcttcttacagccatggtctgaacttggtctaaaccctttggtatccttaattagaaagagaaattttgttcattaaaacatagaattttgatcatcactgaatctctctagtatctcaaagctattaccactttagggtctttcaagaaatagaacctagagtgcataaaaaacttacaaatcgcatttaatagcaactcagaagatattacgacaccgatgaatttgctcttccaaagtcaacaaaaaaaaaaagaacattcaccaataaagagcttgccagaggattaagtcagatacgttttggagtttagttttacatttgaggggtcaagttgatcaaactttcatcattcggatttaataatcagcaggtaaattttgtagcagatacaaaattgtattcaaaaatccaattcaaacttatgtcagcaactacaaaaggaatt

SEQ ID NO: 17448 - DNA, 1358 bp, Arabidopsis thaliana landsberg
attgatagagcattcaagaacatgaaagttctctattacatgtatatttctgttttgttctattttggtgctcattcctagtaaaaaggtaaagatttgtttgatcttgattaggaggcatagatgtcaattttaatgtgtgtgtatataatcacatcaaatctaagtatccaaaaagggtcacccccattttatcttatgttgaaagagttttgttatagctcggtgtaagtatggtagattgacgctgcttcgacagtttatgtatcttccaatgttatcttgttcagttgtttgtattaacttccattagagaagaatgtgatgccattacagacataaaagaaacagagaaacccggaaacagagtaaaaccacgaaaaacagagtcggtttaagagaaccaaaccaaaataaccggtacagctataaaaagccaagaagaaaaattatgaaccgagtccaaattaggttacggttagcttccaatcccaacttcttcttcttcttcatctgtgtttagtcccaaattgaagaatcaaaagtttcgtgttttgagaatttgacaaaaatttgtttatgtaatcttagttttcgctgattttgagtaagttatcgacatggatattgatgtcggaccagttgatccatctgtcctatacgagcaagacctccatgtttcttctgctgtttgggaaggacaggtttttttcttaattcccttgctaaatttcagattttgaatttagggttaatcttatttccccttacttaccttaggaacgaggtctacttcgttgtcaagaacacacttcattgctacatcaatggaaactcactgatgaacaaattaacctcgtggacaaagctggtttcggttactttcgcaaaatcggtccaatgagtttaaacaattcactgatctctgcacttgttgagcgatggagaagagaaaccaatacttttcatcttcctttaggagaaatgactataaccttagacgaagttgctttagtacttggacttgagattgatggagatcccattgttggttctaaagttggtgatgaggttgctatggatatgtgtggtagacttttagggaagttaccatctgctgctaataaagaagttaattgttctagggttaagcttaattggcttaaaagaactttctctgagtgtcctgaagatgcttctttcgatgttgttaaatgtcatactcgagcttatcttttgtatcttattggtagtaccatttttgctactactgatggtgataaagtctctgttaagtatttgcctttgtttgaggattttgatcaagctgggagatatgcttggggagctgctgcgtt

SEQ ID NO: 17449 - DNA, 1887 bp, Arabidopsis thaliana landsberg
acttatttaattcattaattcaataatttaaatgattatattgttttacccaaaccatttgctaaatgaagtagaggccattagaatctaaatttatataaatatagattggtttgatttggtttaaccaacttgacatccgtaaatataacacccacaaaaaaaaaaaacttataacacattagtcagacaacataaaaaaaccttataactcatcttcttcttataactcatcttcttcttataactcatcatcttcttcttcttttgttgaagagtaaattcaccaagagagcccacatggagatagagaagatgattgttgggtctgcggtttgtgatagatggagatttagggtttaaatttgttttaacacataaaacgacgtcgtttttgtccttgcaataaacgacgtcgttttgtctctgcaataaacgacgtcgttttgtctctgcaataaacgacgtcgttttgtctctgcaataaacgacgtcgttttgtctctgcaataaacgacgtcgtcgtaaaaaataaaattgttaacctatttaacgacatgactcaaatggcaagtcaacaaaaactttatttattatttagaaagtcataaaaaactttacgatttatttgtttcagtgaagttgaagattaaatcgtcccaaatttaaaagtttataaattttttaatatttttgcccttaaaaacactttaacattttttctgaagatatacaaatatatatggcgccaagtcatagtattattgactatagaaacccacacgattataagacgaaatataaatttaatggataaattggatgtacaaagagatatataacataatatgaataaaagaaagaaaagagaacgagtttcacaacatgtacaaaaatcataagaatgtcacaggagtggacatagagcggatatcatgaatttgtgtgatttttgattagtttcctctgttcgatcggccatttgtttttatccatacccgttctgtaacgacttatgtcaaaagatagatattttgaccgatattgattacttcagattttgtttttttcaccagttacgtgataagatttttaaaataattaatatatagcaaatttcaaaattcaacaaacaaaaaagcactattgatatattttaggattaatgtgatgaatacaaattcataaaaatttaaacctagatataataatctatacagtttaaatatatataattatatgtatacatatatctacgcatatatatgggagtggttcatatattttgctcttcagattttagtattatgatttgcctcattttaataggtattaagtttgaatctttgtccaaaaaaaaaaagtttgaatctatgttttggtctgtaaaattatggatatttatattttctgcatcaaatcgaaattgtaacaaaccaaaatatataggtcataaattttgtgatgccctagaatgtggatcaatcgaccaagtgttgacactggaagtgaccaaaatatgagcgtacatgagatgggacacgagtaggacggtacttgttgtcaagccacacagccgttccttttgcctccaaaataggctgctttgtcaattatataccaaaaggatcctaattaatcaaaactatacacaagcagaaaaccaacacaaaaggcttgatggagcaactaaatatacctcttgatttggaagtttaaagatgaactgttcaaagtaaatgcgcaccaaagatgtccccgatatcctcgttttcaccacaaacctacatccactctgctaaaagatatcaacataaatataaacattaactctataaaagagaacaaatattcttggaaaagagagtaagaatattacacgtaaag

SEQ ID NO: 17450 - DNA, 855 bp, Arabidopsis thaliana landsberg
tcaagagtgcaccacactaacctgaggatctgtacggagtatggtttgcagaagaaacaggtaatcaggtgtgtacccaacctgaagtcacaatatgaaacaatggtaattcatgagacaacagaactttagggtaaaaataatagaagaggttatactatagatcttattgcttacctgctttgagtaaatcagtattttgtcaaactcccttctttctgcaaaagctgctacaacttttggagtcgcccgagctttgatgtatattttcagagcgagatcattatccacagtctggaacagaaaggtttatcgtcacaacacaccataggagacatatcacacattttgaataaaatcatccatttcaagattaccttcacaaggtctccaagttcttcactgcattctagtttatcctctgccaaccagttttccaggaggttcttcttgttttggttcacaaccagccgagatagttccagtgactcatatgaattgagtttccctctagtcaaaagagtcccaaaatactgtaacaatggaggagtttgtccagcttgtacaggaacactctgcaaaattatagagttgaaaaattggtgttaccaacatttcatcataaataaacatgtttacacatagttgcttggatatgaaatagacacctggaatttggccactgtatcaggtgtccttagaattccttgaggagattcagcagcaagctcagcagcctccttgtactttgtttgagcgaacaactcctggaaccgctggacaacataaaacatccgagcagaatatgagaaacttcacaataccaaatgacattttttttcttcaagcagccat

SEQ ID NO: 17451 - DNA, 1855 bp, Arabidopsis thaliana landsberg
actgaatctgtctccctttgatctgtatcctccaaatcacaagtagctatcattttccggatatctctgaaagtccagtctcccttggtgtcctcctattttttcagaattgataatatctcattaaaatcacctattaaaatccatgcgtcattgcgtgttattgatagattttcaaagtgagtccatagatgatgtctttcactttaacaagggtgaccatccacacaagataaatataatttggtattattgatagagagagatacatcaataagtcgttcatcctgagaaatcttggataaactgacattatctttccacaacaaggccaagccaccactatgaccttgagggggctgagttattacattatgaaatcctaatacactagctatactactaatcaaatcactcttgtttagcgtttcaatgaggaataaaacatcaaacttcaataatttacatagcttattaaggtgagattgagtcaacggtgcaccaaggccctgatagttccaggagccgactctcatggaggctgtgggggtaccaggccccccgcgcctccgtccgtcaaaattgggaaagaaccagatgtagcaaagccaaccttcttgtccttcttgcgtaaatgtcctagaaccgctgattcttctgcagcctatgcctgattgtacagagtctcgaaactgaccctcttccttttgacaaaagcaaactcatgtgttgcattgtcagacacctctacaagtagacttgtttctttttgttgcagtagaggctcccgcaggtgtttcgcgtgaaggtacctgagacactctgttgtcaactctgtgtcttcaaagacactcgccaaatcaaaaggcacagaatctgaagatgatcctttgttgtaaacgggtgtagattgcctctgtaatcccgagatcaaactagccatgtcagcgcttggcaatcaattctcatcagacatctcttgttcatcatggtgatcattgtcctgattgtccccatcatgatctccctcttcattagcagcgttgtcattctcaaaagttaactcacactctttcacgtcatgcttaagagatccacacttagtgcaaaaattccttaacctctcaaatctgtatttgatgatggtgttctcatttgcattgaactgaaagttcctttggaagcgaagtgggttatcaaaattccaacccaatctaacccttaagaaacccatctaattgctgttctcatcaaaatcaacatccaaaacatatcccagtcgattccctacagccctagccattgcattagtcaagtagagaagatgaataccttggatttgtacccaaaaaggaattatcttcatctcgttttcagtgatgtttggataccagcgatgaacagacaacatccagtcattgaaggaccatggaccccttcgcaaaaccagattcatggattccttagaatggaagttaaattgaactttcccaggaccaataatccgaccaacacaagagtctgcaaaacccccaaactcttggcatctgtccgattagagccctcaaattctgcttccttggattcactgttgtaacgatcaatgagaaaaggataacaacagccgcttgtgaatcgaaatccggtgaaagcgcaattgggtcatcatcaattccaaaatcaaggtcctgaacagcctttcgcagaaaaccactcatggtttttgttgtgtttagaacagaaaggtaaattaatgaaaggagaagagaaatccactggtcagaaagacgtatatataaagatccatggcggtttcaatgacggtttctccaaaagttggaaaacaacaactccc

SEQ ID NO: 17452 - DNA, 553 bp, Arabidopsis thaliana landsberg
aactcctgaaacgttaaacccaactttgtcatgtaaacccaaaaagaaaaaaaagagtgttatagtagaacataattagtttaaaacataaaccatactgaacaaccaagacggactcaatattttccttgtccctgtacaaattttcaaatttggccctttttatactaaatattttgagtttggtccttaaatttagtaaacattttactttggccctcagatttagcgaagattatctttttagccctcatatttaataattttttttattttacccattaattttgatcaaaacttttttggaccctatgcaattgctcctcttgcactaccccaacgccgcccctgagaacaacattagttgttacctcttgtaatcaaatattttttacatcaaactgtaccaatcgagtatacgccaaataataactttgaccaagatttccagtcatagttaaaaataaaaaacgatagagcttgagtttacggaaagttttaaagagtagtgagtggaagaaaacgggtagtatacttaaatatttattggaaa

SEQ ID NO: 17453 - DNA, 1135 bp, Arabidopsis thaliana landsberg
attggtactcaattaagtctatttatttttctttttctattagtcatccttagtaaaactaaattattctatttaacttcattttttggtttaaatattaaaatcacgtttttccgctacaaccgtaaaccaacattttcccgacaaaaccgtaaaaccacgttttcccgctaaaatcacaaaaagtgttttcttgccaaaatcacacaaaaagtattttctgccaaaattaaaaatcacgttttcccgcaacaactgtaagccaacgttttcccaccaaaaccgtaaaataatattttgtacacataaattaattgactttaaaaaaattaatacatgctaattttttcttcaaataaatataaatacatgctaatttatttgaccaataacacatataaaaacaaatttgttaatttttcttttagttcagaaaaaaagttaaaaacatttgagatatagacatataaatttttttttttgttagttttattttatttctttaagatttatataataagatttacaatccttaaacattcataactcatggatgcccaataccaggactatttcctggattagtaggcgcaaaatcatttgtaaatttgttgtttacaactcttagatgcccaataccaggactatgtcctggattaataggcgcaaaatcttttgtaaatctattgtttagattatttttgttgtcaattttctttaacatttttgcttccacgaaatcttcattagcattgaaatgctcatgacggtccatcttcctcaaatttcttgcttcagtggtgacaagtgttttgtcaaatacctttgagatggttaaactggtcaccacaatgataataaatagcttcatgtttcttttttctgaattagataaaacaattatgttttggtatatgattagtattgaatgttgagtaaggtttgtccgactaaaactatatttacagtgtctattcaaattattaaaattataattattaaagttttaaattcagtatatataccgtataactgttgtatcatatctttcaattttccaaaatcctcaaaaaataaataaatatatatatgtataacacctaaaaatatgggcttagatatataaacatgtgaa

SEQ ID NO: 17454 - DNA, 4527 bp, Arabidopsis thaliana landsberg
aaatgcaacaatggtggattctttgccatttgcagctatgatccgtctgtcattcttagtgagcgacctttttgaattatatacacaaatgaaattgtccatagaggacatatgaatctatttcagtattttctgttcaataaatatcatcatctatatatggtgattcatttgtcatatgtaaaatatatacgtttgtgatggaatggagtgatacaaagatatttgtttgttttcaatataaggtatagtttctgaaaagttttaagtattgaaagtttgatatacgatcaaattagattttatgaaccagtggtagtaattatatcttgggagataaatgatccttgagattgagaagagttatttcaacggtttaagataaataggttaaagatattgtcataaacaaacttctcaactgtttcatattcatccaaaaatatagatggtggtccaacgactgatgtacaaagatatatatttctaatgaaccaagatacaaagaagagagtctaaaaatgtaacagtcaatctccaaaccttggtaattatagtaccagtttagcctgtttaggcaacattacttagaatattccttgtaatagtttttttttttttcctggaataccaggaggatctgggcctaagcccgtaatggcgtaatcccgcaggctctaaaccacagcatgtaatattagtttcgtctcaagcgtcatttgaaccggcgacttctaagctttgcctagggtctttaccaattgagctaacgacacttgatattcgttgtaatattttacaaccttaccattgattaattcaactcttgctataaaatatttaactaaaaaagaagaataaagactagagagagtaaagaccaaacaagagttctattattgctttattcttctcttacattttgacaatgaatcaaacgaacatatatatacaagagtttacttagtgaaaaagtaatatattcaacgaagaagtaataaacttagcgaggaagtaataaatttagggaggaagtaataacatgatgagcattatccatatcttatacacttccatacttatcattttacaaaaattctcacttatttatttattatatttattaatttatattattagctttcttcggctgatacaagatgtttttcttcgcaattgaccattgttatatgctcatagataaagctttatttctttagagacggaatctcctcgcaatcacccttatcttggtttctcgtgattttttggttctcattctaaccgatttgctttggaattatatatattacaagaaaaactgcattttggaactcttttattgtgaccaattttataatcgcaatatgtgcaactactttgtaactttttaacgacatattaccgatcttcgtcaaatcggttggaaagtagtcgctatctagcgacggacataaatcgtcggaaaggagttgtactttagcaactactatgcgacatagttgcgacaaatctattttagtcgcaaattaatcacaatatgaaactaatttgtgactcggatttcagtccaaaatagggtttcaaattagtctaaaattagcaacttatttgcatctacggtttttggtcacactatcaataattataaattactagaaaaaataaatgtctacaatctatgtgtatagatatcgttgtattcgtagtatctcgtagattgattacattggcaattttgtaacatacttcgcattaggtttgaaaggccggaggtttgaagtccaacaaagatagttttcctttttttttcttggtgtcacaaaagagtcgcaatttgtcaccgtttggaaactaataccttaatggattgcgactaagacctgcttttcctactacattgagactaattaccaactctcgattttgatgtttggaaaattcacatttgagatttgattacatgtttagtttaacgtttgtagtcatatttgatagaacgtagatataaaaacttgaccaaactaataaattccattgattacaaaactaaacattcataacatcaaaatctattttaagtattacatgttcttatatgggaatggttagaaattttgaaaaaattataaattttgttaggaaatcaatgttttacaaactaacactgatacatgtacttctttttactaatatgaatgctttggagtgatttatatcaacattttggatgataatatatagatttttcaatttttttttgtgactaatctaaagcagtcataaaactgtcgcattctgtgtctcttatgtaacgtttttgcgactatggtattttgtaacgattttactacaatctcgcgtctaatttactaccaagtttgtgaccatgttcctaccaaaatagcgactattttgttactatatcatttagcgaccacttggagacgaaaattactactatttgccaactaatttagagactattttgccacattttattaaatttgtgaaatttatctcgggtaaatgtttgggcggttaagattcccgcctccccattatttagattcaaactattttgtgaccattttagggactgttatacgttaactatgccaaacccttaatcattttctcattttcccaattcttatctcgatctagggttttctatcctaaacatttcaaactgaagcttctcaatctctcatattctctgtctcaaatctctcattctccaaatcttcctatactttctcgatctaatgtttccgggtaacggtaaagcttcgagaggtcgtggaggcaaattggcttccggagtcagatccttcgttgtcataaaccaccaggatcttcacactcatcgaacccttccgtgacacagtccgtgacctattcacaacatagtcgtccttcacagtatccgtcggcgagaaagtctcctccttctcagtctcagccaccatcaccaccgccgcctcctcagcctctaccgcaacatattccgaatccccagtttgaacaacccaaacaagtccttgaagaggaagaggaaaatgaagacgaagatagaaacatgattcctaatccccaataacaaaacccttatccagttgtggactatgacaaattgttggatcgtatgctagcccttccaggccgacaaattctacctcttctctctcaaaacccaatccttggcattgaaactctatgttataaactctctctctctcttttgattaccatcttccaattgacaatcgcttgaatctatgttgtttgatagtttttatctttcaatcgcttgaatgtggtgaattggtcttagagctgtgagattaaacttctcgaattaggacaaaagaactgtgtgatttgatgatgtgagttgttgtttttgaagcttttagactatcctttttattcacgataaacgaattgtttggtgagacttataagaattactacaagaaaacaagtcatttgagactctcaaaaacgtctcaaaacggtcacaaacacctactttgcgtctcttttacgactattatagatggtcgccaaaaatggtcgcaaaataaatgagtttcaaaatagtcacaaatttacaacggttttgtgactttataatatggtggtattataaagactaaattgtgacctcaattatagtcgtagattagggacactttagcgacaaattacaaaaaataaaaaacaaattaaatttctataaatatcaaattgaagttaattataataattttatttatcatatatatatatatatatatatatatttgtgacctaaattttttaaattaaaaaatatatatgaatattaataaaccatccaaacaagatatggttaagtgttacaaaagtgaaccggttacagaatgccggttaaaccgaatactaaaattaacaaacaaaaaatcttaaccacgcaacatgatcatctcttgtgtcccttttgtgggacaactaatgtgcaaaaccactttagagtcatcatatcccctttgagttaatgaattatgttaagacgaatttacccttgtaatttattttgaataaataattaatatttctaaacattttgaaaaaaaaaaacggaaaaagaaaaaaaaaattcaaacacgagctcgagctttcgacttcttcttcggcgagccgcattggttgtcgtttttctcctcctgtaagctgcatcaatctactaagtccaggtatggagagaggttcaaaagcttttagttacatattttgaggattttgagattcaatccaattagatttgggttattgtgttttagcacctacattagaagtttaagtatagatttaggcttcatttggtctgttaatgggtaagcaattgatttcacatgctgattcatactaaattgaactcaaatcgaatatttgttcgtgtcgcgaaaataatactggtcgaactagctatagtagtaccgtcatttagatagatagtgtgttttaatagcaccagtatta

SEQ ID NO: 17455 - DNA, 2590 bp, Arabidopsis thaliana landsberg
  unsure (1)..(2590): unsure at all n locations
tgtacccacccatttattgttacattcattcatgtggctcttcagcataactgcaagatactagaggccacaaattgcagtaatttgtattttggagttaatacctatgatttaggacactaattatctcgagcatttgatcagccaatctaaaaggttgtcaaaccaaaataatagaagtgtcgaaatcaaaatcagaccaaaaccatcaacttttttgcaataacaagaagaattcaaaatttgctggacctggaccagtctaatctttatgtcatatcattagctcttgtcgtcaccatatattataaatcattttgttggtaaataaatgaaaaaaacaacttttcgacctttctccatcaaagaccttttacaaaattccaaacccaaaactttaggttaaattcctcgctccagccagtatgtaattacgtaagcaactatcaattaaatatacaactcaattcacaatcatgaagataactcgaatacaacgtgttttagtatcatttatatttcgtaaggaaaataagcttaccgtttattgctcagactgtaacgtcacgtgcccacatgtttgaccttacactccatcacaatctgcatttcgaagaatccgataagattggaaatgatttatataatcgaaccacattgtggaacattcaagaggaatccacattagacaatctaataaactgtttaatattttgaaaagaaagattttacatgcaaacggaaaacaaagatctccgcgtctcaagttatttgaaatctcattttgcatatggtcggttattaccgttgacttttaactttatcgtccatcccaatgaaacaacacttgaaatatgtaaaaaaaaatagcaaaattgacccaaaaaaaagaaggacttaacggatcagtgattattttcttcgaggcaaaacaattacatgcaaatggaaactaaagccaattcacacgcataaaagtcacaatttttaccttataatattcctacaacttanaataacataaaaaaaatgtctttatcaaacatcactaaagaaaaagaaatctctctatagtctttatcttagtattgaatttgtccatcttccttatgatccattatgcccaaagtccttcttcttcttctctataatgacttgcacaaatagatgaagaagaagaagaataatatagaaaaaaagagagcttctcttcttatttctttctcacaggaaatggtgtttggttggagaaaagcgttttgcacttccgtttcaagtaatcaagataaacctcaacaacattcatcattacacactactgatcctccaattcccacaccaagattccgatcaaagtttggttttttatccaacccttcaactcctcgtctccgatcacgcggcggaagcggcactggatgccgctcctcagcttccacatcagtcactatcccatctcttccaactagtcccaaactccattgcaggactacgagcaatgctactccaaggactagtaacagctcaagtcccaagtttttctctaacccttcttctcctaaatcatcatcttcttcttcctctcaaggcggcggcggcgtctctctcctccgtgccacgcttcttctcaacaaggtagttacttttgattcaatcaagttcttaatttgaaagacataatctaaagctccgttttgtgtgtgtgtggatgcagagtaatagtagtagatgtgggatttgtttgcagagagtgaattcaaatcaaagcaactcgacggcggcaattttcacggcggagtgttcacattcgtttcacctttcttgcgtcaatggattagaagacaagcgttgtccgttttgctctgccgcatggaatcacgcgccaaagtcgaattatccggctgttaataataacttcggatccgacccgattagacgacccgagatccgagagatcaaaacggggaagtcactgagagtgtacaacgacgatgagccgttagcttattcgccggtttctcttgctcagatcaacactatacatgaatcagacgaaaacgacgacgttgaagatgacgatgacttccccggattcttccgagattcttcgattacgtctgatatggttccttcaatctcagggaatctggaggttaagttgctgccggaatctgccgttgtggaaaccgggaaaaagaaggagacacacgtcgtcatcatgaaactaaaagcgtctccgtcgccgtcgtccatcaccgatgcgattaaggcgcgaagaccatcgatagatctggtaacggttctcgatttaagcaacggcggtgctaatttgcaaacggttaaacacgcgatgagatcggtgatctctcttctccgagaaatggatcgtttatcgatcgtcgttttctcgacggggtcaaannnnnnnnnnnnnnnnnnnnnnnnnnnggcgaaaggaagacgatcggcgcggcgaatggtcgacgcactcggcggaatggaaaccaccggcggagttggaatgagcgttaacgacgcgttgaccaaagcggttaaagtcgttgaagatcggcgggaaaagaatccgtca

SEQ ID NO: 17456 - DNA, 1608 bp, Arabidopsis thaliana landsberg
tctttttttacacgctccatccgtattgagaaggagacacatggaattggtggccacataagacacccacgtaatgtcacgtgataataacgtcataactatgttattgtgaacaaataaacccaccacacatttcttctctaaaatcaaaactccaaatataaagaagaaagcaatgtgatttatgatatttacgtcttcgtcggagatgtcacgttggagccaagatggaatttgcagtatgatttcttcttccaaaccccaattcaaaaactctgttattgactggcacatctttttttcatcctctttttgatttctctcgtaactcacatgcagaactgctcacatggaaatcttctcttatcaatctccaatgacgaaaaggtacaagaatttttgatttctcaagcaatttaacttcaattatctctttgtcttcttcgtaagaatcatcataacaatgagttttctcattagagatataagaaaccagagtaccatagagcttgttgcagagatcaaccttaccgtcaaaaaccaaaatctcacttcgaccacgatctggaggttcgtcattgacattccattgacgatttgcaagagaaatagaataattgtatttttccttgtacataaatgaaacttcctccttctcgtcaagattgttgatgactagttcatggttaatatgtgattccacttcttgattcccgatgaaatatgcgtctttgacgtcttcatcacaccagagcaaagacattggaaacgaaatctatgggtttgatattatcaatcggcatgttaactttgacatcatatattaaatccccattggagagggactccgatgtagataaattaatatcaagctttttggcatcaaagtcactatcttcctcttgaatttgatcatgttcatcaggatctgcaacatcagcgtcatcgtccgtgtcgttggggtttattaaaccatcgtcgccttcaacatcgacaacactgtcactgacttccttgacatcgaagagtggttctatagtagataatttatcaccatatatatcattgacggctacctcaagaaagtgctttatgtagatagataactcatcctcattaataccatggacggacttagcaacaaagtccttgtcttgaacgtgaccatctgatcataagcaggcttctccacgaagttgttgacttgaacgtgacaattcttcgtgaaatcatccccaaatcgggctctttgttttaattcttcaaacgattagacaccaaactcgtataatgaggaggtgaaaaagttttgcatagcttctccttaagtttatcccatgatttaataggattcttgccttgtttgttttctgtacttgttgccaccatgatgcggcttgccctcgaaattacttaactacaagcgaaacaaatagatcattcgaaacgttttgaaactcccaaatttcttcaatctccacaagccaatctagtaacgaatcactagagattccaccatggaggttgggaatacgacacttataaatggtctccaattcatgtttttttaaagacatctgtgaaagagaatcaaccccgatgaacgag

SEQ ID NO: 17457 - DNA, 1034 bp, Arabidopsis thaliana landsberg
caatggatcatggcggagatcattacccatcccaagattcttgagaggttaagagaagaaatcgattttgttgtagggaaaacaaggttgattcaagaaactgacctaccgaacctcctttacttgcaagcgataatcaaagaagggctaagattgcatccaccggggccactcttaccaagaacggtccaagaaaggtgtgaaattaaagggttccacataccagagaagactatacttgttgtcaattcttatgctataatgagagatcctgatttttgggaagatcctgacgagtttaagccagagagatttttatctatttcaagatcagggcaagaggacgagataagagataaattcctaaaatacattccttttgccagcggcagaagaggttgtccaggaacaaatctagcttatgcttctgtaggaaccgcggttggagtaatggtgcagtgctttgattggaaaattgaaggagagaaagtcaacatgaatgaggctgctggaacaatggtattgaccatggctcaccctcttaagtgcactcctgttcctcgaaccctaaacacttaaacttcgtagttcttgacttggggatgtcagcttgctttctcttgtttttcttagttaaactcatcaagattgattatacatgttttcctggtttattgaataaaggccttccttttgagttaaacgggtatattgctacatgcagcattgtaaaaattttgtacgcttcaaaattttaaaactagacgggatttgttatggcgaagttttaacaatttgatttatcagacaatatattttacccgttaaggtaggtctgatgccataaaattcttctttagcacttcttctattatctctgaacctaagactacatttcttcaaccctagtttgcagcttggtatgtcgaagcttctgtatctccttttcatctggttgtcaaaaatcatagttaggtataggtttaaatgtagatttttgcatttgtggaatatactgatttacgcgaacaaaa

SEQ ID NO: 17458 - DNA, 1865 bp, Arabidopsis thaliana landsberg
gattcctttacgattgtattgtgaaatcattccacacgctgcgattcggccatgtgtcctcatgttttggagcactgcatctaacattttgcctcccacgttctcaaagtatatgtctattccttttgggaaacacctgattgatccacaaaacaaaaacaccatattttcttacaaaacccaacttattgcaatcgaaatgctaaataatttcatttttaaaaattttaaaacaatatttatatattagatagtctaacgttaatattgattaatccaaaaaaaacaaactcacatccaaacttagtcttgaacatgtaaagatgtatttattcactgacctctttagggcagcactaagatcctgttcttccttataattgaaagcgtcatcatacccaaacttagtcttgagaagatcaacctataaaatcaagtggacatatatatcacactctcttgctagaaaacctaaatcgaaatgtgaactgtattactcttaaacaagtgatatatagagaccttctctttactgctagcgcttccaacgacatagcatcccaccatcttctcaaactgtcccacgagttgacctactgcgccagatgcagctgatacaaaaacagtctctcctttcttcggagaacatatctcgtaaaacccaacatacgcagtgagacccggaataccttataaaaacaaaacatatagtaatgaaaaaaaaaaaacattcatttactaagttttgataacatcaccaagattagcattttagagaaagcataccaagaattccagtgtagaaagataatggaacatcggtgtgatgaatcttgaaatgtgaagaaggagttggagaaataacacaatactcttcccaaccaacccttccccaaagtaaatctcctgttttgtaatttggatgacatgaatgtattgctttagccactccaaacccagagattggctacaacacacacaacacaatgaaataatcatactgaaaaactttcactagagaatcggatattttaccttgccgatagtgaaagcatgagccattgaagttggggatgagggatcaggcttccccatgcgaatgcggctatgaggatcgcaagataagtagagattcttgactagaaccgccatggatccaggaggtacacgtaagtcaacggtggctgcggcgatgtagaggtcggattctttagggaatccactcacgtagtcacggagaatcacctgattgttagtcgccgtagtcgctatgcagatgttcgccattcttttccgattcaatattttttagtgaagatgaggttgattatttataatcgatctgcttcttttagttaccgttagaaaagattggtaaacaaaaaagaaacagaaaatatcatttttggtttttccttgcgtttttacctttgtgacgtaaaataccaaagcagaggaatcacgtgctacgttagggctgggaaaaagaactgcaaccgagtatccgaaaaattggatttggtatcgaatccaaaattttagattttaccatattggattttaaaattttcgactcaaaaaattgaatccgaattcgactcagacatgaaaatactcgaaaattttattcgaatatccaaattttactcgaaatccaaaaaaaatatttgaaaatacggatatttacaaaaaaaaacgagtatttacccaaaaatttgggtatcgattctgaaaaatacctagaaatctatacccaaatctgattggactaaactaaaaatcaatcgctaatttagatttacccatgatcataaacttatctatccaaaaaacccatacccgatcggattttatccaaatccggc

SEQ ID NO: 17459 - DNA, 1782 bp, Arabidopsis thaliana landsberg
ttgatgatttctctcgttatatgtggacaattcttctcaaggaaaaagcagatgcatttcagaaattctgcaatttcaaaagtctggttgaaaaagaatcaagtactagagtgcaaacattcagaacagacagaggaggagaatttgtgtcacatgaatttaactcattctgtgagaaatcaggtattacaaggcatcttacagctccttatactccacagcaaaatggagtagttgaaagaagaaataggactatgatggaaatgactaggagtatcttgaagcatatgcatctacctaactatctatggggagaagctatcagacacactacttatcttctcaatagaatcataacaaggtcactcaaggacaagactccttatgaatgctttcgagataggagaccaacagttgaacacattagaatctttgggtgcattgcatatgcaaagatagacaaacagcaactgagaaagctagacgacagatcaagggtacttattcacttaggaacagaacctggatctaaagcatatcgactgtttgatccgcaaacacaaaaggtagtagttagtagagatgtggtctttgatgaaggaaaaggttgggattggaagtacagtaacacaggaaaggatggggatggaagttttgatataacattccataactttggaaatcatggacttcaagattatgaagaaatcagtcaatcagaacatgctaacatagaacagaataagcagaatcatgatgagacagaagaaatagagcatgaggtagagaatgaaacagaatatgaagcagaagaagaagaggaacatgaaactgcagaaaatactgcagagaacactaactctccaagtcctgtgttaagaagaacacaaagacagatcaataaacctaaatatcttaaagattatgttctaatggctaagaagaaggagaattcttgttactaactctaaatgatgaaccaagaaactatgatgaagcaaggggacataagaagtgggtgcaggcatgtgaagaagaaataaactccatcgaaaagctaaaacgtgggaactagttgagctaccaattggcgccaaaccaataggccttaaatgggtttttaaactcaaaaggaattcagatggaagtattaacaaacataaagctcgacttgttgccatagggtatgtacaacaatatggagttgactttgaagaagtctttgccccagtagcacgaattgaaactatcagacttcttattgaccttgctgcatcacacggatgggagattcatcacttagatgtcaaaacagcctttttgcatggtgaactcaaagaaacagtttatgtctgtcagctagagggattcgagaaacagggaagagaagagaaagtgtatagactcaacaaagccttgtatggactgagacaagcaccaagggcatggaataacaaactgaataatatcctcatggaacttggatataacaagtgttcaaaggagccatctgtgtatcgaaaacaggttagcaaccatgttatgatagtagctgtatacgttgatgatttattcgtcacaggaacaagcttggaactcattctcaaattcaagaaagaaatgtcatccaaatttgagatgagtgaccttggtctactatcatactatctcggtatagaagtgattcaacacagtaagggcataactttgaatcaaagtcgttatgcaatcaagattctggaagaaactggaatgaaagactttaacttagtccatacacca

SEQ ID NO: 17460 - DNA, 1346 bp, Arabidopsis thaliana landsberg
  unsure (1)..(1346): unsure at all n locations
atcgggaacaagcgagaaacatgaacgagagtaagcttgacgcggtccacaatcaacttgtggaggatgtcgattatgttcggagcagaggttttccgaatcagagatttcatcaccaagaaggctacacaggttcctatgggaatggtccaactagctacactcaaaattctcagttccagcaaccgctacagaatagcaatagtttcagcttcacaagaaactataatcttgcttcttaccaagcccccccccccccttctacccagacctaagagcaagatagaatcattgctggaacagattctggaaggtcaacaaaggatcttaaagagacctatccctagatggaatgagaggagcctcactatttcttggcacgctgcttcaatggaaagtgagtatgagttagtgaggattttgcagttgcataggcagtgttgaacgacaccaacccttggtgtcgatcgacaccatcgcatatatacgagacatcgggttgtgacgaagcaaaatcgaccaagctcgacattgatctccaaaatcgctcgacacacattgatagtgtcgaccgacaccacttcggtgtcgatcgacaccagtaccaacctgaggaagtgtcgacgtttgacggagcagaatcgaccgagattgacagagcaggatcgatactagatagtagtgtcgaccgacactcacctagtatcgatcgacactggatgcagtttgcagcgctgaattgtcaacatgctaaggaaagtcgagttgtagcacatgtgtcgatcgacacaaccactcgcgtcgatcgacacacatctctagttgaggaagagtcatctccgatagctacttttcaagttgggatcactgctattcgtccaagcactactgtcacgtcacacaatgcacctcttatacttcatccacctcctaaacggctaaggtacttatctnctcctcctaaacctctagatttcatcaataagactttaaaatctccaaaaacagttttacggttaagcaagccacaagtttctcgtcgagcgcttgttctttcttttgatgattgtgcaggaaagcggagtataccagccatacctttgtcctgccctacagacattcctcacttccttggtagaccgcacacaccgactgcttatacgccaccttggatgatgtgaggatctactaggaagtatttacttcctccatctgatccacctcatccccaaactccaccaaattcaaggtattgactctaaacaagcgcttagaaagaggcaacccactggtatggttttctttttctttttcttttatttttcgtttttcttttatttttcttg

SEQ ID NO: 17461 - DNA, 1096 bp, Arabidopsis thaliana landsberg
tattgtttcattacttggctggattgttattgtcatcactaagcctccttcacaccttcgtggtcttattcttggttgttgtgctgctggtaacaaaccttaacatgaatgtttctgatttcagaatctgtttaacttgtgttttgcttatgactgtggtaatgaatgaaacaaaacagggaatttggggaatatgccactgattataatcccagctgtttgtaaagaaaaaggaggtccctttggagatcctgagagttgccagaaatatggaatgggttatgttgctctctccatggctgtaagttcttcttcttcttcttctttgtcttcttcttcttcaaggttttgtaatcagtatgtctcatgacagtacttggtaacgtatcagatgggatctatttacatatggacttatgtatacaatcttatgcgtgtgctatcgaactctcccgttgaaacccctccctctgttgaatccaactacgacagctacaaagttccccttatttcttccaaggaagaagaaaacaaccaaaaggtttcatcacatatgcacatgatcagtaactattcatttatcaaagttggtagtgactgtgtgtatatgacaggctgggaggtgggaaaaagtcaagcggagattggtttcactgtcacaaaaagtcaaccttaagacaatttttgctccatcaactattgctgcggtttgtgtttcaatggctctgttttatacatttgagacgtcactcacactagtgtaatctttctaattaccctttttgttcttctgtttccagatgattgcacttgtgatcgggctcattactcctttaaggaagctaataatcggcacggaagctcctctccgggtgcttcaagactcagtaactctagtggggtaactgcagctaaaattagaccattatcttagcattagctcaacaatgaatcatctcttggaaaaacgtaactcactcattcgaaagcttcttatgtgtcttgtttctttggctgaagagatggggcagttcctgcaatgaccatgattataggaggaaacctacttaaaggtttgaggagttcaagaatgaaa

SEQ ID NO: 17462 - DNA, 2933 bp, Arabidopsis thaliana landsberg
actccttttagctcatttgcttccaactcgcatataaggcatatttgactttttaagatagatggctttcagctcgttggttaaactgatcgttccccgtcagataggacactattagcatgtcgcagatacaagtgtcagctcgtccgcttgccttttgatttccgtttatgtatctcttcactagtacataggcagattaactctcgagcgcagagattatttttcatgcttcttatcagcaaagttttgaattttaggtattaaaaccgaatagtctcaaaccagttaagtgaataaccttacagcaggtccacacttaacatgaggttaaaacaatcttagaccatttaagtgggtaacataggactgcgtaatcctagcatcaaataatttttgatccttcatcgatctcatcacccaacaccaatttgctccaaattaagaaaatttggcaaactcatttgtattcttacgatacaataggcccaccactaatagttcgtaattacatttgtaatcttgcttccaaaagtccgtaaatacgcaactcaaccttcataggtttcgactcatcagagctcatctacaacaaccatatcaaaagccacctcttaagattgcaacttgacatataaaagttcgaacaaggaggagacgacggtttcattcagaatcttgcgatactactaagcccagcttctggaaactggtgaatcctttttgtgatcttacttcagaggtcctcgaaatgcgcagcgtaacttgccaagaactgaccaactgaagcacaaacataactgatatcctacaagtgaaacactcgagttcgcccagcctgaacaaagaaatacatgagatccaatcacctatctcacgtcacccaagtaatatttacgctatcacatctaaccttgttttcgcacatcgagctcgctcactcactcgatggactgggggctattgttggagcaggaattcgcacctcgtattctcacgtgcgtaaacattaattaagctctaagatttaaatcaggcctgtcagcccactaagaagagatgcgcagctagcaacagatcaggaaccagccaagagggaatctcggaacgaaactaaaatataaaaaaagtttggaacagacctgaaatgtaggagaagtttgggctgacctcgaaccaaatgacctaggaagaagacctatataaagagagaggctaacttgaagaagacatgacctattttgcccacaaacgcttaatacatcacatacttgtattctcatactctaccttgtattcacttgattcttatcaataaaattcattcgttcttaacaatataattctcaaagttttattgaatatctagctctttttcacataaacctaaaaataaatctccagtgtggatttctgtccccacaacttgtctacaaaaaccaaaaagaaaacaacactaaatattaaatgataactgaatattcagcatcaatatatttatttcgaatataaatcaaaatattttgtatttttcaatttgttagagataaaacaaaaaaaatcgacacaaatcaaatgtcattaattcaaaatacaaaatattttattaataaaatataagtaataatttttatgtttttttttgttttttgccattagattttatttaaacctcataagaaccaattataaagaaacttgtttacatatttatgttataaatattttccaatattttttcatttaccaaatataacaaattaagtacatagccaaaacaaaatatgcgacatacattgtatcaaatattttttttttgtcaaatgactcaaatcataatatgtttatagatacaagatcttatttgttttttcctttaagatattatgtaaacataaaattattagcaactaaactaaattaataatagaaataatatgttataaataaaattaaatatttctgggtatctaaatactacaattataaatatttatcatgatattagaaaaattgctaagaatgcccttttaacactactcctttataattataccctttcgtgttggccattttcatttacactcttttattttttagtgaccattttatccctattatgaaaatattttaggttaacaaaataaaatattgatttttctcgcctaaaatatttcgaaaatatttcctgccaaattttttttttcagaaacattcccccccccctattttacaaccactacaaaaaaaagatcattttaaatcacttatattgaatatttgtattacttataattgatgtaaagaaattttacatcacttaaataaacgattcgtatcttgttgatgcaaataatttacatcgatttattaacaactgatgcaacttcacataatatttgcatcgcttgttataactgatgtttaatttgaattggttataaaaactgatgtgatatttacatcattttctataagtgatgatattatttacatcactttgtctaaacgatgttagtatttgtaacggttaaaaaaactgatgtgatatttacatcattttctataagtgatggtataatttacatcactttgcctaagcgatgttagtatttgtaacggttataataattgatatcaatatttatatcacttacaaataaatgatactaaaactagtgtcaattttcataactgattttaattgttgtatcatgtctggtaaacgatgttagtacatgaatcatttataataattgatttaaaacattacatcacttctacggaaattgatgttatatttatgtcacttttcaaaactgattttagttgtagcatcatttttagaaaacgatgagaatattattgacaaaacatgtattgaaatcattcacatcatttataaagtggagctaatggaaataatacctaac

SEQ ID NO: 17463 - DNA, 690 bp, Arabidopsis thaliana landsberg
gcaacggtgatcctcattttgattaatcattgtttatacggattatgtaacaaacgaacggagtgcagagactttccacagatggctgaagacccgaagatggatggtttgacatcggagtcacatccaattcaaaacatagacctggtcgggactacaggaagtggaaaactgccacctcaagcagcatcaaaggaaagaaggtggtccaatcgggaacacacgcaactggtgctaccatggaatgccagacatatgaagttttgacaccagatggccccataagcaataagattgacactcctggtacgaatttttttgtatgtgcttattataccttactaaaaataatcatgcataaaatattgttctttaatattaattattattaaattagttaattacgaatttttgttaattttttaattcgaatttattttattttgttaatttatttaaataatatttaagtaaatagaaagggtattatagtcatttttcattaaaaatttgtagttttcaaaatagtgtaaaactgagtatgattttcaaatttctaataaaatttaggctagttataaaattgccccatatttctattctattctatgcataaaatattactgttgatgtttgaatcttcgggttcgtcaagcatagagtcacgtttttcttactcgtcaagcacag

SEQ ID NO: 17464 - DNA, 1711 bp, Arabidopsis thaliana landsberg
cgtcggagtccacaaggtggtctctttgttttcttcactcgatcggacggtgcggagtgcttcgctattaatcactcgatcaaacggaccagaataaacgtaaagaagtcactcgatcaaacggtggtgatgcttctcttatctggtcattcaatcgcacgacttaaagcactcctcctcattttactagatcaacggttgagatgattcttgacttgttttgaatttactcgaccgttaacttcctcagggtaattaaaacaaacctgaaacacttaaacaaaaacatcaaaaataacaagcaaaatataaacttatatacatggatagacatgggacttcctcccaagtgagctagtgtaaagtctttagcttgactttcatactgtttttaggcaaaggatgatgagaggagaggaaatgagcactactcttgaatgatctgctcagccatacaaggattgactctctgcccattcactttgagttcagcttcggctttgctaattaaggtggtggttccatcagggggtttgtctttgatgttgaatggtacttggttggatttcccacggaggtccttaatttgatccttgagttctttcactgtttgtgttagctcccttatggctttctccgtgccatttagatcttctttgaagctttaaccaattatcagaagctagagtgttttgcttaacatgcaggtcgactttagacgttgagcttgagcatttggagtgagtagaggtttgaacatgacctactggtcgagtttgatggtcgagcttgagttgaacatgcctcttttgacctaatcacacctataatgacatatgcccatgttactatcttgtgggaggctaatgacttcttagagatcaaggtctcactagggagatatttagcttcaactctcttagttaaagaagtttggagtagatctttaacagcaagctcttctagcttttcttggacactctccttgtgtataataggattgcactcttggctatgaacttccattccttgtacttctttgattctctccataatcagatcttgtaggtacttgtgggagggtggaatgagcatgaaagcatccattaatggcatttttagttcaatctcctttagctgcctatcaaaaagggctttgtatttttctgttaattccttcttaaatgttccagggaaaggcattgtcagtttgtagggtgacagagcaaattctttattctttgctacaacattagctcttcttttttcaaacatggctttgttcgatcgattatagggtcgagtgagtatgaaggctgatcaagcttaattggttcatcagtttgaacttcgtttttatgctggtcctccccttcttgaacttcactatcttcagtgatcttttctgttggttgggtgttgagcaatttccttccactacaaagtgtgactgcgtgtgcatattccttggaattgtgaatggtttttcctggatgtggccctgtatacgttgaggaggtattggaaacaggtagacgttccatggatgtcattttagatgtgagatcctcatatttgcttcttaactcattataggaacatgcaactttactattaatctcagccaatcgtttttccagaactagagctcaatagtttgaccctgaatgatttgttgaagcattcgctttgagtcacgatcttgagctac

SEQ ID NO: 17465 - DNA, 2299 bp, Arabidopsis thaliana landsberg
catgttttatttgtcgaattcatgacggttctgcactacttcacgtgttggcacccctagcttttggacttttccattccctttttcgttcgaaattaatgcagcttttagcctttcactttctgcgtgcaaatgttcagtcaaggctgcaacaataaaggaagtgaaaacaaatattcaacagttaaaaagcaagagattttttaaaaggtgttgtggttaagattcacgtaaaaagtttcattcaaaatgcgttattttgtttatacgttgcaataaaaaaaatacatcatcctacacattaagtttcaggtaaagcggaaaaaccgtattttacggttatggatctactaaaacttattcaaaaaactttcctttttatgcaatatatttagcccctttttttactgatggaaattattgcacataaagaagatcttatcgtcgtaaatactatcatggtcaacccaaaataagggggaggtcaagaaagttcatgcaattaccagcgtaaaacttaaaccataaaatcaaactaaaagacttgctaaagtatcgataaataaagatgatgtaccatcccgaagttgtgcctgtatctccatcgattcaattcgaatcatgatttccttcttctcattcatcatcattgttttatcattctgcatgtatattaaaaccataaaactaaagcaaacttcttataaataccgtttagacatgacaagctaatggtggctaatgtgatatgtttcaccttcaaaagcttgatcttttcaaatattgaagcatttttgttctcaagaaagtttattttgagttccaagtcaatcatatattgtaacttcttctgctttgaacgtgccgcagactcttgatttttcaagattctgaaagagcatacatatggataaatgtcacaaaccatgataataataaaaaaggaatacaaaaaaagaaaagaaaaaaagaagcataaataataatttagtcacacaaatttacttaccttctgacttccttaggatccgatgcaacctctttaagtttggtactctttgctatcttattcaattcatcatcagtataaacactggtatcaaactcaagcccggaagcattttgttctccatcaaccgatcttgaagaggaaacgttattcggagaaggaggcagttttagtaagtcactcaaacaactatccactgaaagactcctgtagtgtctcttgaaaggttcaatgtcgtctttgggtgctcttctcttcacacacaaaggaggcaataaagatttcttcttaaccctaatggaagagtctctactctccatagaagcagacgggttcatcaatggtattgaattgcgacgggatgacgacggagaaggactcaatgggggcaaggaagagaaggcaagtgaaggttgagttatcgaccgtggtcgggaaggagtgctattgtcggatccattcatttttaaggattgaagaagacaaacaatcgagtataaatctgcatcataaaaaacaagtcatgtttctacgtataactcatttttcttacatgcagaaaaattggaaaatggggaaaaattaccatttaaatggaccaaggatatctggcctggaatcgtgacaacaacgaggttgtcatcagtttatagagaaaggagaacaaaaacatattgaaacgttgagtaagcaataaagagttgaaaaaacctctcagaaacagaaatatgatttatgttgtttggatggatatgtatagtttgcatgaatctctttttatattgtttaagaacaacaaatgagtcccatgtttttaccctcatttattagaatttcatgatttttcttattaaatccataagtttgaatcttatttttgtcaacaaaataacatacaaattttgaagtcaacacatttgatggaactttgtgcgttttaggtaatatatataatgagaaattatctatctaaggtgattaagtttgtaattgactcaatcttaatttaaattaaattaatggaatgttaattactttggctagtgaatgatgttggagtgttgtctacttttgctagtgagtagttaatttgatatgttgtttattttgctacttagctattttggtaaaacaaaataaaaatatttcttacagttattttggaatgttgtttatttttgctattgagatattttggcaagtgtgaaacccttagtctattggttgaccaatgcttcattgatgtttctacatcaagatatctgcagtacgtatccaagatattgcgaa

SEQ ID NO: 17466 - DNA, 878 bp, Arabidopsis thaliana landsberg
tgcttgtgcttctgtgtcacttctcttctggcagcttaaacgcagaccacttccggactttatggagagaatacttaaggatgtcacccagtccatgcggggaattctggttgattggcttgtggaggttagtgtttagttctacttttgatgctaacttttgaagctactatgaccttttccgggttctcacaaaagtctgatttcaatcacaggtctctgaagaatacacacttgcatctgacactctctacctcacagtgtatctcatagactggttcctccatggaaactacgtgcaaagacagcaacttcaactgctcggcatcacttgcatgctaattgcctcgtatgttcctctccaatctcactagtaaatctcttctcaaaagctaaactaaacttatactgcatttgtttataaacttttcaggaagtatgaggaaatctctgctccacgcattgaggagttttgcttcattacggataacacctacacaagagatcaggtataccgagattgctgtctgaatcctcaaaaaagaaagtgtgcaatgtgctaatggagtcgtgatgtgcaggtcctggaaatggagaaccaagtacttaagcattttagctttcaaatatacactcccactccaaaaacgttccttaggagatttctcagagcagctcaagcctctcgcctggtatgcatttcgcaatttgctcccctatctcttctaattacaaagtttagtagaaagactgagaatgtgtccatatttgattgctgattcggcagagcccaagccttgaagtaaagtttctagccagctatctaacagagttgacattaatagactaccatttcttaagttacttccttccggggt

SEQ ID NO: 17467 - DNA, 1304 bp, Arabidopsis thaliana landsberg
tatacatcaaacgttacgtttattataagctgattctgagcggtctatcactatagcttgtattttcttttctgataaaagatcttctatttatcacttatagcttgttgtcaaaactatgaccagaaaaatggaaaaaagagacataagattcatttccatttttcctcctttagtctgagttcaagagaatataattaaaggggtttagtggttttcttggaccattaaaaagaaaagtacatatcaagtgaccgatcttttctattcattcttcttccactcacaaaacgcgacaaatatacatgtgaagaaggcaatagaaatgtatcttcttttatttttcggtgtaagtgtaatctttgtgatgtgactgacataaatttccaatgcaactctatctctatgtactggaaatttaagttgttaatgtctttgtgacttttgtggttgtgttcgaatgccgttatctagtttttatcttcaagaatctatgcaacatttattggtctcaaaagttacatctttttttctatgcaaatcttataaattcattttgccaagtcactgagatttttctttgtatagatgaaataaaccaaataaggatcctttggttaaatatattacaatgaagaagagccagagatgttgctctgcaactgaatagtatcttgagtagcaacatcaattgtaccattgaggaaaccagtgtaccaagaagcagagagctttggagtcctcttgcgaccaggatcgctgaaattcacatagtacattccgaagctggtcgtatatccactcagtaactcatacaaatcaatcatcgaccatacaaagtaacctctcgtgtccgatccattcctgatcagtaagtaaaactggaattagaccatgaatcctaatgtagtaatatgaggactaaaagatgcagaaggagaatcatacttgatggcattgagcatagcaccaatgtaagcttgaatgaattcaattctttgtgtgtcttgtaatgtcgagtcgcgtcccatcggcatacctgtttttatatttaaaaaattgcaagttgaagaatcttaaagaacaagaaagtgtgctttcaagcagacacaacagagtaagaaaacaaaagagaatgaagtgttgtaccattttcaagaatatagattggaggattgttatagctctgctttatatactcaagaataccttcaagaccccatggagtagcctcccacttcaagaaaaacaattgattcaagaagagcttttggcaaaaaatatatatgtattatgcaaatttg

SEQ ID NO: 17468 - DNA, 2096 bp, Arabidopsis thaliana landsberg
ctttcgtctcttcgccaccaccacctctcattcttctccgtttcactcaaccttcacattcgtttcactcgacttgaccgcaaggacacctccgattctcaagttcacaactactcgaccggtgcagctcacctcttcaccagagccaccatcgtttactcttcttccgcgagctcaacatcactcgattacaagctcgagtacacacagcctctacaattcactcgaccgcaacgcttgcaccattttccacaccactcgactcgtttctcttcaccatctccgagctggttcttgttcaccaatcactcaatcatcctcactcgaccgcaagaagttttgccacttcaagttaaccaaagaaaacactcgacagcgagttcaccaaactggaaaaaagagaaaaagaaaacaaatttggtacactcgaccggtttactctgttggtttgtgtttttggttttgttggaactaacgtattaacgtttatttttgagttacatttgttttcaggttacatcatgagtaactacagtggaaaatcctctatggaccctgattacaatgtggatgaagctgagtcctggtctgctagaccgagagaacaacatgtttaccagagcttcagggatgaattcgaacgctctgcagcccgacgtaatcagagaagagctgaaatcgccagaggaaagagggcgatgtcaagtagatatgagctgattgatgaggatatcgaaactgagtatgagccagagtcatggcgcaaggagacgaagctgctgaacaaacccgacgaggttacaatggaagagtatatcaggttcattgagataaatgatttctggggaacgcggtatccgtgctatgagactttagcccagctggggttactggaggacgtgcagcatctgttcgagaagtgtcatctggagacactcatgtcttacccttaccctgcctataaggaggagacaatcgagtttctttccacgctgcaggtggagatgtatgaggcactaacagactttgagctggataccatggggttaggcttcttgacattctcattgtatgaacagcggtatcagctttcgattaagaagttagaataactgtttggtttccctagtggaaagggaaccaaacccagatttgacagagaggagcttaaggattcgtgggccactatagggaactatctaccgctaaactcggcgcggtccaagagcaaccaaatccggagtcctgtgatccggtactttcagagatccgtcgccaactgagaagatcagtcataccaaaggaggtacaacagaagatattgatgagacggatgatatagatgaggcagagtttgacacgagcatgtatcatttcagtgagcatatacctcctgcgagggaaagcaggagtttgagcgaagctcacaggaacaacagcaagctgcagaagtggtgcataaaacaggacaagttactcgccaagtgcctcagggctatcaagtttctgacagataagctgagctgctcctcttccacaacagctatcccacagggacaacctcctctggacatgccatcgaggagatttgatgagccttagccaagtcagcacaggcctgagcttagtgagcagagagtctcacatgtccctgctagacattcgtcattcgagtacaggaaacacaagaggagaaagaaggctacattcgttcgctttagcagtagatcacgccttattcactcgaggagatcacttgactgcggtgctggccgcagcagaagaagagtggtcgagtatcctcagagcggtgttggccgccacagagctgatgaggtcgagtacccacatgctgtagctgatacagaacagggcgactcgtctatggcctgggagcaatcacaggcatccattcacgaccaactttgttcattcttcgactgcggtaagcgccgaacttcaccattgtattatatcatctcttgtgatttgttctttgttttgtttttgtgattggatttgtcctgagtacactcttccaagtttagtcacacagtggactgtgtgatttaagtttgggggagggctcaagaagt

SEQ ID NO: 17469 - DNA, 2463 bp, Arabidopsis thaliana landsberg
gctttggcgcgggtcggggtgccctcggcacactcgtctacccctagacatgcccgtctaccccctgtattttatgcacgctaatcacgttgatcatatcaataaatggaaacttaatttagaaattggttacgttagttatttcacgtagttaatctttgaccttgtttaatgttgatcaattgaaaatagttataattctattagtgcatgtgtgattaatacctattagtgtaactgggtagaactagatcacgtaatgattagtatgcatctattcgtgatacgccttgagtatagctttaaccactgcgagacccttcttctctttctagccatggcatatgcaatatcgtatgttataccctatgcatatttaatctatctgttctcttgtaatgatgtactgtttgtttcctaattcgaatggatggatgtatgtatgtttgcgctcgcatagagaacgatttggttgaggagcccgaagaactcgcaggagaagcccctgagcagcagtcggttggtggaggcaagtgtcccttgacctatctctgtcctatacattctttaattcacctcccgcattacacatttatacctaaggattgactagattttgttatccatgtccttgtttacctatttgggttggattattattgtttagctttatgctattgctcaactctaatcaatgaacatgatgagaattatcaatgatacgctgttttcccctcttttattatgatgttatacttgtggtcttcaagggggctcgagcggtttcttgagtgcctctccgtaaggacctgttcgttggatgaccgcccgggaaaacagtgcaaccatgagggtggaatggggtgcccttagctgaataattagaggatccgaggtgtagttcgcttagccgtcgtgccgtcaatggggctcggtgtatgcggctcgctctgccaaggttgatttgtcccttggggaggagtgcggtacatttaggatacctgaaagggaattaggcttacacctagttcctaaataattttggtggttgaattgcccaacacaaataattggactaactagtttgctctagtgtataagttatacaggtgccaaaggttcacacttagccaataaaaagaccaagtattgggttcaatcaaagagagcaagggataaccgaaggctgccctggtctggcgcaccgaactgtccggtgtgccaccgacagtgtccgtgcaccagggggctccaagctaaactgctcaccttcgggaattctcagaggcgcttcgctataattcaccggactgtccagtgcaccaccggacagtgtccggtgccccaggggagagcaactctgaactcgccagcttcggaaatccgctccgctaaaattcaccggacatgtccggtgcacaccggactatccggtgagccagcggagaatcggctacatcgcgcgcaacggtcgactacaacgcattaaatgtgcgccacggcgcgcagaggacagagcacgcgcgggtggcacaccggacagtctataggacttgtccggtgcgccacggacagccaggcggtgagagcacctagagggggggtgaataggtgatcctgtaaaaacttgaaacttaatccacaaaacttgattaggagttagcacaattaagccaagtggctagagaggagagcttgcacaacacgataaccacaaagagatcaacacagagatggcacagtggtttatcccgtggttcggccaagtccaagacttgcctactccatgttgtggcatcccaacggacgagggttgcaatcaacccctttcaagtggtccaaagacccacttgaataccacggtgttttgctttcactttactatatcccacttgcgaggaatctccacaacttggagcctctcgcccttacactttgatgttcacaaagaagcacgaagtaatgtaacgccccgaattttgcagttgaattttttcttttctttactcgccaaaattcgggcgttaccttttctttttctttttccctcgctaaaccttgaccttttccaaagttctagcgggattcggtttggatttcccgtgtaagaaaaaaccctaaatactttatgttgtttgatgcaccatgccgaaccttgcatttcttttgattgctttgaaattgcaaatgcattcatgtaggaagatcggatttcgaaaatgaggagaagatcttttctttcttttttttctctctctttctctctcctctttttctctctctctcccgcgccgtggccgaccccggccgcccagcgcccctggcgccccctcttgggcccaaaaaggcccaaccgcccccccacctcccctttttcccccaattctttctccctccctctcattttctctcattttctctccctcaccctaagccgccgccgcccctaccccctgccctagc

SEQ ID NO: 17470 - DNA, 2628 bp, Arabidopsis thaliana landsberg
gaattaatatgtatgtggatacatatatcgaatcaagttttgtgtataatatcattaacccctaatatcgttggactatccttgttaagtcattttttttcccttgtcaagttgagtatatattgtcctaataattatactatcatgtcttatactacaatgacaaagcatattatgtatgggtattgaacctcatatattggtctatactaactttgaatcagaatatgactcatacagtatatgttaacgctaaaatagtctggtcctaatcaagtagactcatacacacatttgttgttttgatatttatactataccagacttcgaatagactcatacacattttagaagcttggtttgtgccgttattaactataatttttgatacacataagctgaatgtggtccataatagaatcattaaacagttttgtatattctttgtgaataggtgtaagagacagaaatcggtttaagttcttatacctgggcatttgtatcctaacatagttaattatgtttgacaaccagatcttatatgagtataagtgatagatgattatgtctatattaatcatcattgtgataaccattttgtataatatctatatactcatgtaagatttggtttaaaatatgtgtcagttatacccaatcatagtcaaaaccctagtagtgttatagacatattggtgtatattagactatgaacttagactatgatcatgagaagagataacaatgactttataatgacttatataaaatttgttatgtatatacatcttgacttaatattataatatttggacaagctgttcaaccatatatcatggttcctcattctcaaaatatgattggagccatgccatttaatagttgaggcttcatgcaccagccgagctcacaaactccttactctaccccaagtggaccagctggtcagttcatggcacaccaaggtcatgggatgccgccatcccatggtccacaacgaactcaatctaggcctgttactctacaagggaacaacaatgtcatgggagacatgttcttaatagcggttgtggaaatctgttgtatacatataactcatagaagtcatattacttctagtgtatgattgagtataagaacttatttatttgttattgaaagttggtttgtggtttaagttcgctgtaattatttactattgtaatatttttataaaaatgatacacatctaaaatatatttggctcgattatgtgtagtgacttaagaacttgcaaaaaaaatgaataggtcctctgataggtccttgaatcaagacatgacatcaagtcatctgaaaaaacatatccatgaattaagatgcataaacacatgtttatatccacgtataagagaattttaagacaaataacttctctatccgtgatccgttctctatccgtttggatacccgcggatcacggatatttgtcccaggcttagtttctatcactcatgccaaacaaaaatcgcatcaatcatatttctataagtttaatctatctaccaaataaactttggggggtgtattcaatcaaacatttcaagtgatttgtgttaaattaacaaatcctatgttgttagggatatttatgggtttacgaaagtatcaaagagggtaaaagaggtaacttataacaacaaaaattaataatagacacttttagtcaaataagtttttgactcattaggatttttggataattggataaacaacttttattgttagtttatttatttttcttatgctcttataatatggttataacattttttagtttttcggtaatatcattactgttattttattctcgtaccttacttatcttcacacataataaaaaaaattcattaatatcaaaacgagattacaaagtcgttccaaaaactactaaaacaaattataacataaacagatatatgtgccatatgttgaagatgacataaactaaagaatgaatttgacaatgttttctttaaaaattagatatttatcacttttgcatataaaaacaaaagtatatacaatacaataaacttattataaattaatatatcttaaattaataaattattttgatatcgaatcgatcagtgtaaaaactaatataaatcgataaaataatattaaaaaaaatttgaaaatcttatactccctctgttccaaagaggaagggagtatattataaacttaagacagtaacagacgaaggtaaattacaatacatcaaacgccaacccaaagcctcgtatattctcatgttttgttatatgtattggtggacttattatggttcaacaataagtcattatgtaggtttattggatgaatttgttcatacctattgacatcatattgtatattattacttatttgcatcaataagtacgttaataaatcttacatttaatgttaatgaaccatgactttaaatattgatggttacaatatattggctacaccttaatatatatgaagactcatgatcaaaacctattatgtttgttagaagatgtaaccagctatcttgacatgtatcagtatatagctgggaacatgactattattgctttatgagataatagacag

SEQ ID NO: 17471 - DNA, 562 bp, Arabidopsis thaliana landsberg
gctgcttagtgttacccggcgagtccacgcgttctgagtcaactcgtccgatctactttcccgtcgctaaacttcaaagtatacattgtccgggaagatacggtgatcaaccttatctcttcttcaatcagacaagctttagagaatccattgaactatgctcggaactacctcggagatattcttgatccatgcgtagacagagtcatttacctagactcggacatcatcgtcgtcgacgacataacaaagctttggaacacgactttaacagagtcaagaatcatcggagctccggagtattgtcacgctaacttcacaaagtacttcacttcagggttctggtccgacccggctttacccggattcttctcgggtcgaaagccttgttatttcaacacgggtgtgatggtgatggatctagttagatggagagaaggaaactacagagaaaagcttgaaacttggatgcagatacagaagaagaagagaatctacgatttgggttctgtgcctccgtttcttctagtcttcgcaaggaacgttgaagcaattgatcata

SEQ ID NO: 17472 - DNA, 1932 bp, Arabidopsis thaliana landsberg
gaccaatatagggatattatccttaatgcataatcagtgataccaaaaaaaatgaatgtttataatcttatcacatgtgtttaattgaacaacatacgaacatgtggagctgtaagcgaatggcagcatggaaaaatggacagtgtggtaaatattttacttatagctttacaaagagttaatcttgcattacctgatcacctgaactttagcctcaattgtaagacagccagactcatctatgaacccgtcttttaacttaggcaactccataaactttttccatccccaatcatgctctttcttccaaaaccggtgcagcgtgtctacaagatcatgaattcagttgtctgcatattcaaatggaagcaagcaattaaagattcgaaaaatcacctgaaaactttgatttctttggatctttatgcatcacagatatagtaaactgagccaactgactccagcctggtgtccaagatagcaaaagaatatatatcactaagtatccagagaaagaaaacaaggaccaagcagaccagtggaaaaaaatacaaacctggaagaagttcatcatggtttgcaacacagagaaataatgagagatgattgctaacatcacatccttctggatacattaaaatatgcctgacacattgaagataaaagtaacaacacaaagccttcaaaaccatttccagagtttttttgagacaaaaattaaagatgagaaagatatgcatgccatgtaccaactgtagcctccaatttcaaaaacactgctagcgaactcccttttgctgatttgtgaaaatttcttaatcttccatgtattttttccatataactcagagggtttaagacctgagaaaaataagaaatttcacattaaattagctgaaaaagagaagtatattactaaaacacaaaaacaaacaaacgggtatagtatctattaacatatctcgaaaaccttaatcatttgtggacgggatagtggggacgtttttgacgatattcataaaaaaaatcatattgctaaaacacataccatactcatcatccacatcagtctttgccattctaaaggatgattttttcgtcaaagctctcttttcttcaactacgaacaaaaaaaaaactaacgattagagcaaataaaattagattattgaattctgtaattccccctaagatgcacaattctattataaatttatcgtaaaataatattatatgatttgaaaagttctaaagagtaagactagctgaaaaatcaattgatttgatcaaaaactgaaaaatgaacaaagaacaagcacataggtttggattatattcaacaatctgactccctcaaaactgtatcgaattcatagcttaaatcgaaaccctaagaacccccatcagatcatggatgggcaataaaccctaaattccaatcttaaaataaataaatagattgttaaaaaatcaaagaaggaccagaagttcatttctattatgaaatcaacgatcggaaaatcataaccactctctcgtattaaaaaagaaaattaaagaagaagaagaagatagagattaaccatggaaactttgattctgagtgtagagactctaaaaatccatctgtgtattcttacatataagatgattgtgatcgataataacgatgaagtgtatcctaaaagatattttgtttacctaataaaatatatgattctttacctaaatagatgattcattttttggtatgagagtagattttgttttccactatgagaaaggggtaacgatttttatgtaacaaccccaaatatattatagggaaaatatcttggctatttgttgattaagcttatatttttttccgcaattaataaaaacaggtagggacccacaaaatcaacctaaaaatatgaaagtaacgaaacc

SEQ ID NO: 17473 - DNA, 1176 bp, Arabidopsis thaliana landsberg
aaccctctgaattggcaaaagcactgatatcataatactttagacttgagacgatgtggagaagattaatgggatgggggccaagaagaagccttgccatatgatggctgaaaacacagccaccacatagaacaatgcctctccaagcttgaactctcttgcttcttttggtaaggcctgcaaaaacagtaaagggctcaagtctctgttaaaaactcttttgtatgttttcagattcaaaagagtgactaaccttgaaatcaccagcgatgaacataccgatgacgctgacaatagaagcaaggagacacaaaatcaactggaactcgagcacaagggtatagctcatggtttgcttagctttctggtaagcaagttccactaatggcaagatgaaagcatacataacagctgctgctacagtcatcaagaaaccagttatgtactgcttgtgagtctcatgaactggcttatcagtttcggtatgcattcccaaaaccgcagcaccaacagtcaacaacacaacagcattgatggtaaaaggagtgaacttatgtttaaccatgaagaatgagaagatagctataaaagctaaatgtgaagcaatgataagagcagctgtagaaactggaagataagctataccatatgcatacaagtagttatcaaaccctgagagaatgcctacaataacagcggcgataagaagacgcggtttgataagaaagaaacttgtactatcacccacattgttgcttctgcgccgggtaatgtaagagaagagcagaggaatgaagataacaggaaagcctgcagtttcaagaaacgtagagaaccaaatccttttaccgccattgttgaagtagagacgcataatcaaaggacctccacagtttcctatggctagaattatgcagtttatgatcacaagagccttcaccattcttgtctgatttcttgtggataatgaaggttggtggtcgaaggagttagttataaggtttggtgttgctgtgttttggaacaaatttggtccggttttagattctgtcgtgatagatctttgtgtttcgttttacctaacgaggcgtcaatggataaaacatgccttttcctatttgatacccatgaactttgcaaactgaatctttgcgcatatgtaacgtagcaatactc

SEQ ID NO: 17474 - DNA, 2195 bp, Arabidopsis thaliana landsberg
tcggcataatgtcattttcttctttctattatatgtcacgttagcgtgtggaaatgttattattgcattaagacaaagtcgtagtatgcgtcacacgaggaacacgagagagttgttgtcacacgaggaacacgagagatagaatgagacgacaaaagatgtagtttgcatcgcttaaattgaatattagcatcattagaaaaataaaattaacatcaattataattgatgtaaatgaattttacatcacttatataagtgactctgaattagtgacataaatattttgcattagttgaactaaatatttgtattatttattataattgatatgaatatgcatcagttgttaaaaatgatgttattttctgcatcacgtaatataaataatgttatattagctatagttatgataaatgatattatatatttacatcaatgtcccgtacgctgctttctcaaaattgaatgatttattttgataataattccaacacgatggaaggtcatttgccttaaaggaagttagtggaaaacaagttattggttaaagaaataagatgaggaatgcgttaattcttatacaaaacataaaatacatttggtttgagagttattgatgtagcatgtgaccatgtgtcaagatcttatttgctatgtaagtatgtgtcaaccaacctttatcttcacagctaagtagttgacttgctggcatttaataaagggtaaattgcaggccacacccgttgatatgttttatttccacggattgtcaaagtcaaatgtggttttcaccatttgtcttttcgcctgcaaaatgacgcttctgcccttgcgcttctctcttagtaactgttgaaatgtacggtttagtttaacaggtttagttacgtacactgttccggttcagttgaagattttttgtttcacgttgacacgattcggttccgttacaagtgagattatttccattattccgaagtgacatcaacatttaatgctccaaaaagtttaaatgtgactattgtcacaattaatgcaaaatcatcattacatcaaataatattaaaaaattattgataataattgttgagataaagaagatgaacccaggaataaagaattattgagaacgtatattgttgctgaaaaagtgttaatcttgtttttgtaccaagtttggagccaaaacaagcattgctcgtgtaagtaacgaagttcttttaagaagttttttgttatgtcatattaggatcttgattgtgttcgaactccatgtttttatcagaaaatttgaagatctatatttgtttgttgaaaatagtcaaatgataattggtatttaggtttataaatgtgtagtatcgacattccatttgtttttgtatgtatagtatttttcagttgcattaatgtgtgtctcctgaatttatgatgcaggtgggttatggatattcccgtatttactatggtcggtgagtgaaaatgcaaagaaggagaatggaaatttgaacctgaggaaggcatgtttggtcgttgtgtacgcgttcaggaaaacatgctgtacacggactttgtccgtacactccgagagtctttcagtttgaagtccaccgagatcaatcccataattagctactggatgccgggagaaatgtcagtgctgatagatactaaacgccctcctgtatacattgacagtcagatgggtctcgaaacgttttttttggttcgtggtgggtatctttctctcaacttgttcgtctctttcaataatacagtgaaggcgttcgggaatactgtctctaggtctcatggtgaagtttctgaaagtgaccgtgtgtttgatagtgctacaaatgttgatgaaaataatgaggatgtagaggagcaagccgatgttgaagacgatacaacagaagaggatgaaatggaggagggcaacgaagatgatgatgggtgtgatgattatctttgtgtggatggatctattgggggaagtaccttgtatcctaccacagacggtagtgaaggtattagcgaagaatacgattacaacaagtggaacgatgtaatagtagaacaatatgtacaaggaaatcttgaggaagacgtcagtctcactcaacagactgctcaacatccaggggaattcagtcgtttattggaaacgtgtacgtacacgggtcttagtg

SEQ ID NO: 17475 - DNA, 797 bp, Arabidopsis thaliana landsberg
tatgggctgcggtagctaagaagttaatgaagtccagatacacgatggaatggtctttaattttgtctcacgtctccgataaatctttctaccgagtggatggtttcctaatccggtatgtagtccaagctacggtacacatagtttggagagagagaaattgacgacgtcacggagaaacaccgaattccccaacacaactgataggttggatagataagcaagtccgaaaccagctcaccaccaatcgacgtacgggagatcgacaatacgaaaagggcatgcacgactggttcaagaccagaaactgatcactctcgactcagctttcatatttgctaaacgttgcacaagtgctaaaaatattatggttttcttttgaatataatttaacattatttcaaaacaaaaaaataaaaggtaaatgaatttgatccaaagaagaatcttgtaatccataagaaaatcagagatcaacacaaaatcccgagaaatcaacaaataaatcccgttatccaaaacattattcaacataaacactagacaacgagtctcgaccgcttgattaattaaaaatagtttggtaataatacggaaaaaaggacgaaacatagtttgatagcaatcagttgcatggacatggacgtaaacatgaatgtgtgtatgaaagagatctttaaaacttatagttacgtcattttccacaatcactttcacgaataaaaaaacaatcaaaatcacgttaatgacattgcctgcgttcaggccacgatagttattaaaatgaatcaattcat

SEQ ID NO: 17476 - DNA, 1268 bp, Arabidopsis thaliana landsberg
cagaaacataagatggcggaggaagacgaactactttattcttcctaaaaagttttttgttcctccaatacggatgatgcagggaaagaaaccgacggtgacaattaaaccaacatggttttctgcctctctttagctgaaacgcatctgtacgacccatacagtaaggacaagattatcttccatacgttgtccaccccgataacattccatatgccgggaagtcactaattgtccacattagcactgcccgcatattgaaattttgtttgctcgagtaatcaaacgtatgaacaccttcataccacaacttcttgagttcatgaatcagcggttgcaagaagacatcaagccctcgttttggatgctttggcccaggcactaaaatagttaagaacagaaattcgctttgcatacacatatctggaggaagattgtatggggtcaagataacaggccaaagagaatattgtcgcccagacaaaccgaatggactaaatccatctgtacataagccaagatacacattcctacactcgttagcaaagtaaggatatacggtttgaaagtgtttccacgcctttgcatctgatgggtgcgttatttctccttctgcagttgtatgttgagcatgccatctcattttcgtcgcagttctttctgattgatataagcgttcaaatctatcacttattggcaagtaccacatccgtttatatggcactcccgtccttccgccagtagtctgatatctcggcttcccgcaaaaccgacattcctgcagatttacatcatctccccagaaaatcatgcaatagtcaatgcatacatcaatcatttctgatggtaatccaagactcgaaaccaacttctgtatttcataataactctcagccgataaattatccgatggcaaatattccttaattaattctgcccatgaatccatacagttttcacttaagttattatcagctttaatagtcatcatcctagatgccaaagataacttagaatgcccttctctacatccctcatagattggttgatttgcagcatctaacatatcgtaaaaatgttgagcatctacgttgggttcttcacttatattttcaggaaatgaagcaatagtttcatgaaatgcattcgtaaccatatcatgaaatctattttcctgattatgcccataaccaaattgatcaggtacatgctgaccataattcgcatcattattaaaattagtaggttgctcgacaccataatttgta

SEQ ID NO: 17477 - DNA, 646 bp, Arabidopsis thaliana landsberg
gattcaaactctagaaaaagatgcttctttggacgagagataaaacggtaccaaacctgactcccgagaattcacatttctctccgggttaacctagatcttgtttctagatctcctctggttcccttggtgtcgccgtttttctctccttctccgatttaaatctccctctaaaccttcttacatcaagtaaagatttttcttcagcatctaagaaaatggtgagtcgtctcccctatgcggaaaagggaaaagctcaataatttcctcacagaaccctcaacctcctagagtttaagtccctgctttcaacaaccctgagcttctttgaagacatgaactcacaatcatatgaaaactcatcaatcctgcaatccataaggtctttttcatcaccccttttccagcccggtgggtgcggacctcggaaacagcctcttccagtttcagttcgccaaggaacctaatctactcaaagctttggagaaccaactcttccatttctccaaatcgatggttatcctccgaaggtgggaccctacggtagacaagtcttttccgtctcatatcacttgcatccatgtccaagaaatttgatgtaagttaaattaatcttaagaacactctctcaaataaagagatcaat

SEQ ID NO: 17478 - DNA, 1808 bp, Arabidopsis thaliana landsberg
gccttttctgtagttatatttatcaaaactgtttatctgctgatgatgataagtgataacagatcaagcgccgtgtagttctaaaacatgtggagtcattaacggaaccaaaaagttacacaaaaaaacaaacatcatatattaacttaccgatgcttgaataatagtactattattgaatgacaaacccattctataatctatatcactatatgccatgttatgattattgatgatttaaggtttaatttttttttcttttttgaaatatgttgattgtctatataataaacatctctcactcaataaaaatcaaataaatcaagtgacctttttctgaatcatatcataaacaaaaaaatatcagtaattttttaaaaagtaccggttttcaaataataaatttgcagtaatgaattcattgatgttttgggtcggttcaccctaatacattttttctctctcgcctccctgctttaactccaagtggtcgttgtgctcgtgacggcgcgtggcggctcctacaacgccggcgtcggtcacctttcttgtttcctgtttagtttttcttttcatagatgtcttctttggttttagaagcatagaggctctttacaatttggagtggtgagtgttgtgaagcagatctagtgagattgggttttggtacttggatctgtgggatctgatggtcgagggtgttcttaggtcactgttcttgttcgctggtcatggagtgcagtcacgcttcatctttgccggtggactttcaagacttttgcttcttctcttgacggcttgtttctcttctcccatggctgaatctgtgcaacatcggatcgacttctcgataactcggtatctccattgtctctcatgtcttctgcttttgtgaaacttgttgctctgatcagtttgtattcatgagatctggtaacatcagcggcttaggttaatttgtctcccttgtttgggctattgtctcccttttttgggtttagcttctctttcccgactaagttagactttgctagtttggggttgaactcttggattacgttatcagttcttctttcgtcgtatcaagcacaggttagcttaattaattgatcgctgtggcgttgaaaggattaagtggttctcgattattttacggctcatccgggaaacccttgacttaggcactctttgaaaaaaaagcatcatttccggagaaaaccaagtttcactatcttgttattgccataagtgttgaagccagtcttcacagtttgttgtgcgagaagtccttgtggtgagcttcgaaagcttcgtttagtctcgagttaagattagtttggtttttgcaatgttctcgaaaaaacccttcctcataggtcgaactttgtgtctctttgaagtctaaactcttcattttcatatgtattgtatcctttccaaatctaatatcaaatataattcagtgagaaaaagaagaaacaagatacggttatgcttttgactgtaattaatgatattgaatatattcgagtaatatacaccatattcttttaattttgatataatttgacatcatttacgtatatatatattatcatgtttccatactcaaagatattatccaattatcattattgacctgaacctatgatttagaacaacaatgattcttcaaatagttctttaatcatttgaacttaaagtcatgcttggttgaccattgccttttcacacattttagtaaaaatatattctccaaaatatagagcttaaatggccacaacaactagacaaaaaaggaagacaaa

SEQ ID NO: 17479 - DNA, 1546 bp, Arabidopsis thaliana landsberg
  unsure (1)..(1546): unsure at all n locations
cttttttcctctctttgcttttcaaaaaataaagttgtctttttttatttataataaaatgatttgttgtttcacagtgtgttgtttgttttggggtaaaaaagaaaatcataaggatgctttcaatatttgttttgttttggttgagtgattgctgaagccaacttaaaagagagagaagagaagagtgactctgtgtgtgtgtgcaagaaagtcttctctttcacacctttcgttttctcgaacctctcctttaaagatggtggaggaatcttgggtttgacaactcattaacactgaccctctttttagctctacaagcatccaaggaacccctcttacttttcccttcttcttcattccctctctctctatatctcccaattccttctctttttttaaccttgatcttcttcttataagagactcagagctgttcttcaagatgggattgtgtaaagcttgaaacttgactatctgggtctctcccattttctgttctcttttgtattctgagtgaaagtttagttttttgggggaaaaaattagggttcttagatggaggagatagaaggaacaaccagagcagctgttgagagttgtcatagagttcttaatcttttacatagatcacagcaacaagatcatgttggttttgaaaagaatttagtatctgaaactagagaagctgtgattaggttcaagagagttgggagtttgttaagcagtagtgttggtcatgctaggtttagaagagctaagaaacttcagagtcatgtctctcaaagtctcttacttgatccatgtcaacagaggacaacagaagttccatcatgatcttgtgagaaaacaccggtactccggtctggtttccaggaattgagcttgagacaaccttcagattcactcactttagggactcgctcttttagtttaaactcaaatgctaaagctcctctccttcagcttaatcagcagacaatgcctccttcgaattatcctactttgtttccagtacaacaacaacaacaacaacaacaacagcagcagcagcaacagcaacagtttcatgaacggttacaagctcaccatcttcatcagcaacagcagctacagaaacatcaagctgagcttatgcttaggnnnnnnnnnnnnnnnnnnnnnnnnnnnnnnnnnnnnnnnngttgtactccaactatgtcatccactaggtccttcgtttcttcacttagcatagatggtagtgttgctaatatagagggaaagaactccttccattttggggttcctagttcaactgatcagaattcactacattctaagaggaaatgccccttgaaaggagatgaacatggaagcttaaaatgcgggagctctagccgatgccactgcgctaagaagaggtcagttgcatatttttgtttcgttttcatagcctctctttactaagatggtgtagttaatctgattcccaaatccccaggaaacatcgtgttaggagatcgatcaaagtaccggctataagtaacaaggctgcagatatccc

SEQ ID NO: 17480 - DNA, 1646 bp, Arabidopsis thaliana landsberg
tgaactctattgtctgttatcatcttgtgtatgagatacaagttttttttagagaatgagaataaaattggctactttctattatcttgtgtatgagaaacaagttttttatcttgtatatgttctgttgctcaggtctgcttaggtcagaggagtgtgaggtgaaaacaagattcttgtcggtattgtaagtttatcatttccttgttatgcttctgattgtatcgttttagtatatcatctgatttgagttttttatttgtttcaggctgatttagattcttcaaagcaatcaacttcacagtcagttgtgcttcaagaggtacatttctgagatctatagcttgtacatttctgattaatggaatctataagctttatcacagatttctacttcgtttttggttttggttgtcactgtattttagtttcagattgattaatggaatctataagctttataagcttcgattattagctcacttgacgacgctgttgtgatgttagcttcctatttttctgaaataattagtagtgataaacaagagtttcatagtaatctgaagtgacttatatagggatgactagtaatctgaagtgacttatacattcttgtttcatttttatgtagggatggatttgaaagagacatttagatttttagttgaggatgatgacatggatttggtactagaggaagagaacaatatgtatgctcttgtaaaggaattgtatggagggaagaatgtgaatattgaaagacagttagtgaggacaaacagaggtggaggctggcgtcgtgttcagcggttgatggtcgagtccaaggtagaatgcttcgatattttacgcatgcaccagtcaacatttaggagtttatgcaagattctttcagaacgatacaagttagaggagtcctgcaatatctatcttgaagagagcgttgcaatgttcatagagatggttgcacaagatttaactgtacgggtcatagctgagagatatcagcattcacgtgagacagtgaaaaggaagctggatgaagtattaagtgctcttttgaaactcgcagcagacatagtgaaacctacaagagatgatgtcacaggtattagtccctttctagtaaatgataaacgctatatgccttattttatagattacattggtgcccttgatggtacacatgtgtctgtgcgtcctccatcaggggatgtggagcgatatagaggtaggaaatctgaagctacaatgaacattctagttgtgtgtaatttcagtatcaaattcacttatgcatatgtaggagtacctggaagagcgcatgacactaaagtactaacctattgtgctacacacgaagcttcatttcctcacccacctgctggaaaatattacttagtagattccggatatcctactagaagtggctacttaggtcctcaccgtaggactagataccatttagaactgtttaatagaggaggtcctccgtcaaacagcagagaattgtttaatcgtagacattctagtttgagatctgtaatcgaaagaacatttggtgtgtggaaagctaaatggagaatacttgataggaagcacccaaagtatgaagtgaagaagtggattaagattgtgacatcaac

SEQ ID NO: 17481 - DNA, 2126 bp, Arabidopsis thaliana landsberg
  unsure (1)..(2126): unsure at all n locations
tacagacgaagaaaacttatcatatattttttcaatccttgctatttaaatgcaatatcagaatattggatcaccaggtcaaaaagcaacgtaaaaaaaaaacgactgaggtatttacatttttttgtagttgtgtgatgatatgaagtagatttttttttgtgtttttatagaataaaaaattaatattttagtttaattttagttttttatttattacaaaattatggactgccgttggactactcacattaacgtatgagaaagaacgtgcttttattactaaaaaagcaaaaataaaataaaaaattatatgcagttagccagatttttacttttttttgctgattgaaaaattaaaaacagtttatctgtcacgcattttggactaccaaaaatctgacttactattcaaaacttttaatatcgatcgataaaatgcaaaaataaattaatcttttagttcactagctcaaatctctaaattaataaaaatatgtgattttaatttatacatattttcatgtataagtataacttccacacgcaagcacagtcacactatcaaatctatggattcaggttacgtatgacacgacgattatttatcaatcactatacaaatatgacacaacatcacaattcagtaccgactacaagtcacagttgcgattaatgattggataaaatttagtacacatatacgcgataattgtcctcacgattagtgtgttttgcgtatgattgattatcttgtaaaggatgatggaccaactatacacattaataacgtggtcgcggattcgtttaccaaatcaagaaaatacatttctatgatccaataatgctcttatattttatttgaaagcgtcagcttctgatctatataaaccaaggggaccaacaagtgttatttcagcaaccaaaacaaaacaagaaaacacgagtggaaacttttaaacaagagagggagagagcgaaatggcgacgtcgggaacatacgtgacggaggtaccgttaaaaggaacagcagagaaacacttccagaggtggaggaacgagaaccatctcttccctgacactatcggccaccacatccaaagtgtttctgttcacgatggcgaatgggacactcaaggaagcatcaagatttggaactacacatgcggtaaaaatatacacttattttagttatataactcacgtctgaaaactagagcttggaataatactcgaggttaatcacataaaaatgaatatatagttgtacgactttgtcacaagaatacagagaatccatttttcaaaaggtttcactgcatatatgtaaactcatatctctctaaatttgattcactttattaatttatgaacccgacaaatttattcagaaagcttctccaaaagtagatctgcggattttttcgaaaggaattacaagtaacaactacacgtgatggaataatctctttaccttaaaatttagttgagtgttacatatattatatatatagttccaacatatatatgcactttagtacagaaaaaaaaaacatatatatgcatgttgctaacttataaatggaacacatatatgaaaagatgggaaaccggaggtgttcaaggagaggagagagatagacgatgagaatatggcggtaacgttcagaggactcgaaggtcacgtgatggagcagcttaaagtgtatgacgtcatctttcagttcattcaaaagtcacctgatgatatcatctgtaagatcactatgatctgggagaagcaaaacgatgacatgcctgagcccagcaactacatgaagttcgtcaagagcctcgctgctgacatggatgatcacgttctcaaagcctaaatatccctttcacatcaacccatcatcacctaatatcatgatcatcatcaccctcatacgtacatggctccttttgtgtgtgtgtgtgtgtatcgtttttatggtgttttcaatataataaatgggggtttacatgtatggtttcatctaatataatatgctttgatgttgtttattcatggtgaggtttcatgtatgctcatctacgcatgtatccttgntaattaatgatttttaagagttatcaatcaatac

SEQ ID NO: 17482 - DNA, 1326 bp, Arabidopsis thaliana landsberg
aggtctcttctactcttcagatcctgatctcactctcactggatttgcagactcagactgggcttcctgccaagatagtatacgatcgactactggtttcaccatgtttctaggatcatcactcatctcttggagatccaagaaacaacctgtagtatctcgatcttctgctgaagcagagtatagggcacttgctcttgcttcatgtgaaatgtcatggctggttattcttcttgttggtttgaggattggtccttcattagtttcggttctcttctcagacagtactgcagccatttacatagcaaccaatccagtcttccacgaacggactaaacacatcaaaatagattgccacacggttcgggataagctggatgcaggctcattgaagatgcttcatgttcgcactgaagatcaggttgcagacattctaactaaacctcttttccctcagcaattcaatcacttacagtccaagatgagtctcatcaatatattcggctcatcttgagggggcctattgggaggcattgtatgattttgtaattgttagctggttaagtccggtttagtcagatttagttggtagagtttacttgtatatatactcacaatgtacagtattttatcaataagagaaaatagaaacttcttctctacaatctttctctcttaaaccctcttcttcgtcttcactattacttgatatgcaaattcaattcttgtgtgtttgtacgatgaactaatagcgtttaaatcatttgttgttaataccaaagtaaaatactcaaatataagatccgaattcgtttaaaatcaaaacattagcttctttttgttgggagctcaaaactttttatttgcttcgttaatgtttcatcactgttcaatatatacaaaaaaataataataataattataatatttaatgataactttgggatatatatggctatattcctgataactagtataaggttaattaataaataagcatcataaagatttagactgtgacctatgtcacaataagtctcatcgtaaaaaattaaaaaccaaaataaaagtatcattttattataacatcaaaaataaaaagtatcatcgtaacctctaaacattaaagttaaataccaatataaaagtctcatcgtaacccaggtgatacaccttttctatatatatgatatctgactgttggttatgtcaacctattcaaggtatacgcggttgtcatgcacctatcaccgccatcccatttggccgtagaaagaaaatgctaggataatgcatattattcacaggtatacttctaaaccttcc

SEQ ID NO: 17483 - DNA, 666 bp, Arabidopsis thaliana landsberg
ggacatactggaactaaaacagataccaagattaggctcttaaggtacaaaatactgtttgattgtgagacagaggagttcttagaggttctaatgattataaaaaccttgaggttgcgtactcttatgggaatgcgtggtttacaacatagacgaccactgaggattgaagatctcgaactaccttgaaatgcgcgtggaaaaacctccttacctgttgcattgccaacaaaacaaagaatttctcccatgaatgcataaaacaaatgaagtcagagatgaatgaaaaaaaaaaaaaacaagggagtgtgttcttgtttctaacttgcctctttaaaggaatgtcggatcatgaaatctctgagttttggttcttctgatgcaaacaatacaatatgactaggcggatctgaccagtttctagctaactctgatgcaaaacctaaagggtttactaagaactgatccgactcatgaagttcttccttgtctgcactgtatcagaagaagacaaagagtcctttacaatcacatagaaccaagagctgtgactcggggagtgatcctttaccttggcgtgcagtctacaaattgcattggaatgttaccatggacagtggaataatacggactacaaaggcacggcatgagaaagagaatgctctt

SEQ ID NO: 17484 - DNA, 1754 bp, Arabidopsis thaliana landsberg
atcacatccaaagaagatgaatgcattgtatgcaatgcagatgcagtgttgttggaaataaagatatcatttttagtactgtttaactgttttttttttctttttctcagtcaaatatataaatagaaactaaatgggcaaatatttaattgttgttatcggataaaactactaattattcatggctataaaatcctcgcaatcttcgccgtttatcttcccgttccccgatcaaaaatatcccaaactctcacacacattctcttcattgggactcatattcttctttcttttctttttctttcttttttcgtgtttttattttgctatctccaagtatttatctttatgacttgctttgttcctatccatggatgtatacttctttgtaatggagattacttcatttctgaagcttttgagtcaaactgatggttttggatttgggatcttcgttattggttgctcctctcagtttttcaatctcgtctttctctgttgtttgcttcttttgggactaaagtttctatctttcaaaggtacttcattgtttttgcagtatttagagaagatcaatcgaatttctccgaacattgagtttttcaattccttcaatcgagaacacaaggattgcaacaacaacaacaacaacaacaacaatgggttcatttcaaaatctcatttggctgatggattggatcagaagaaaccaatcattttacactggagttctgattctactaatagattgagctgggagaactgtgatcttctccttctacgtgatgggcttgatcacatccagaacagagaaaataccgtggcgttatcggagacagagctcgacgagaagaatcatcatggcgaagaagaggaaagcgaggacgaagaataatcacagtctcagaatgatgaagaccaattgttagacgttattactctgagaacaatggtgaagagagagagaaaacgtggagattacatgaagaaagagctggagaaggagagaagagcagctgaatcagctgctgaagaagccatggctatgcttctgaagctacggatggagaaaagcgttgtggagatggagacaaaacaatacaagagagtcgccgaacagaagcaagtgtacgatcaagaagtgattcaatcattacagtggatgttgatgaagcttgatgatgacgaagacaagattcaaatgtaaactgtttgatcctctgtttttttgtatttatgcgtataaaactataaataagcaaaatataacatgtatgtatccaatttcgattaaaccgaattaataatcaacaaaccaaaccgaaattggatctaatgtttattaagacaagtctagttacgtggccggttactattggatatgtgacaacgattcaacgtggcaatttatggactattgaaagacgttattgcccctttcatcttcattctttctttggtcatccatctgaaaattcgatctgatcactgagaaactacggcgacgacgaagaatacggtggaggaggaagtacaatgagaatattaagctacggaatcgttattctctctttactcgttttctctttcattgaatttagcgttcacgctcgtcccgtcgttctcgtcctctcaaatgacgatctcaatagcggcggcgatgataacggagtcggagagtcctctgacttcgatgagtttggagaatccgaacctaagtccgaagaggagcttgatcccggttcatggcgatc

SEQ ID NO: 17485 - DNA, 687 bp, Arabidopsis thaliana landsberg
tgaataatcatataatattattaactcatctcatattttattatattgtcatggataaacaaaaataataaataattacatttgtaccttcggctcaacagaaggagaaagaacaagtgtgatgcacaagcgagtaccaatcatcgtgaacagtacgggggtactgttcatctatttataggcacagggcgcacctgtgtgaaattacattgataccctttacaattgattacaatcatgaaacaaactatcatgggtcaatctgtcttttcatctttaagtcggtgcaaccttcgtcttaggcatgtcgttatgccgaagttccctgtaaggtagcttcggcgttatttgcatgctgatcttccgaaggtgtttcttcttacaggaccttcggctacgaagcagaccccaacaggtgtgtaggaggaatccaatgggaagctcagatgggagccgatagcttcctcctcttctcagggcactatcaatatgatgtcaagtgctgagcagcagttttcagttcctcttcctccacagcagctttatgtgcccgggacttctcagttcgtgccgatgcaaggttttccgcagtatcaggttgtcctactcctgcgccgtctaccctatgctgctcagtttggagctccgcgcagctcctccggtggctcagtggggtcttctgttaat

SEQ ID NO: 17486 - DNA, 1145 bp, Arabidopsis thaliana landsberg
agagggcaatccacattgtttcttatggaacatatcaataaagtcgatacgaagaatcatcttatggaggagcaagatatggatgggaatacacctttgcacctggccaccataaattggcgccctaaaactgttcgtatgcttactaaatttctttccatcagaaaaaaactcttggataaacataactccgttggcttgagacttctggatatcgcagagataaatctgcagtctgactacgtttttcgagaggtataacatatctcttcctatacatacagttctttttgttccaatatcaaaccacatagatcttatatagtttttttacatctttctggggacacaatagagaatgactttgatggtcttgctaggcgtttacaatctaagacagagaggtatttctttgctaccgactagcgggatgacactaagaagtagatcagaaaaactaggtgatggtgaaaaatacaaagaccgtgtcaacattcttctactggtggcagctcttgtagccactatgacgtttgctgcaggttttacaatgcccggtggctttagcagctctgctccaaacactggcatggctattttggtcgatgaccgttacctcacaacatttattatgaatgacactattgcaatgcttacctcagttttagcaatagttgctcttatctgggcacagttaggagatccagaactcgcgcacagagcgtttcatttggctttaccagcactcttcgttgctctactcttcatgtgtttcacattcttttatggcgttctggctacaatacagcataacatcgtgctttcacgcatcataagctttgtatttaatatcttatttattatgaccggaaccctccttaccccttacgtgatcccgcaggtttacggccttcctattattggagttttgactagttcatatcttgattttctattgctgtttcataatgaagatgatgatgaaaaacattacaccaccggctcatctcacacgtgtgtgaagagtggggagtccatgggatcttcaagcggggtccaagcggaaaagtcgaaagtgctttaaagagattgcatcgtttcaaattagctttccttatttgggtcactaaagtcctggcatttac

SEQ ID NO: 17487 - DNA, 2355 bp, Arabidopsis thaliana landsberg
ttagtcggaaaaacacgtttttgtggaaaatgagagaaaaaaaaaattatttgctctcgactaatgttctaatagccgatgctaacatgtaatttcgattttacaaataaattttgtttttaaatgatactaatactggtcttaccacgggaaacagattattataagtatcataaaaaatctcaaacaataaacaaacattaaaattaataataaaaaattgttgataatattctatgaatatcaactatgtgcatgcttttagggacttacaaaaatcttgttgaaactgtgctggataaaatattaaaatcaataagacaataatgttagttggtgactaaaaaacaataatgtacttatcttgttatcttcccgcaatcactaaaaaaactcagtttttcaactaacaatggtggaaccttcgttctctcaactccttgtcttactcttaaacttactctttctctttactactctcgcgtcaagttccaagacccgattcaagtattcgttagagaagcctcaccacccgcttgacccactaacaacacctgaaataaagagagtccaaaccattctctcgggtcatgatccgggttttgggtccgggtcaactatcattcacgccatggctctcgacgagccggataagcaacgtgtcgtccggtggaagaaaggtgatcttctcccgccaagaagagcggaggttcttgctatgtctaacggcgagagtcacgtgctcacggtggatcttaattcgggtcgggttgtttctgatttggtcaacccgacttttgggtacccgattcttaccatgaaggacatcatcgcagtctcacaggtcagtccggtttaaattcaaatcaaattctcagttaaccggtttaattatttaaattcaaaccaaatctgaggatacgggtatagttattcacactatcaattctcccaacctgtgtaggttccttaccagagcgtggaattcaatcgctcaatcgaggcgcgtgggattccgttctccggtttgatttgtattacgccgttcgccggttggtatggaccggacgaagaaggacgacgagtcataaagatccaatgtttctcaaagcaagacactgtcaatttctacatgagacctatcgaaggactttatctaacggtcgatatggataaattagagatcatcaagattatagacaatggaccggttccggttcccaagtctaccggtacggaatatagatatgcatttcttaatgaaacggtacatatggaccgtgtcaatccaatgtcgatggagcaaccggacggtccaagttttcaagttgaggatggatacttggttaagtgggcgaattggaaatttcatattaaaccggaccaacgtgccggtatgattatctcacaggctacagttcgtgattccaagacaggtaattaattatatcacaaacaagtcccttgaatttagttattgttacaaattgactccaaaagtctatcaagttacgatgaaacccaatttgttgaggttgaaacaggtgaagcaagaagtgtgttgtacaaaggttttgcgtcggagttgttcgtaccgtatatggatccaggggaaggttggtattcaaaagcttacatggatgctggagagtttggtttaggaccttcgtcaatgccacttgtgccactcaacgactgtcctcgaaacgcttactacattgatggtttcttcgcttctcctgaaggcattccaatacttcaacctaacatgatctgtttgttcgaacgctacgcgggtgacactagctggcgacactctgagattcttctccctggtgtagatgtaatgttctattacacaacactattattattttctttatatgatatgatacttatgaaaatgtaatttggatatcgacagataagagagtcaagggcaaaggttacactggtagctagaatggcatgttctgttgggaactatgattatatttttgattgggagtttcaaatggatggtgtgattcgtgttacggtatggttacattatgtgtatgcttaaaagtttctcttaatagttgttataatgaatgaaaaacgttataaatataggtcgcagcctcggggatgttgatggtgaaaggaacggcttacgaaaacgttgaagacttgggtgagaaagaggatgattctggaccgttgatctcagaaaacgttataggagtcgtccatgatcatttcatatcgtttcatctagacatggacattgatgggtcagccaacaactccttcgttaagggtcatctagagaagcagagacttccacctggaaaatcaaggagaaagagttac

SEQ ID NO: 17488 - DNA, 1704 bp, Arabidopsis thaliana landsberg
taccagcacgtgtatcacttaatttcgataaactgtccaacttgaatccaacagcagcgcctgcagaaagcaaagcaaggatcatatcaaccacaaaggttatccgtacagacaaaacaactagcaatgtcttgtgcaaaaagatgtagaacaagaataacataaataatacttaccccttgcagttccttggttcaatgtgttccccaggtaaagaatctttttcataatttcttttagcttttgtgaagagcggacctgatgaataagcaataagtagaaaattctaacaaagagaaatgcatatggactgcccaaaaactagagttaactattgcaagcatcttacctcctcgcacgcagaatttacagcatttaaactttttttgaattctgttatctgcacaaaaaacatcattatcaatagtctaataaaattatattttgtcctccaaagaatcaaatagacagaaaataacggtataagtaataccaccagacctgagtgccgaattgaaatttaaaagaaaagactctaagctttgcctcaactcgtggcaccttcattagctctaggaagtactgcaaaatggatgacaaaaaatgtattaactcagtaagctaattgctaaccattttatagtagaagccaaaacagtgcgagattggttggtaatctgaagacttaaacagacctgctcacactttcccaaggtcgtcttgtcaccagtgtagttctagaacaaaccagacaattacgaccaagaacaaggactcatgtcaataacaagtgaataatgataaccaataattgacatatttcacaaatgatctccaaagtaaagacagaaatagataatgctactcaaaagtcaagacataaccttaagtagctccatctcctccttggttgggcaaaactttataagattctctatttgatcaacatctagtacagactcatccattgccatgactgcagcctggacgatgcaaagaaaaatgtggataattatcattaagctatgaaagattaaccagtaattgacttttactcaggtaattaaggttttggagcttaccatcatatcaggcagcggcatctttaatatatttaagttaactatcgtgttattggctctcttaaggtcaatctggaagaccataagacaaacaaatctccaaaatgaattcacaaaagtatacagacatgcaataggcttcggagtagaagaaagtctaagggaaagagatgctggagagtagcttagtacaacttaaaaaacaaaatattttacagtttccaccagaaagtaatactacttgtttatagctacatgacctaccagtggaactttttcaggttttggttttggtcttggttttgccccaacagagaaaagggtctctatttctggtacatcaagttctattgcactagcaacaacaacaaaaaaaaaagcaatggttgataaaagaaaactcagtatcacagaattgaattacatggattggtcaataaaggtaagttcaatacgtttgtgattctacatattgtatctgtaactcatcccataagctcccctgcaaagcccttgttattttaacccaatgtaaaggcttcagggaagacctttttgttactggacattgaataccacaaaccattcttgcactcttatgatcaaaggcatcaaacctcgg

SEQ ID NO: 17489 - DNA, 863 bp, Arabidopsis thaliana landsberg
gacttataaatgaaaacatgaatctttgttatcactatctttgattaattgacttccctcactgtacatcgtaaacttggcagattctaccgcagaatgaaggccaagtttatgttaatggtatgcttgcattctgtttaattgagcttggacatttgagagaagctgaggaagctgctaggaaaggctgtgagatcaacgaaaacgattcttgggctcatcacgccgtgagtttccaacacttattgtcccggtcttttgttgttacttggtaatccatatacaaaatgtcattaataatgtctctttttggcagttatgtcatgttcttcaaactgaatgtcgttttaaagaagcagtaaagttcatggaagaacactcagattcatgggattcttgctcatccttaaggtaatagcatttacaaacaagtaagaaccatcttctgatcatctctggaatcacctgctaaagaaaactagataatttttgaacattttaattaggttttcgcataattggtggcacgtagctgtttgttacttggaaggagggtctcacataagtaaggtagaagaagtatatgatcatcagatgtggaaagagctggagaaagacgatgctgttgctagagatgtaattcccttatcatttttcttccccttaaaaactgaacttccattagcaatctgatgttttatacttgtactattacacatcaggtttatacggatgctcttggtttgttgttgcgtttagacacacgcggtaacgggatatgggtttcaggacagaacgacccactggcagactctttgctgataataaagaaagccttgtttgcccttgcgttcatatacatt

SEQ ID NO: 17490 - DNA, 927 bp, Arabidopsis thaliana landsberg
  unsure (1)..(927): unsure at all n locations
ctatatgtatagattaaaaaaactaacatagagggcgaatataataaccaaatgtggtggtggtgatcgaaagtgatggtggtagtgactagtgaccaaaggtagtgatgatggtggttatggtgacggtgctggtgggagtggcaaaaggttgtggtgctgatgggagagattaaaggtggtggtgatggtgattaaaagtggtggtgaggatgattaaaggtgatggtggtgacggactgtggtgtgatggtggcggcagtgacggtggctgtnnnnnnnnnnnnnnnnnnnnnnnnnnnnnnnnnnnnnnnnnnnnnggtggtggtgacggcggcgacggtagcctgtggtggtggccgtgttatgatttggtggtggttattagtgatggtgatgaggacaaaattgtaaataatatacattacacaaaatatataatgaaaggtttttttttaggttagttttttaatttataaattttttattggttatacacccatatttcccaaaaaatatttaagtttaggaataatgagcgatttttagattttattttttgcataaagatcaatgtgtggtgaaaaagatcaacgtgtgttgtggttaagtcaaatttattatttttaatatgttttaataattacaataaacttgtatgttatgaagttaaatcaatttgatctttagacttataaataccgttgttgcatataaggtcatttcaatacagaggaagattgcgtttatttttcaatgatagtcaaaaaaaagcaatgatgcaagctattttcttaagaatttaaacatattcccatttcaattatattttgagacctttgttttaatatatcaacccctacgagaatcgagtttcatccatataattgatatttaattaaaaagtactgaaaagctggccaaata

SEQ ID NO: 17491 - DNA, 943 bp, Arabidopsis thaliana landsberg
atttgttcttataatacatctcccgttacaatgggccttattgggcctttaggcttattatataagttatattaaagtacaaggccttgtggtcccaccttagattctctgacatcgacagctacagaacattccataattttggtcatctaatatttttatgctttgataaataattataatcttgattatctattaatttgcatgcttatatttttttctttttttttgctttttttagtactgtaaaaggttaacatttgtatctgtaaaaaagatgtactacagataaaaacatacttggttgtttattggtgtaggagatacataattattgaacaccatttgaattagtctaacatcgtgttcatattatattgcaggagaaaatacctattgaggaagtgttccagcagttgaaatgcagcagagaaggtttatctggagcagaaggagaaaacagactccagatctttggccccaacaaactcgaggagaagaaggtatagtttggttttaaccattatcaaagtcatcatacatgagctaagtcactaactatgtaatggtggtttcaataaataggaaagcaagttactcaagttcttgggttttatgtggaaccctctctcttgggtcatggaagcagctgcaatcatggctattgccttggctaatggcggtggaaagccaccggattggcaagattttgtcggtatcgtttgtcttttggttatcaattcaactatcagttttgtcgaagaaaacaatgctggaaatgctgctgctgctcttatggctggtcttgctcccaaaactaaggtccctctttataaactcccttcaaatactcctctttgcattagcattacgtgcctgtccctgtatacttggcatcgaattacaaaagaaaactatgttacataattagattcttagcacc

SEQ ID NO: 17492 - DNA, 346 bp, Arabidopsis thaliana landsberg
actcaccaattcccatgtttctatcagctctcgttggttatacacctacattgcagtatctcatcacgatcttctgtctcggtgttgaggtatacgtaatggctataacagggcttgggtttgtcgtctctgtattggaagaaagatacggttttgatgcgattaaggaaggaaccgctctgatgaaagggaggaggataacaggattggctttggcgggtgtatttgtgtttctatcgagtttcattggtcatgggatggagaagttggcgaaggagctagatataaacgataagctcagggtcgtggtggaggtcggtggttgtggccggtgggtgggatgggt

SEQ ID NO: 17493 - DNA, 1634 bp, Arabidopsis thaliana landsberg
  unsure (1)..(1634): unsure at all n locations
cttggtgcgaaaaacgttcatgcccaataaagaccatgtccatattggcaatctcattttcaacccattttattatggataaatcaaaggtcatgattttaaagaaaaattgaaaattttcatttttccgcaaaaattgtaaaaatcagagacttgcatttttttgacaaaacggtaaaattgtgtgaattatggcttcaaatgatgtgatttaaacttattaactcaaaaggtttccactatcttggaacattttggttgttcaaaaggttttaatttttaatttttttgcgtgttgtgttttttcctcggaagttcaaatagaaaagaagagttgctttcaccttttcatttttcattcttctatttgttagcataacgagtcaagactatattatataaaaaagggactattattgccaaccgcaacacggttcatccaaaacgcctatcttacttgactctttataatttggggttgtgtgtaacaatgtttccaaaccaaaaaagtccgaaaccaacgactcctttgagagacgataatgaccaaaacaaggtgcatgcatgtgcattttcgtaaaattctacaacgagttaagaagactcttagactctcagcttccgaccaacaaagccaaggcgttactgagccgttgtctttgggtgatttaccggaagaatgtatctccctcataatctctttcacaagtcctcgagacgcatgtgttttcgctttggtttcaaaaacctttgaatctgctgtccaatccgatatagtgtgggagaagtttattccaccagagtatgaatctttgttatctcgatcgcaacatttttcatcgaagaaggagctctttttcgctctttgcgacgaatctgttttaatcaacgttagcaaaaaggtatatctatctaattataaaatgaaaattttgtattgaattatggcaacgagaatgagattcgagcttaactcanaaaatttatgctaatttggagcaatttgatgatggatttaagttccaattcgtgctgctatttgaattctagggagtgttattggtatcttatttacaaaaaattttaatgactttaatcaaatcattgaaataataaataaatgattattttggtttattccaaattaggacttgtggatagaaaaggcgactgggaagaggtgtatgatgttatcagcttcagctttgaaccttccgttcatcacacttggaaatgggatacaaaccctttatcaccttggcaccaatttttaatgatttttttttaagtcgggtggacaggccttgaaaaaaacacgccctttaaaaaaaatgtttcccgcgcgggggggaaaaaaaccccatttttttcacaaagttttggttttttttttttcaaaaaaaaactttttttttttaaaaaacccccccccggggttatttttgaaaaaaaaaaaaatttttttggggggggggggccccccccaccatttttttatgggggggggcccaaaaaaaaaatattttaaaaatatttccttccctcggggggggggggggtataaaaaaaaaccacccccccccgggagaaaaaaggggggggggaaaaattttcttctcccccccccctaaaaa

SEQ ID NO: 17494 - DNA, 1242 bp, Arabidopsis thaliana landsberg
  unsure (1)..(1242): unsure at all n locations
aacagccgcggctgtagctccggtggcatcatggtcgccggaatttttgtttggaattcagattgatggcgaatctcgccgtttacggttgaagaaaggatctttgtgttgatttcgcggaaacagtgacgtgtccggatgagcgatagcccttggatctttcttgtggggccctctaatcttattagctctcgtaggtctgtgtccactgaatagtagctcaagctagccaaacgctgtcgtatggaaggagtgacgagtggaaatactgtcgtttcgtcatttgagtgtcactattttaaacgcgacttttcgtgcctagctagaatattgtcggaccaacaaaaaaactcgataatccatggactcatcacttatgatatttcgataacttgtatgataaatcaggaaatacattgtgtatgttaaagtgtcattagtttgtgtttatttgttacgggctttgttattcttatgtaacggtggttttaacggctggaatgtagctcatgtagctcccacgacggagttttccggctaagaaactcggaaacaacgttcgactccaatatattcaaggcttcttcatgcgtcactgaccttggagtcttgtactgactcacagaagagcctcgagacaagaagaaattcatgagctcatcaaaagcgccaggtttaactaccttaatctcaagtggtccaatgatcttatcattttttcgtccttttctgtagatagagtcgagagactcctcaacggttaagcaacattcctccaagacattagatttgggatcgagcttggcgttcctgaatttgttaccaagttcccaatagagcacgtagtgtcctggcaacgaggatagatctacacggctagtgaaatccatgagcatcaggtcatgtggctcgagcaggagactcgcgtttttcactgccttgagaaggtcttcttcgtaggtcttgctcaagtcgatgctcagaactacattctgtctccccacgaagtaaaattgtggcgcattgttgtggaaaccagtcactcgtaaaacatcccctaaacggtacctatacagacctgtaattcacacatgcatcttgtgagaaaaccaacatatagatttttgatatacattaagaaaacaaaagagtgaanatatttaattctatcatttatagttttctcaagcaagcaatataaagactttttaaaacagaaccctaaaactacatttattttga

SEQ ID NO: 17495 - DNA, 1864 bp, Arabidopsis thaliana landsberg
aagacttggcaacatctgttaagttatgttgtaagatgctataattcgaaggaaaatgtctccttaaataatctcgaaaatttgttcaccaaagaatttgactaatcactaaataaagatgttaaatgtaagtgacagaagagataatgaaaatgatagttataaacgagataaaaagatctgtttcataaaatatctggagattctacagaaattgtagctaagacacatgaagagaaactcaaatacggaagcaacaactgcaaaacactgggaagatagaactaatagcctcccttgagatcgttgacgacatcgtacgggattggagtgacagtctccaaggtcattccttcgaccatgaatcctggtttgggtcctttaggctgtctcttggtgctgatggtctcaccattggctttggctgcagccttgagctcatcgtttttcttcttcctcagcttgaactcctcggcacatcttgactgctgcacatgctccacacgaacatgaatcctcttccttatgatcctgttcccaatctgaaacaaccccaccatcatatgtcagtcataatacccaatataagtagtactagcaaaaatgtttgtgttctggtcataggctaatcagcattacacaataacatctctaagacacttatagaaacaagattaatatacgaatgttggtggtcatttaaagcaaaactagagcaatgcgatagtcatgaaaccaaacatactagcagttcaatggagaagtaaaactagatgcttagctagaactgtgatgcaaaaagggccaaattgatacaacgcaatgcatgctaaggctaaagactaaacgagacctaagcaatcaaacttcaaatctgaaacaggatcaagaaccacactactgcataatagaagataagatctttgagccaaaactaacaatctgagctaaattggagcacagtagaagatttacattctacaaacctaatactcaatcacacatttcaacatcaaatcaacagatcaacaatccaaatagcacaacaagctcaaatcctaattcaaggacacaaaagtttaagggaagtgagagatcatcagacctgtttgttgacttcaacaccgacggcgcgcttggtgacgttccagatacgaccagtacgaccatggtagaacttgtgaggcatacccttgtggatcgcaccattcaccttcacatcgacgtaatcgccgaccttgaaggtcctcaggtaagtcgatagaggaatgtaacccttcttcctgaaaggcctcgcgaacagatccctcgttctcgctcgaactccatgtccagccggcatttttcctccgctttggtggttgcgaaatgtgattagggtttatatatattctctttgaaattagggtttgctcttaacgggcctgttgggtcagaaatttgggctgatttgtatgtaatacccatttgattagttttttcttgtaatcttaacccttgtactgtcaaacttacgtgttatagccccaaactaacataaagtatcagttacaacccaatatcaatggttctagaatctctttcgtttggactttggagatgacaagaagttaatattattatttcagaatcagaaataatgacttcttatcagagagaagctacataaacaatccatgaacaaaaattttacagcgtcagtaaaaaggaggcgtgtaaagaggaaagaaaggagatgaattgaatattattctttaagaaggagctctcattaaaggacctgaatatcagggaatctctatataagcttcttcttctcaaagtactgcttcaagtagagtacctggaaaccagagtcagcaat

SEQ ID NO: 17496 - DNA, 1289 bp, Arabidopsis thaliana landsberg
attatcatggtcattactttgaatttgacttctaaataatactaaagattctgtcttcattataatgtaaacatgtttttaaaagtttacaggtaagaatattctccacaatgagtttggcttttaaaggctatacatcgatcctaaatttgaagaaattgatattccaaatttcaggtaagtatatatatataaatattggcttttttgaaactttaattgttaacattagtaattctcaagatgattttgaaatgcagccgcagatacatgattgaagatgatgaggacaatctaatgaaggaggtcgttgaggagaactaaagctatgatgaattgtatatttttttttttttgaagttaaactctgttctttttgtttttttatatttcttttaatattttgattctattctattttgtaatggtttaagaatattttattttatgaatcttaatctatgttcaaatcaaaagtttgacacgaaacgttaataatttagttcttataaaaaaacaagaatttaccttaaaataagtagtcattggcttatagacttgtgataattcataccaagaaagactctcccaatcacaaatatttcctttagtgctcgagttctgttaaacagaaaaaacagatcttcaaagattagaaaatttaaataaagttctcttttaaaaaaaaaaataacaaagtttaaaactgtttccatatgaatagttgatatcttaatcagtttagttaaataacatcacttcaaatattctgtcaatcttttctggccggagaacaaagaaaagagcacataattaggttcacatattatagaaaagtcatttctcataaagttttgagtgcttagctatcttgtttttactggtatcttttctttgttccccatgtcataaagaaaaaaaattcaagaaactcaatcttcagatttgtctaatgttattcaaaacacaaccgataagcggttcagacatgaagaaacttctgaaaatacaccctcgtctttcaatgcaccaagtgtgaagaaatcagtgccagttagttatgtgtttaagagggttctaagtgatattacaaatcaaagagttcatacaccaagtattagcccaacgcctggcactttggagtcatctttaacatcaaaaacaagttaagtttattgattaatctatattatatatttacgctttagaggttttcctatataacataaaaacatttaacaagaattatttatgaaatgttaacaatgccagcaggagtcgatctttca

SEQ ID NO: 17497 - DNA, 508 bp, Arabidopsis thaliana landsberg
ggaattttcgtatcctaaaatatttaatggaaatttcaacagaggacgctggcaacctaaggtgtttggtgtttgatcacactatatatattctcatttataaacacatatgtgattttgaacgtcataattgtcagggaaggagacgaaagcgaattgggaaaccaagattgctatatcccaggacttgtacctaaaattccagggcggttctactattactttggcaaaccaatagacttagcaggtatctatataatctaagtgtatgctctctacttcaaatcactgacctcattacttgcaataatggcggggttttttttccatggcaggtaaggagaaggagctgaaagacaaagaaaaggcacaagaggtttacttgcaagcaaagtctgaggtcgaacaatgcattgcatacttaaaaatgaaaagagagtgtgatccttacagacaattgttgccaaggatgatgtatcaagcctcacatggtcggtcctgtgaaatc

SEQ ID NO: 17498 - DNA, 2063 bp, Arabidopsis thaliana landsberg
atcgaaaactgctttcttgctcagatgtttccaaatgatatatacataggatacatcattgaggcagctgattctttcaggtttgcgctctaggatctttatgtcctgaaatttgtattacttatcagtctgaaactgtatggtacgtaagttataagactaataagttatcagggacgataagatgatatcattctattattcttaaaactgcaggcaggtaaggttacactctgcagtgctagacacaagatcttcagtccagtgggttgtcgccaaagtgcaagataaaattatttcaacaactttgagaaaatatattgtgatgagttcgaaaacaattaggtgagccttccctttcagtagcttgagaggctgaatttttctttcgtagctaactcatgtcattgagtgtctgagcaagccaattgactgcatgttttgtgatcctatggcaggtacacgtttgaatactacgacaaagatgaaacaattgtggctcatatagctggaggtattgatgcatttttaaaggtctctgatggttggccactgctgaataccccattgaagcttgcatctctcaagaactctgacaatcagtcaaagggaatttctctgagccttatctgcaaagttgaggtaagatcatgtttctccaaactcaacactttcttctcgattttacaattccatcataaacaaaggtcttctctgttccttctcctggtcattgttgtcagtcttatttaatctctcaaatcgaacatttaggatatataataacatgattaagccattgtcctagaccaaatacagtttgcaacattgtagatgtaagtgcttttggttttgctaagcgtaacgatttgtctcttgctctactcgtcaggaactagcgaattccttggatttagagacccggcaaaacttatcaggcttcatggatgcaattgagaaaatactcgtggagcaaacccgtgaagaactccagtccaataaatcctcccaaaagtgagtaccaagaaccacctcaagagtttgtgcagtttctatctccttattgtttttgtcttgggttgttatctgcaactctttgttgtaatactttggaattgtgtaccaataactgacacaagtctagtttatgtccttaagtttcctttatatatcaacatcttcaacacattctgatgttactatccgccatatataatcggagaagtacatgaaactacttttgcttatacacccatttgtgcatagaactaatgaaataatctccaaattctttgttcctctattctagttaatggagtaaaacacaaaccatagttatactctttttgataaagaagtacagttatggaataaatgaccaaaatctaaatatgccattaaatcaaagagaaaaattccgattcacgtgtaattttggaagtatgagatcaaatacataagtttgaaatatattagggaccacagttgcaaatatagcaaagtaattaagaagcctctaaattaaaaaccattagataaaagattcgacctttttttcttcttcttcttcttcttcttcttgatttcatagaaaccctagacctgcaaattctaccttcgatttcaccattcttatctttctagttaatggtaatggaatcttaggctctgcttcttgttgattgtaaattctcgaattagggatttagctctcatttgagagattgaagaagataaaaattggtactttatagttgtaatggcttcagatcgtggttctgcagcttctggtggtaagcccatttggatgaaacatgcggaagatgcaaaaatcaaagacgaaggagagaaagacgctgcggcaaaagcagcttttgaagctacattcaaaggtgtagaccaaactacacatttgattgaacctgttgcaccggtaccggaatccgcaccggaatctgatagtgattcagatgatgatgatgatgatgaatctgattacttgtctaggaaaccaattggtcctgtggatccgagtaagtctacagcttctggtgctggtattg

SEQ ID NO: 17499 - DNA, 4369 bp, Arabidopsis thaliana landsberg
taccactcaaatccttagttgaagtctttgcctgagtctcttgtttcacattcatcttaatgactcagagaaaacataccctgaaccaacttattataaagggggaaagaaaagttggcttttgatgggcacataagatgattgtgaagttgatggggtcaaacaaggatttgcataggcaagcgaagaacaacaacaacaagctgactccaaatcggtccttgaaggagacgagatcgagattatacataataaggcgatgcctcgtcatgctgctctgttggagagagcctcgtgattaagactcttctttctctcatcctaattcactacattggtatgtacgtgtgtatacactcctacataagtatatatatttcgggtaaaagagtaggttagtgtataatgaagagactaaacccctgttccacaagaagaccacacattgctttggatggagaagttatacggaaggcgtcaaacattttcaatgcagatgctatacaaacctcagcattaagaaacacatagaagacaaattaccactatgagtatatgaaggatttgtatgcgtttgtaggtgtacaagttaggcatttgtattcgtaggtatatttgttttctaaggctttagcactatgaaggattcagagactgattctttaatgttataaagtcagtccaaatcttggaacaatcaactatgtttatatgtacaaaaattatatgaatgcaagtagtcaagttcataatcttgaaacgatttgagatacaaacatacatgcctaagctttttaagttcatgatcaagaaaaacactgagtatgatcaaaatcatccaaattcttttctcattatcaataatattattcgttacaaaagatgatttatatagcaatgaagaaaccctaaacccattcctaacgaatcttattagagactaatggaattggaatcggagactgacagttacacaatgtcttcggagggacgaggagtagcggagacgacgagaggaagatacttagcatcgtcatcgtcgtcaagatcggtggtggagagattgaggcaagcgcagcgttcaagacaggtgaagaaggcggaaacaacccatgtggcaacctgatcgagtttcactcgagaaatatcgctcacgctgccattgttgctgccgctctcctccattgatagattcttcggagcaattcaaaattagttaacggatttcttgggttatttctttaatctctcctaattagcttcctatttatggggccgcttaattaagtagaccacttaagggaacggtaactattttgttaacgcaaacgataaaccatttttaaagtagaccaattaaaataccgtttgtttatttatcaacgaaaacggcgtcgtttaaagtagaccaattaaccaaacgttgtcgctttgaccatttttttttttctttcttcatcttcttctttctccggtgagtcaatttggatgcggagattgattgtgacggggattgcgacatcgacggcaaagggatttcggagagtagttaaccctaaccttttaggaggaggagctgctgctagagctttttctgattaccgagagaaactgagaacagggtttcttcactctatcaggtttgaagatgcgtttgctttgttctttgagatggttcattctcaacccttaccttccattgttgatttcactagattacttactgccactgccactttgagaagatatgagactgttatctatttctcccagaagatggaactctatggaatctcacacgatctctatagtttcaccattttgattcattgtttctgccgatgctctcgtctctcttttgctctatctgttcttggaaaaatgatgaaacttggttatgagcccagcattgtcacctttggctctctgctccatggattctgtctcgtgaatagaattggtgacgccttctctttagtcatttcaatggttaaatcgggatatgagcctaatgttgtagtctacaacactcttattgacggtctctgcaagaacggtgaactgaatattgcgttggagcttctcaacgagatggagaagaaaggtctcggagccgatgttgttacatacaacactctcttaacaggtctttgttattctggtcgatggagcgacgcagctcgaatgctgagagatatgatgaagaggagtataaaccctgatgttgtcactttcactgcgttgatcgatgtatttgtgaaacaaggcaatcttgatgaggctcaagaattgtacaaggagatgatccaaagctctgttgatcctaataatgtcacttataattcaatcattaatgggctgtgcatgcacggtcgtctatatgacgccaagaaaacatttgatttgatggcaagcaagggttgcttccctaatgtggtgacatataacactctcattagtggattctgtaagtttaggatggtagatgaagggatgaaactcttccaaaggatgtcttgtgaaggattcaatgccgacatatttacttacaacactcttatccacggttattgtcaggtgggtaaacttagagttgccctagacatcttctgctggatggtttctcgtcgcgtgactcctgatatcataacccactgcattctgttacatggtctttgtgttaatggggagatcgaaagcgcactggtgaaattcgatgatatgagagaaagcgaaaaggtatattggcattgttgcatataacatcatgattcacgggttgtgcaaggcggataaagtggaaaaagcttgggagttattttgtagactccctgtcgaaggagtgaagcctgatgctagaacatacactataatgatactaggtttatgtaagaatgggcctaggcgtgaagcggatgagctgattagaagaatgaaagaggaggggatcatatgtcaaatgaatgcggaagatgaccatctagaagagcatagctcaagtaataaggagataagccttgtcagctaatgttatatgatcagagtccagtcacgtttttttgttgggactctgagctaggcttgtttgttacagtcatatgaggggactgtgtagattggttttggtcaggagaagcttgaagtgtgtggtacttactgaccggtgggtaaagaagcactcaagcataaaactgctgcagagatggtgttgcatctttagaattctgtatgcttgtacattagtattaactaaattcattaatttgacatctaacttactttgtgttgtaattctcttgtatgcaatgaaaatgaaatttcaaatattgtaaatgcaaactcttgtgttattgaaatgttgaaaacatatcagttttgaaaacagtaatctgattggactttgaagacaatttaaagtcacaatcacaatttgtctcaaaacgacgccgtgtctagaaggagacattattattattcagatacaactctatctggtcgccggagcaatggtcgtcgttggtagggttcggcgcagagtttgagagagatttgggaaagaagcaaatcgaatccattttggatgcagagattaattccgatagcgtttccgtcatcggtgaaggggtttgttcgtcggcattatcttcttctggagagaggtaacaatcccgagacttctctctctcgatctttttccggtgcgagtcatcatcatcattacagagagagattgagaaatgagcttcactgtataaagtttgacgatgcatttagtttgttctgtgagatgcttcagtctcgtcccattcctagcattgttgatttcactagagttttgactgtcattgctaagatgaacaagtttgacattgtcatctatctctaccacaagatggagaatttgggaatctcacatgatctctatagcttcaccattctgattcattgtttctgccgatgctcacgactctctcttgctcttgctctgcttggaaaaatgatgaaacttgggtttcgtcccagcattgtcactcttggctctctcctcaacggtttctgtcaagggaatagatttcaggaggctgtttctctcgttgattcaatggatggattcggattcgttcctaatgttgtcatctacaacactgtcattaacggtctttgcaagaacagagatttgaataacgcactcgaggttttctactgtatggagaagaaaggaatcagagctgatgctgttacttacaacactctcataagtggtctttctaactctggtagatggaccgacgctgctcgacttctcagagatatggtgaagagggaaatcgatcctaatgtgatatttttactgcgctgatcgatacgt

SEQ ID NO: 17500 - DNA, 689 bp, Arabidopsis thaliana landsberg
  unsure (1)..(689): unsure at all n locations
gaaagagccctattctgtgatagtgttcaaagatcatcaatgaattcccagtctcaaatgactgaaagttcatttccagtacccatgactccacctccaagagttgatcctcctccaatgaatcactctgaatttgtagctgcttatccacatcttgcaacagctacaaatgtgaattacaggtttacaggagactcaagcacctccagacaagacttatcatctggttcaaacaatattctgccaagaagaactactcatttcannnnnnnnnnnnnnnnnnnngaaactggtcaatcctcaagacaaaatgaaaacagagaaccaagaagacctacagaaagaatgttgcctccatctcactttgatcatgttcaacgcgctggagggattctgaaacctccaaaaaaacgctaaccaatcgatcagtttctgtcattttttgggaaagtttgcaggcctagaagcaacacagcttcaagtttgaagaagtctgcttagttgagtatggcttttggttatgacatactctctctaaattccttttgatgtaatgtttcagtttggttctactttactttcagtaatgttttttcaatttcagttgccaagctttgtaagggaaagtcactgattaaacttttgtatctctaaggggattgaatgaaagcaatttcaggaaaaaaaaa

SEQ ID NO: 17501 - DNA, 1369 bp, Arabidopsis thaliana landsberg
gaacccaggttggtattgtacatgaaaatatatgaagatatatgtactttctcttccagttattaatatgacgatctttttacattacatattcagccgctcaagaatctcaagaagatggatttgtcaatgtccaagaatttgaaggaaatcccggatctttcaaatgctacaaatctggagaatttggatctgatgggttgcgagagtttggtagagattccatcctcttgttcgcatctgcataaactacagaaattgtcgatgagtaaatgcaaaaacctacaagtcatcccagttcaaatgaacttaacatctcttaaatacgtcaatatgagaggatgctcaagattgacaaatattccagttatgtcaaccaacataaaaaatctgtatatatcagagacagcggttgaagatgtgcctccatcaattaagctttgctctagtcttgagtatctcgacataagcggcaaaggaagactcaaggagataacacatcttcccactagtgtgaaatatctagagctaagcaattctgatatcacaaggattccaggttccatcaaagctcttcagttactacaaacccttaatatatctggctgcagaagactcgcatcattgccaaagctccctggttcgctcaaatctctaatggcagacaactgtgaatcactggagaccttatgttgccctctgaacactctaaatgcgcgcctcaatttcacaaactgctttaaattgggtcaacaagcacggagagcaattatccaacaatctttttttccaggaacggcgctcttaccaggaaaagaagtgcctccagagtttgatcaccgaggaaaaggaaattccttgaccattcgtccagacggtaacccttacatcggctttgtggtatgcgttgtgatttcccataaccagcatatcacagaaagtttctccggactattctgtcgtcgcattatagctcaagatgacggctatccagttgagggatttgtctacgtaggcgatgtctccaaatgtcgaaccgaacatctctttatctttgactctcgctttatagaattctacccatctgaagactgcagagagatagtgtatgaattgagcagcaaatccaacgacttcaacattatcgaatgtggtgccaagatctttactgacgagagcatcaaacggagttatgaatctgctggattagacgaagtgttagaagacaacgttgagttagaacccagcgaagtctttgaagatgacaccgaatacgctgaacctacaaagaagtactctataactatagagaagacgagaatctcggtgaccctaaaaatcttaacagcggaaaccattccaaatggtg

SEQ ID NO: 17502 - DNA, 1044 bp, Arabidopsis thaliana landsberg
acttgttcacatatatcattgttagccgataaattgtcctgttaaatcccatggacgagtttcatatgacttcccaatgatacttcgtttatcgcttacagttccatcttctgtttggtactctggaaagtaatcaatgaatgtttttgtgcctaactcatccaccccattgaacaggaaatcccttagcagctcctgattttgttcaaatcattttcaatatcttcacaagctaattaataatggggacactaatgggatcaaatcttttatacctttgcctttgcttcacctactaatcttttaagaagaccatgtccaggatcctgcaaacaccaaatcaatatccattgtaacaatacagatacagtgtctgttcaaacatgcaaattacacaaaaggaaatgaaatcaccttttgtgctcgccatgtcaggtacttgtgttgtgcttcacaattggctctcacatgagatggttccatctcctccctcacttggatcgtcatctcaagccatgcctgtaggaagaagatgatagattctcagtcttagtttccaataaaaccttagcttttggccgctgagtatatacctgatagtactctagaaacgcagagaacaaagccttatgtttttctttgctagacgaaaacctagtccacatcaccaaaggcgagaaaaactttatggattcaccagtcaatttccctccccatgggaaagtctgcaaataaatctcaagatcagtcatttatacctcagcattaggtttacttgcaattgagtaatttagtgtattcttgtggtcacctcagcatatttgtgatatatggacattatcttgttataatacttgtcttggtaatccgtctggtcagtcaactgatgcaaaggattaaggtccctaaagaagaacatacagtaaaatattgaacatcagtttggacaatacagacctgataactccagcataactagaagataacttacaatacaactatgttaacgttggtagatgtgaaaagttagcacagaatatggga

SEQ ID NO: 17503 - DNA, 693 bp, Arabidopsis thaliana landsberg
atctaaatatatatatacaaaactacgtgttcttttttctgggtcaactatacaaaactacatgttaaaatttgaatatgagaggcgaaaaaagattacccaatttaggtggagaagtgggtctgcaaaggatgggataagtcttgcctgcagaccaatccaccttagcttgatactccactagaggtgcatcaggagaatcagactctcttgcagcaaaagtgatgtagtacgttgtcctgccccctgggttgaaattagccctcaaaacatgatccaacttcacattaaatccctggaaaaaagagacaagaataattaatgggtcatatctcataaatataaactagctaggactctgaaaagccaaagtagagagatgttgttacctttcgtttgttatatttgtcaacacaaagagatgccatgtttcctagaaactgacgaactgtcacacctgtacgcatcttttcatccagaccacggagtgtagcaattccaccccataggtaaggggggaattcggcacttggactaaaaaaaacctaaaaccaaaacaaactactaagttacttgagaatttataatgacccatttagcaaaaatcgatacgtatagagatggaaaaggggggtagacagaagaataccttggtttcgatgaccgtgcgcttgaaaaacgggccctttttta

SEQ ID NO: 17504 - DNA, 1341 bp, Arabidopsis thaliana landsberg
aataagaatgtatactattctttttgacgatagaatgttattaagaaaagtgtatttagtctagtgattaacggtccaccttggcaaacccgaccggagttcgattccactaggttgtggttatcccgcgttagtaggaattaggttatagttaatggcttattgtaggactgtacttgtgcttcgtctaattaaaagttacaaaataattttttagcttaaatgttaaagctgcgaaaacgattaagacaataagattatattatgagttaatttaattttatatcttaacgatggccaaatcacaaaaaaaataaaactatattgattaaaactataaaagaaataagattattctttgacaatgcttcacaccgttctagttaaactaacacaaatatactacttcaatttcacaacaattaattacaatagtatattggatatcaaagcctcaaaaaacaatgaatcatactactaatcttgccaagttttgagaaacactaagtagtagaataatttctttcagttttattaatcagtccaatatgtttatttatataaaaaatataatttgtctaacaagtttttttacatttatgatacgagtaaatttacctttttaagaataagaaaatatatacaattgttaactttcctaataccaataaaaatatatatttcacatcgatctcatgcaattctgttagatatggtatctttgctgatcctccaaattaatatgcaaggtctagctcatttttctagtatgtgctgtttaggttcaaaataatatcctggaggaaatgaggttggtaattagaatactattttaaaagttatgttattaaatatctctaaatcacatgacattggacatgttggtttaagtttgaagataacttgatttataagttattaattaaaagagagataatgtgtgaatctttacgagttatctaaaggttctctgtttaggagttatctaaacatattcctaatgtgattagtattagtcttatgaatctctatatgtttaggagttgccaaggtgtggtatatctttaagagttttgagagagataaattaaggagctttagttttgagttattttctaaagttaataagagaagatcttttatatttcctagatcttatatttaaactatagaggccctataagattattttcaattttcttctttagttcaaggatttaatccatatacatggtagttatgtatatgcaaaacctgaattagactatttaatctttttaatgtaatttgtcgtggaaaaaattgaagatgctttgaaaatgttagctaaaatgtttagta

SEQ ID NO: 17505 - DNA, 1124 bp, Arabidopsis thaliana landsberg
ccacagacgcaaagatgggaagaagaagacaagacgcatcaaggagatcgtctactacgacagtgatgagtctacttcctcccaaaaggacgacgaccacaacgaatacgagagaaagaaaccggtcaattcgaacttttcttttgattactctcgtattcctcaaagtactaatgctcatttattatctattccacttggtaaacctcgtcattttgatggagaggactacggattttggagtcacaaaatgcgtagtcacttgttctctctccatcctagcatatgggagattgtagaaagtggaatgcactttgatagtatggatagtcccgtgtttattaatgaacagattcataaaaatgcacaagctactactgtgttgctagcctctttgtgcagggacgagtaccataagctgagcggcttggacaatgtcaagcagatctgggacaccctcaagatctctcatgaggggaatgatgtcaccttgctcaccaagatggagttggtggagggcgagcttggacggttcgcaatgataaggggcgaagagcaactcaaacatacaaccggctcaagacccttatcaacaaaataaggagctacggaagcacgcgatggacggatcacgacgtcgtccgcctaatgctaaggtcttttactgtccttgatcctcatcttgtaaacaatattcgtgagaatcctaggtacaccaagatgacgcccgaggagatacttggaaagttcgtgagcgggcgaatgatgatcaaggaagcaagatacgtggacgacgcattgaatggtccaatcaatgagcctcaacctcttgctctcaaggcaacaagaagcaaggagacgctacctagcaaggtggcacaaatcgaggctgccggacttaatgatgaagagatggctctcatcatcaagagattcaagacggcgctaaaaggtcgcaaggggtagccaagcaagaccaagacaaaggggaagcgctcatgcttcaaatgtggtaagcttggtcattttattgctaactgtcctgacaatgatagtgatcaggatcaagggaacaagagggagaagaagaagaactataagggggatcctctagatcgacctgc

SEQ ID NO: 17506 - DNA, 1572 bp, Arabidopsis thaliana landsberg
aacaccaccagataagtaaaggaagaagagacgcaaggagaggaaactagtattgttggtttcaaggttttgttttggtttagggaaaatgaaaaagagagggatgagaataggaaacgcagcgttttggatcagagcttgcgtccatgttcctttatattgtagatcttggtcatactcttctcgacggtcttgcttcatttggacatagaagaagttcaagagaagcatgacgagagaatctccgagtaagactaagaaaagacataaagaaacagagatccaccattttctttgttttagctccaacgatcttcttggactcaagatttggtctggttctggattctgaacgtgttctgattcttctggttgttaaagaaaatatttagtttttattttgttttcgagtacagaaacaatattataaaacttatgataagaatttgaaataattaccatgtcttgttgtctgtttggaagctttggacatctccattagttttctctggtacctctggaagtctgaacacccttaaatatgcagatttcattctctgtggaatgactagttctatcttgcaattagaaaagatctttccacttataccgtacgaaatctttttgacagatcagagttggtactagtcaaaacccggaaaggtattactgtatatattatacaccactacacaaggttttatttaaacgtacattaaaacctctataaattaataatgttggaacatgatatttcattaatttatagaaacttttgttttaattgttaacaaaatataagttaaaacaatttgatcaaaataaaattaatattttggaggttataaattttatagtttcagacttaaaacatttaaaattacatataaatgcaaaacagagaaaaaaaaaaaaaatcaaactaaaccaactaataaataaattacatagtttgatccatatctatacaatatattttggacattgacttacaagaatcagaataacaagaacaggttgagaaacacaagaatacatttgacatgagagactaaacttcaacattgttctcactttgcttaagttccgccatcttcttcttgtttctcttgtgcagagtgtagaagtaagatcctaacgcaaaaactgttccaatcaaagcaccaattctaggccaactaaacacatcatccataaaatcaaatgccaagacaacaaacaaagccacaaatggtgaagcacacatatgaacaacatcaccaaaaagacccgaaacataatgcaccaaacctatcatcccgaccgcccaaacctgccacgacaaagccaacccgaccaaactctttatcgtaatacgtttcccctttcttaaacctgcgtgctatcgcctttcagttccttatactcgtcactcgcaaacaagcccacgagacaaacaaccgaggcgacaaaagcgacacatatttgcatctctaagaccattctaaacactttctcgttaccatatctcttggtcttcacttggagtttctcgaacccgagttggattaagcaaagagataatgagaaagc

SEQ ID NO: 17507 - DNA, 1524 bp, Arabidopsis thaliana landsberg
ttccattttatccgtcttagccggcgttttcgctcggctttgtggcggtcgccacttatctcacggcggagaccacgacatcgaaggttgggtcgagagaaagtgtcgtagctgcatcgatgccggcattcctgccgtatccgctgctcctccacctccaccgccgccaccgccagcaacggcggaagagcagagtaagccagcagccgaggagcaaaccaagaagtgaagtaaaaaaaagggtaaaactacattcttcgttttagctttaacactatgtaatatcattaattttgaaaacatgttcctttttttgttatgtaccttagtctacggacattgatttcggaatttcctcagatgttttatgattatttatgtctttcaaaagaaagaacaaaagcaaagttctttgtcaacttttaactttaaataaatccgttgagattaaagagcaacggcattaaccaaaaaaaacaccaagatttactttatccttatagcaacaaaataagaggaacattcacgtaaaaagtaaatcatttaatacaatggacttttggtaaagtaggccaaaacataagagcaccctaaatgggggttttaaacaagtttcttaacaaagaataaaaaatttatatgatttaaatattacataagtctcttaaatttgatgaaacttaggcaaattgtctcttagttaagagataattggtcttggtttcaccaaatttaagagacctataattaaaaatattatttatctatacttacactttaattttgtttaagagacttaggcttagagactaccattgaggatgctcttaaacaaccatttttaacatctggatgtactagttgtttgtaatactgttctttccttataagaaataaagaatacaccatttgaaacctgaaagatggccaagcttgaggcctattaaccactccaactagaaccacgtcctccacaacacagacaactctgtggctaaccatactctccaccgcccagacaacgcaaagaaaatgggcttccaatttagttttaatgtttgtgaatgccggatgactatgcagcaaaacatgtcctgattcctctcttagaactcagtagacaactgccacaaagtttcttttagaccaggagaagccaatattacactgagccctttgacttgtaccagaaaacacataagtgacataaccagtagggctagtccctgtttcaagagaatttctttcagactacacttcctacgcagcaaaccaatcatccacatcctctctcactttctttatggtttccaaagcagagaatgtttttccttcaaaaaacatgaggtttctatttttccaaattctccaaataatccatgggaaggggcatgataatgtgacatgcctcaaatttgtctagagaaaatagactctccatcaagaaccacaagtggcatctgcagtccattttcacacccctatgcgtcagaagatccataacatgtacaactccacttagaa

SEQ ID NO: 17508 - DNA, 963 bp, Arabidopsis thaliana landsberg
cgctatacagcactactctaacccatcctcataaacctattcactactcagacatcataacagaaagcataaacgttgaacaagttgaaaacatgataacaacagtgtaacagcaatgtgataacagaatgaacaacagtaaacgaaatcaagaacaaaagctgaatattgaatactgaatagataaagataaatccggattacaaaaggtctagaacacaaggtctgcggaataaaactagataaaaacttgttctcaaaaatgtgaagtgcatgctacttatagcgaaataattccgaaacgctaatactcaaaacgacgcagtattaggacggattaagaacagtactcgacccaggtggtcgagtgagtggtcgagtgataagctaaagtcttcttttcttccttgtgcttgagtgtctggttgagtgcggaatggagaagactctgaagctggcagtcgagtaaggacgtcgagtgaatgatgataagggactcgacttggtggtagagtgattggtcgagtgaatgatgatggtgatactcggccatgttgcctagtagtcgagtggtgaatcgaagtggtgcaggcagctaatcgaccagggggtcgagtggtgttgtgaagtggggaagtcatctactcgacctcgtggtcgagtggtggatagagtttcgcggttgagtgatttgctgtagaggttgtggccgagtacttcaggaactccaggatgactgtactcgagctcgtggtcgagtatgttgatttgatctggtccacttcttccaattagctcaccagcagctccaaatcacctgaaaacaatacaaatatgcaatatgcatgtaaaactatcctagacatgcaaagtgatgacaattgatgagaaatggtataaaacagtggtgatatgatgataaagtgatgacaaatggatgcacaaaacgtgtaaaatgcacac

SEQ ID NO: 17509 - DNA, 1017 bp, Arabidopsis thaliana landsberg
tgaattcaaagtctcaaattgaaaacctgcaactaccaaagtctcaaatcattgataagaaaaactgtaactcataaacacttgcaactcatgaaacctacaactcaacctccatcttcactatctttcagttattggaaagaaggtagtgctgcttcgtattcttaaaccaaaccttgcagaaacctgccatttctcaaaccaaaacatgcaaataacctgcaatctataactcaaaaaattaaaagctgcaatttttcaaaccaaaacctgcaacttcttcacacgaagataacctgaaaacgaataaggcaaagaaccataagtatttgagatgaaagtctatgtgaaactcctctacacttctgtagctgcagtattaaacaacagaagcatagatttttatcacactaaaccatataaaaacaagctaatcactccttaatcgcagtctataaccaaaaaaagcacagctttattacacaaacccctaatttagatagaaactgacctttacatctagagcattaacatcgagatgatctgcgattaagaatcggaaccaagaagattagtataccagatccaagaactcgattcacctgaaaaccagagagtttccaagcaacgtaagtcaaaacatcgatatgattagaaacaatgatcaagatagaatcaggagaagctttaaacaatgaagccaaaacacaacgtttataagaaataaatcctatatggattatcaatctgacagaacaaaaaagaagtagattcttaccaattacgatttacgagcttccttcatcgattactctccagaggtcgatatgaatctccgatttgcatcatctctcgcactccgatcgtgacatgcggctctgcaaatgatgaatcctgcccaaacactcagtactaccttcaatcgtcgccagcagcctcagttgtgacctcaatcacaggagaaatcagaagcaatcggcatcgtatgtttcagcaaagaacagagagagagagaga

SEQ ID NO: 17510 - DNA, 1208 bp, Arabidopsis thaliana landsberg
gactctcgatgagcatttctaacgtactcaaacgttgaaaagacttttcagattccagctcagctaccatcttctccaaaagttccacgtgagatttctgcaaatcaaagttctctaacaacaaatgtttttcatctaactcagaggtgagttcttcaactcttctgtctaagttgtttctcaaatttctctcaattttcaattctgattttagggagtcgagatctgccaacaactttatattagcattcatatgctgagctcctacattacgagagtcattgaaggcagtcagtacctcaaaatgatccttgtggagcttgtcagcataagtctcccattcagttcttgtgaaaacaatctggatatctgctgctactgagatttccatcatctctaaagttttgttctcttgaatataggcaacctagcaattgaggtttttaaaaagtagtattatctatgtatgaactcgtaattaactaaacggaatcattaaatgatagtttaaacaaatagattactaacaatatatatcaaggataagttcttccgttaaacctccataacattttagtggagattagaagttgagatgattgtgaaatcctaggcatagattctaactccttttgtgtctcttcaagattgcaggttgctaagagggagatctccactgtctttaaacactttgagttagcgagaatgtatgtcatcagtagttttttcgcatcttctcttcctccatagcctctccacctaaaggtctctagatgagacaacaagcatccggtaatagaactcggctggttccaggaaagtgagcgacactcgaagtcctggtatcagtacaatatattttaattttaagttcatcaaaactagatgcacttatttttaaggaggatggaaaatttacattgtcaatcgtatgagttttaagtttaggagaattttgaagcaaaaacataagtggcatcaaccaatctaccaaactaattggaaaaaagtaaaactctatgagccaggagaacttgatggcgttacagcatgcagcctgcgtgtgataaaaaaaaattaacattatagttggctaagcaacaaagaacaaagaagaggtacagagatatgtaataaccattgatttgctaaacagtaagaagagatgtttgacagaagaaagagatctcagaaacttttatcggggt

SEQ ID NO: 17511 - DNA, 4477 bp, Arabidopsis thaliana landsberg
  unsure (1)..(4477): unsure at all n locations
cattatcgttgttttttgtttttgaattactttatctgcctaagtaggctttaaacaaatactttgcctgaggaggcttttaaactttttctttaagattatgatcccgagagggctttccttgtgctaattttgagtatgaatttgcaaattccatctctttaaatagcgtttttgtttaactatgtggtcaagttacgggatttgtaggttaatcagacctatccctaaaaatacggacttgaatccgcgaactccccaactcgggttttgtcagttcgattatttttgcgggctctgagcctttactatttactctgcatttaatggcccacttatcttaaatgtgacagttgccttttcgtccttggaaatcaggaaaagtgtcacgctcctaaggcaataattgcatttttctcgattcccaaaaatggataaactcattcggacacgcacaattattaactttgtggtttcgagtaaaactctaaatcactataaataagggcataaactttcttaactctcaaaaaacatgatcgcagaaatttacttgaacaacacctatagaatggaacgcgaaggagcatccaccgtctgtcccctcgaccccgggagtcccttgtttttgtccggcgatggcttcgagcccgccggcgccctctttccacacgcttgtttccactttccttcgaaggaaaagaaagaggcgtacaactttatggacaaggtaaagtctctcttgttttctttttcggaacgagttctacttgttttctaaccagtccatactttaggtcatcgacaagaatcgccgcctatgcgatgaaatgtagcgtttgcctaaacgcttgaggcccgaattgctcgcatcgagaggaagataagggacatggagagcgacccttttcagtgggagtggaggactttgactgcgtggcgaagatcccgcacatgctctcgatgtacctccgtgctcgaggccaagtccccggtcctgtaaacgctccggttcaagtgatcccgtctgacagtgaagaccgtgaagattaggaggaggatagtaacccctggaagcgcgtgaagtgaacccgacgtggacgacaaaaacgaagcgtccacttcgaaccccgaaccggcgatgaaggagcctgttcctgagccccttcactaaatgttccccgagactaaaaaccctcttttttattttcgcttggacctaactactgggcttcggcccatttatttaagggaactttctaattttccttgattcatcaaatattcgttttggagatactctttgaatgcagggcgactaaagcgacgtgaatgcttccgcgaatcactccgactttaaatggaatcgcatctctgaaagctaagagacctccctataaattccctctttagggttcttttcactccttactaaccataccgctcttttcttttgcagttatggccttcaacctccgttgctcggaatccatgccagacttttcgaggatcggnnnnnnnnnnnnnnnnnnnnnnnnnnnnnnnnnnagaggacgccccacacttctcagcttcagatcccagatccgagctccgtgtgcacttatcaaggacctttcgagcagagaccaagacatcgcgatgtccttcatcaaggctctcgcgactcaacacaaaaaacactcagaggaaaagaagaaactccgagagaagatcaaccaaatgctgcgaagagtcaccgtgatatcaagggagttacacaccctcaactctcaccctggagattggatcaaactcggaattgcagaatttcctcgcatcccggattgtatgatgcccattcttgacatcgccagtcaaggggtcgaagtgttctgcaagacgaggaggatttcctagttgaaaggacttcggcacattttttcttgttttccgctttgaataaatttagctttgcttcctgctttgtacattcgcatagtcgaactccttgttttcattcgttcgtataatcaaactcttttttaacatgaataaaacaaattcgattaatagctgaactcgtttcggagctgcctacgtacccatttcgagatcaagcctcacagtagttcttgtacaaaaaatgcgtgtcttttttttcctttttgtttcaaacataaaatttcttcaagttcaccacattccaaggacgttggactggtctgtcctctaaatgtttcaatctgtaaacaccatttcggaccacctcggtaacaatataaggaccttcccaattaatgccaagtttgccagctccttcctccttcttgttatcgaacacacgtttcaaaacataatcgcccacaaagaaaggtctgcttttgactttcgaattgtaataccgagctgctgcgtgttgataattttgaattcggattaaggcttgatctcgcctctcgttgatggtatccaacgaatcgtcaagcattgcagaattctttttttcattcaaaggagcttccgttcgatgaagtccttgcacattgagctcagctggtacaactgcctccatcccgtaaaccaatgaaaacggggtttctccggtcgaacgcctaggagttgtgcgatatgcccataagactggctgaagttcatcataccagccccctttcaaatgattcaaacgtttcttaaggttgcttagaattgtcttgtttgcagcttcggcctgaccgttcccttgtggataccgcggagtggaataactgactttaatcccccagtccgagcaaaatgcttcaaactcgtgtgaaataaattgtggcccattgtcagtaactatttcgtatggaacgccgtgcttgcatatgatgttcttccaaatgaaagtctttactgccgaatctttaatattcacatacgcttcggcttcaatccacttcgaaaaataatcagttagaaccaatagatattgtacacctcgggtcgacctatgtaatggtccaataatatccattgaccatctcatgaaagggtatggggcggagatcgaagagaataactccgaaggttggtgaatgagtggtgcatggagttggcaacgtttgcatcgttgggcatacttaacgcagtccgtgatcatagtaggccagtagtaacccattctctttatcttgaaagccatagcccttcctgaggaatgacttccacacaagccttcatgtacttcgctcataacaatctcgacttcgggcccaaaaatgcaaagcaagtaggggtcacttacacctcgtctatacaaagaattccttgataaacaaaatttcgtgctaacgattctcattttcctagcttgccatttgttctttgggagctcgcctgtaacgatgtaatgctttattagctccctccaatcagccccccaatctttagccggaatttggtcaacttcgtgaaatactcgagcttctggttcgggatgttcatttggtgctagtatatcctcgtcaacccatggttcggtttcagcttcgattgtagcgccggaggtgatttcttcaactagttcgatccctgtattttcccgcacagcgagattaggtacggttgcttcctttgactttcgtcttttgacaggtggtaattcagcagcagcgtcgccacgatctcgggttgcagctcaggaccttgtgattaccaacgcctccttttcttccttaatactcctttccaaaatactctctactggaatgattcttttgacttctggatcggatgttgatgccagggctgcgagtgcatctgcggtagtgttttctcctcgtggtatgcgaatgagttcgaacttcttaaaatatttagccaaatctttgaccaccctcaagatatgcctccattcttgaatctttggcttcatagtcttcattgagctggttaacaatcagttgtgaatcatagtacgtgatcacttcatcagctccaactccctgtgccaatctgagtccagcaattaatgcttcatattccgctttattattagatgcagtgaataataaccgaaatgattgctcaaggattttcgaggtgggagactccaatttgatccccacctcggatctattttttgatgaagacccatcgacgtgtaacttccaagtctgattttctggttgctcccgtccaccaagtaccggtaactctgttaaaaaatcggccagaacttgagccttcatggcgactcggctcttgtattctatatcatactcacttaattccaccgcccacttcgccaacctcccagattgtttcggactatgaaggattgttcgaagtggttgatttgataacacttcgattgggtgagattgaaaatacgggcaaagcttctgagctgaagttactactgcaagtgcaacactacaagaaaaatgacttttcgtagcatcggaataacgctatctaactattttatagcgttttgacaagcgttatgtat

SEQ ID NO: 17512 - DNA, 290 bp, Arabidopsis thaliana landsberg
cgtggatcgattatgtaattaacattcttaaattttaagttatatttgcttggtataattgcattttgattgttttttctatgacttcatctgtggtataccgtcttgtattaatatcgaccaaaatccgtcataccatataaccccatctcgttaaattaaaaatcattttactattattttttgaataatatttttatttagaaatcattattcgagttcatttagaagtttgctttcaatatatttaatttatctaatttaatagagcttatctatatttttagtat

SEQ ID NO: 17513 - DNA, 1172 bp, Arabidopsis thaliana landsberg
agaacactctctaccttttctctgctaagaaaaaactttcctttgattcctttttttgttttaactgttagtgtaactgtgtaagagtttagtcttacgttactatataactagacaataaggttcccgttatgaactaaattcacatggagaaatgaaattgattttatttggaatttttgagttttatagagcttaatccggtaaagaaaacagagtgattttaggattattgtgaactacatactaactttatgtccaaatctcatattttgctggcatgtagggagcgttttgtaattaacaaatagtagtaacaatatcaaatgtttttgtattcttgtaaaattatttgtttagtttgtttaagaaacgaaaggaaaaattggatattaaggatcattttttcaaaaatttgtccatctataccttagtttgtaaattgtcatctatgactaaactacccttattcatctataaaattaagttttaagacatttaaagagataaaaatagtaaaatcatgttaataaacaactaagaaaaagatttctagaattttttttgtaattttattgagaataatcagtttttatatcaatgatttttgttctgcaatatttagaatacattttctgccatttgtacatattctgaaaaaagtagattatgcattctaccatttatacatgttccgaaaaaatagaatatgcattctaccatttatacatgttccgaaaaaatagaatatgcattctaccatttgtacatgttctacggattttagaattgaaatgtgttctacaaatttcagaatacatcattttatatgttctgcaaaatttagaagatatattctacacattactcaatgttctacaaaattcagtatacgtatactacgatttactctatgttctgaaaaagttagaatataaattctacgaaatttagaatatatattttgaaaaaaatagaaacctttaaaaatagaaactaaatctaaaaattaggaaactacatatttatgtaaaatattataagtaatcaaatatatggtgaatattatgtatttatagtgttatacgtaatttagaatgagtattttgattagtttagaagtaaaatcacacaaattagattctctcttataaaaacctaaaagatttttt

SEQ ID NO: 17514 - DNA, 954 bp, Arabidopsis thaliana landsberg
aaacgtacaagttatgacatatgggcaaccccgtgttgggaatgctgcttttgcatcttattacaatttgcttgtgcctaataccttccggatcatacatgaccatgacatagttcctcatctgcctccttactatcatcttttccctcaaaaaacatatcaccacttccccacagaggtaacttcttttcctttcttcattttagtactaagtgttctctgatacacttgattttcatcacagtaactgttttaagatttttttttgattcaacatttggtaatgtatcttttggattgcaggtgtggttgacagaactaagtattttgaatattgttatccgtggtgtggaaaaagtttgtgacaacaccggtgaagatcctacatgcagcaggtaactaactctcttttgggtttctacttgatccctccctactctggtaagaataaacccggtattgctaatagaaatataggatcattatttactacctcgttacacccgagccatctgactattggtcagggattgtcacaactcgtcttatatcatgtattgccactaggacaccggacatttttagaagtatccagtataatagtaagctcctgttgtttcagatcggtgatgggaaatagcatatctgaccatttaacgtactttgaagtggagttgatgggtgagacttggagacaatgcaacatagtgatgggccatgaaatggagagttacagtaggaaagattcaaagggtaacatattcctttcgcggacagttccttccgcggacgtaatcaaaacaaaaagtatatccagagccggaatctcaagtctataggagttggttgattcgagtctcgaacaagaatgcttgcttgaaagggaggttgggagattcaaatgtgcagggagaagaagggttctttcattctttgtggtcgtcaaagaaagtg

SEQ ID NO: 17515 - DNA, 756 bp, Arabidopsis thaliana landsberg
tctctgcttcgaagagttttgtctcaaagaaatggactttatttctctgtatcggttgcttctgcgcaggaattctcttctccgacaggtaacaaaacaatgctctctaatgaactcacttattcttttcttatttcttcagttatacgattttcccgggaatttttttatctcttttaggactgtcggtgggtaaaattatctcattttcgaaacacccagatttgtaaatctaacgacttttcgtgaaaattcatgctgtgaaagttttgggtccaattttttccgggaaagtgtgattaaatttttcttgtttcgcaaattttttaatttcattcactattggaaaggttgtaattcttcacaaaggtaacgaaaagtacatcctgagatttatttatagacaaaagtatattctttatggacaaagtagttcatggaagaaccaaaatcaatcgcaagctgttgatcgtctaatagtagactaatcagactgtgtttgttaatagaatgtggccagagcctgaatccaatgttgtatcaagggacacagtagcatcagatgaacggctgcggttagagtctgaggactgtgattcatcaaaagtaagtttctaatttaggtgaattgatagtcatgagcactagaggagtttttgattcctgagtttcatagcattatttctgtttatcagaagggtttaaagcgtgaatcgaaagacatcctggagatgttacaagagtccagatcaatca

SEQ ID NO: 17516 - DNA, 885 bp, Arabidopsis thaliana landsberg
  unsure (1)..(885): unsure at all n locations
agcttttagctctgataccacttgatacaaacacggtaatccacccaatgattttatcaacggaagcaaaggttcgaagctttgatggtcgatgaacgaagatagagatggaagatggaggttatgttgaatgaatccacaatcaacacacgaattaaacagcttgaatccacaagttattcagcccgcaaatcacgcaagagaagtgaatccacactcaacttgaaatgacaaaacacaaagacaattctttgtaaaacaaacttaaagtttattgagataatttctaaaatgattggtgaatacaaatgaaatcgagagagagcttatacagaagctctagtacaacggctatataccaaaacaaaggaaacagatcgcaaacaataaaggaatagagccgttagaggctttatggtgtaatcggccaaataaggcaagtgtagccttagtttgtatctaaataactttggaagaaatgtgcggtttcttggaagctttaggatcacttggatgcttttaaaaacgcaaacttttagaagaggaaagagtcgttgaggtgtgatctcatgcgaatccaaaataggaaagaagtgactcaacgactcttaagtgaggtaaggtgtagcataactcgggtggggaaccttatggaaagtttggagtgtcttcttgattcccttacacggatcattaataagggtaatgtccctttccttatttggcatcgaataatcttgtacgaaaagtacttcagcaagtccttcagggagtccttcagcgaaaccttcggtaagtccttcagcgagtccatcagcanngttgtcagttccagtaagatcaatgttggtattgattctcacatcatgttagtttgatatcttg

SEQ ID NO: 17517 - DNA, 1789 bp, Arabidopsis thaliana landsberg
cgctccagtctccatgatgtatgtgatctcaaaacctgtaatgtcgtccaggaagaaaaagctgcaagtacagaattgaatgaataaacaaagacgaaatatgggtttcatatgatttggatgtttgaatagaaaactcggtatagagactcacagtccgagagcaacaacggttgctggaacattcaacaataacattttgaaataatctacagcgagatcactatacacctacatttgaggaagttcataaagactgaaaattagtatctatctataatctaatattaacaatgaatcttatgttctatttacctttttactacggagactgcatcttggaccctcgctcacaatgtcgctaccatcaatctacatggatacagaaagaatcataaacttgaagcttaaaccaatcttataagggtatgtctattttcactgaagcataaaaagtgaatggaaacctttagtttgagtttgagcttatcatattcttcatcattcaagattggatttccagaaacataagccatggaagcttccaagaatctttgttcatcggaacctgtgtttcatattaccaataaaagatttaggactttgcaccaaagaaaccaaaacaaagaaatgaaatttagtcccatagttgatgattacttagcatcacaacactgcttccttcccacattaactcttctttaaggttatcaaactcttcattagacatgatcgctttgccatcataatagaaagactgtaatcaaaagacaaaagcaattctcaggctcttgaagattagatatatatcatgttttggcaactataaaaaaaatggtttattgtagcgtttacttgcaacgcttggagaaactcttgttccatttcaccaattgttttcttctcagccttgttgatgctacaatagggcaaaacattgctatcgacgttgtctcctcctactggaccttaaggaagacaaaaagactgtaattgagaacttcatagcaaatctaaagttgataccttacttatgcaacctaatagttacacaacttctgacattgcaaaactttagtacagagttaaccactaaatagtcaacaaagtccaatacaaacaaatatactataccaaagttatagccattgaatcaatcaaacccttcaaagaattgaactttaacaggattcgagtctggatactacaagttagtgacttaaaaacataaattttcagagctagagacgttgaattaaaataatatatcctaaatttcaaaaggctcaaactttggaaacccaattgtgaacaaattcgaatccaaatggctttgtaaacagaaaactaaggcggagtgttcgaaatcgagactaaagtggccaaatcaagacctgattgctctgttgtggctttagcaggcaacaagaagactcttcttctcaaagaaatcgattttccagggctgagctgagtccattgagtcctcgaagacggcgacggaggagaaggagagaaagaagaggaaggtttgcgagaaacggcggagaaaagtcgaggacttgtcaaactaaacaacatcttgctacccattttcccttagagatagaaaagggagctcctttttttcctctgtttttttcagtaagtatgaacctgtggttgaagatgtgtttactgtgagcttctcaggtttcttctgatttttttttttttcttttttttttggttttattataaatttggagggaagaaattaggagataagagaagtgtggagatctattcc

SEQ ID NO: 17518 - DNA, 1078 bp, Arabidopsis thaliana landsberg
  unsure (1)..(1078): unsure at all n locations
atatcgaccacagtctgaatcatatggagttgtgacaaatgtaagttttaataacttttctttatacaagccttcttatagttatttttttatttacagaccatgatcttctagctataatataaagctggtattgtgcacaactttcttttatcagatgtctgccattgtaattattggatttgtgaaggacgcaaaacatcatgttgatgttcaaggctttaatgtctaccacaaaaatcggctcatcaaggtttgcttctacttgaatcatgttttgcttgcctaaactctccatactaggcctttgattttcaagataaacagcggatttcatattcttgtgtatttcttattaacttgtgttatcagccattttggaggatatggaatgcaacaggcagtgatggtcgtggggtcataggtattgtttttacatggaaattctattactttgttcacttactttatgtgaagatcacagcgctagtttcctctgctaataggtgttctgaaagctaattttgttgagcctgctcatgataagcaagggtttgagcgtacaacagttctcgctagacttgagtcacggctagttcaaatgcagaagacttacttggctgactgttttctcatgttgttttaaaatccaatatccttaagcctggaatggatgtttcagggataataacattccattccttgttgatcaggagtacgaactgtcacaaaattggctatgcgcccaggcgacgtgaaaagtctgcatatggttatgataacagaggtatagtgcctttatttgtttttgtaacgtccatacaacatttccaggagattttacttgtagggaacaatgtttttctggatgttagactcatcaccagaaaatgatcgtgagggaccatcaagcatcaaaactcctactccagcttctgacaagttctactcaagctcatatccaaatcaccatggggccatccgtgtatcccgganagatggtgcaaggaaaaatgctcccaccaaaatctcaaaccaaaacgatctcttcattgtaatagatcccccagattttctt

SEQ ID NO: 17519 - DNA, 390 bp, Arabidopsis thaliana landsberg
ctccgtgatcctacttaacatccctcaagaacagacgacattgcgcatattgggccttaaccgcccggggtataattgacctgataagaggccggattggccataggaggcccatcatatcgccctgttgtgcccgaactgttaacaaattgatgtggctcatacccggggtgtatgtctgtctttttcctatgcgcgtctctagacacttctgtggaggcgttctgaccacgccgaatcattacaataccaacggagcgcgtttatgtttgaccgaagctgtattctcgacaatattcgctgctcctggactggcgatgtccatcttcgcagataccttggctctaaaaacacatggagctggggcccgatcgaccctggatgaatggg

SEQ ID NO: 17520 - DNA, 1767 bp, Arabidopsis thaliana landsberg
ttgctagggttttatgatttttgggttttttctgcagggatttgattacatgagaagagcaaaaaactctaatccgttaagcttttattggtctgatcgtttgaatttgaaggcccataaaattagggtaactatggcctgttacatgatgatttattactacatagcttagattaaccggctagatttctggttaaccaacgggtttcgtcaatttcgattagatggaaaaacactttccttgtttgcatctggttaacaatcgataggaattgataagtgcaccagcagggaagctttataaagaaattgggagctaaacgatccgttttggttcaaatgatcaatatatatatatatatgttttcatgtaatgttacattgggatattgcacatgctccggtaatggaaaacagagataacacagccagctttgttttatatatatagtacacagctcaaacaataataatcttctctagctctgataatttatcaatatttctgctactaattctcttcggttttttatttacaatgccgggccctcatgtgtttcagttgtctttccctccttgtttatctgtcatgtgggaattctaggtcgttttccaacaccttgaagtgttgtggctgctgcccagagcaatggaggttccacattttgaagtatgacctctccagattcttcacctgtaaaccaagagaactcattggttaggaaataaaacgcagaagagagatatagagtcagaaagtgcggaagactaacccaacgcatggtgtcgaatagaggacaggttaagcggctagccctcaattccttagtcagtgcctgaagttttggcttgttcagtgccaaagagacagccttctcttcgtactcctccaagctggttcacaattgttatagagatatctcatcaacatacatgaaaacagaggatactgaacacatgtaccagttggtttttgctgagacgtacctgttaacaatcatcccatggcccagaccagttgcaaggcagagtgatccagccactcgagttgccattttctcaagtggtaacgttatcattggtacaccagcccacagtacatctgttcctgttgtgtgtccattgcacaggggcctaatgacacaggacagggtaggggaaggtaaacttgtggcagaattgagtttttgtgttgttttttaaatatatcttgaagtagagataaatcgagttgagaggcaaaagaactcacgtgtcgaggattacatcggcaaggacacttcgcctgatatgttcactcttcatggcaacatcagtgaagataatttgatcaggctgtacaccttgggcagcagcatctggatataaggtcaaaaaaataaggttataaacgatagagaaagcagaaagaacaaggaaatgctaggcgattgaatggaaccaaacgtacatgtgcgaaacctcatctctccggctgctggaaaacggagaagccaaagagcactgttgggtactcgtttaagaatgttgcacctataaaaaaataaaaacaaatcagtttgtgcatgtataaatttacatctatacagagtgttatttatggtatcatgatggtgtaaggtgtcatacgtaaatttccaaacaaacttgcaaagctaaggaaaaacgtttaccaagtattaacgatctcaggatccattttgtacagttggttgaagcatgcaaatatgaatttgtcttcaggaagtccatagtctgatggcttgc

SEQ ID NO: 17521 - DNA, 1746 bp, Arabidopsis thaliana landsberg
  unsure (1)..(1746): unsure at all n locations
ggggaaggccctggattttatatcacacacttcaatgcaacaataaaagggatttttgctttaaaatacactatattttttatatggacacactgcaaggtacatttaatttatacataagattagaaaatagtattaaattatttatatacctaacttttctagtattttgaaaagtgtcattttccaaaatagaactaaattaccgatacacctaaattttgtgatagatttttattttattttatttttacaactagtgcaacgtgattttgaaagaaactaatttgacaatagagattaacacttactttcgagaatcaaacaaaccttgtaatcctttgttatagcatctatctccgatagattttatttcaacggaaaaaggattaatttaagcattatacatacaaatttcaagctgaacatctcttagtaattgtgactctaagcccatgcttcatgtgcaacataagaccaggttctggctcaatcttctgtcctttgataacatcaatatcatagttttgtaatatctccacaactacggtcttcattagagtcatagctaattgcttaccaggacaagttctcggaccggcgttaaatgataaaaacttgaaggaaggtgcatgtctcaacccaccggactcagaaacccatctctctggcttgaactctgttgcatcttctccccaaaccgctctcatcctccccaacgcataaaggcagattataatcttagagtttgcttggactttatggccacttggcagcacatctgatttgataggagacttgcgcccaaaggaaactggtggatagagtctcattgcttcacacaacgcaccatgtaaatacaccaacttgtctaaattctcttggccatttccattctttgatggatttgtgttgatgatctcttggcgaatcttgctcaccacttgagcgttttcagagagaagccagaagaaccaagtgagagctgagctggttgtgtctcttgccgctatcacaagacccaaaatagtgtctcgtgatgaatttatcgctactcggtttcacgtgtttatatttggccgtgtctatagtcatgtaatatgttaaaacgtccatggcctctccttttgagtcatgaatcccatgatttttgatctcctctcgtttagctgatatgatcttccctagcatttgatcgaaaacgtcgagacttcttctcatcttcttctctattccnacaccgatccaagattggatactccacagaaaagccggcttgagatgtctatagaacatggcatctgcaactccatccatcgcatcagcgaactcaacctttaggcatttcaacggagagagattntggatcatacccagccatcaaagtagaagatgtgtcaaacaagaatctctggaacaaatcttgcaagtcgacaagaatgtgtttctcaacagcgttatcaagaataggaacaagcccttgacttaatttgcttacgcttgtactcaccgaaaaactttggaaatcttgatggctgaaaatcgcatgagacgagtttctcatatcctcccacaagcccgagtcaacgttgaaaatcccatctcccaagaattcaaagatcttgttaaacttcttccctttggggtaattcacgaagtttgaacttagaataaactgaatattcaccgggtcaacagtgagcaatatgtctgttccactaagccatggccctatgaaacaagccg

SEQ ID NO: 17522 - DNA, 1675 bp, Arabidopsis thaliana landsberg
  unsure (1)..(1675): unsure at all n locations
aaaccttatgttatgtgggtgataacattacgttaattaacattatgttaatggtttcatcactatatatgtgaaatctcataaatactacagttcatgtgctaacaacggatcggttggcagatgtattaacaaagccattgggcactcaagttcaattcaatacgatgatatatatacacaacacaagacttaactccaaagccctagacaagacttgccgaccaaataagttatgagtcgactaggcgcaacatacaatatgtagcctataactttttttttttaacgacaaatcaaatactttcatatcacaaagagcttacaaagtgtagaatcaaatacaatacaaccattgtacgcaaataaaggaaactgaaacaatttcgatgcaagagtggaatataacttcgctgtcctttcggaagccttacatacaggctaacagatgtccctcttccataaactttcgattggctatatatcatctttttgatgaaactccaaaatgcactcggcattaccttgattaatggaaccaaattaaatgtagcctactaattataatacaacatcttattctaaaagcaagagttgttttgttaattttctaagacttatttgtatttctacaaggatgacaatgagagaggcaatgaaggcataatcaacatttggattaacagtgaggcagaaattgtcctttcaaagagaacgctctgcatcgttttcttctcgcgcatctgccattcaaaccataccatttttattttatcataaataaatgtttttatttctcaagttttaacaattaataaaacattagcaactcccagttcataataatatatatagatgggtatatagtataaacatgtttattccagatgtgaaaaaaagaaaaaagtttattttaaataaactaaaccataccaaaacataaaattatacaaatacatatatatatatatatatatatatatatatatatatatatatgttcaatatgaatgtcaaaaaaaaaaatatacatatgttcaatatagaaagaagccgtggcacgaatttcctactcatcacttaaacccagtctatcatcataaataaaaatgtttattttctaacattttgtaacgttatagttttggtataactggtaactgataatcatctattttcttttaatgtctcaatcttaacataatgttacaattttttcatttttttatattttccttttatatatatcgtatgttttcttttcatattttatttaaattacgtcaaaaaaactccttttcaatatacagttagacttgtactaagaaaaggaaatagagtttgtttacttgggcaagannnnnnnnnnnnnnnnnnnnnnnnnnaaaacaagaagtgtcgagccaaaccccttcgagtctgtaatcacatttcttctgctctatgttatcagccaaaaacacatcaagtttggtggttatctgaaccatgtttgatcttttcaccgtgtatagcagatcaacctcctccgtactccctcctctaaacactagccacctgtcatgcatggtcattatttgcaatcaccaaattatctttattatactaataaagctagctctattttttattgtatatctagttatgtgctctgtaattaataatttgtaccttt

SEQ ID NO: 17523 - DNA, 1014 bp, Arabidopsis thaliana landsberg
cagacgatcgcttctgatagcttttatgtcaaatatgaacaaatgcaatttcttatggatcgttgcaggaaaatgttcccggtgaagaggtttttcaacatctcaaatgcagaaagaaggattgacctccaatgaagtgcaggagcgacttaccttgtttggttacaacaaacttgaggagaaaaaggttttaaaaaatgatttttcaatcttgcattgatctcttattttctctctatgaatggtatgttgatctctctttctatttggttctgcaggagagtaagatactcaagttcttgggattcatgtggaatccactttcatgggtcatggaagctgcagccctcatggccattggtcttgcacatggaggagtacgtcttttgttccctctcattagtcgtttctttccacaatatgtaaatacgtaaaattgtgaaaggtatagcttaacatagaattttaaaacaattttgagagtctgaagaaactaatttgtctcaactcttcagggaaagccagcggattatcacgatttcgtgggtattgtggtcttacttttgataaactcgacaatcagttttgtagaagaaaacaatgctggaaatgcagctgctgctctcatggctcagttagcccctaaagcgaaggtttaaatttattccttttagttgcgctcatttaaatttgatggtagtagcttatttacaaatcaattgttttaggccgtccgcgatggcaaatggaatgagatagatgcagctgagttggttccaggagatatagttagtatcaaacttggagatatcattcctgctgatgctcgtcttcttgaaggagaccctttaaagattgaccaggcaagttctacttctaatattggtttatcattgctctgtatcttatctctcccttcactaatcttggttatttatcttttcctcagtcagcacttacaggtgaatctctttcggtaaccaaaaatcctggtgcttcagtgtactctggttc

SEQ ID NO: 17524 - DNA, 1483 bp, Arabidopsis thaliana landsberg
tatatatatatattccccttaccaaatagcaatattcatttgattaaaaactcatgcaatatattaaaaataccaaaactaaaaaaaataccaagttcgttttggttcatatatttaattttagttcatataccataaatattaagtttttttgatattcgtgctaaaaacaaaactaaaaagaatacaaagttgttggtctttgttatattgatgctcctaaaagttcaaaatctgatttaaatgaaatattcttgtagcaaatccctatgcacaaagacgatcaggagaagacatcattcataacagaaagagggacatattgctacaaggtcatgtctttcggcctaaaaaatgtcggggttcgatatcagaggctcctcaatcaaatgtttgctccacaactggggaagacaatggaggtgtatatcgacgacatgctcgtcaagtcagcaaattctgccgaccatatcgaacatctgagagcatgctttgaaaccttaaacaagtacaatatgaagctgaaccttgcgaaatattccttcggcgtaacatccggtgaattcttagggtatatcgtcacaaagcggggcatcgaagcaaatccaaagcagatacgtgcgatcatggacctccaatcacctcgtaacaaaaaggtagtccagcggttgacatgctgaattgccgcacagcgcagatttatagctcgctccactggcaagagtttgccgttctaccagctgttacgttgggcaaacaaaactttcgaatggacaaacgaatgagagactgctttctcatgatcgtctttgtgcatcaggatttaaacgaaatgatttaaatggcatttcaaaaattcagactttttcatcccaaatttgaaagttgaggctttttttgacattttccctttgttacaacacaaacttaaaaataaaacataagcaatagagtacaaaccaatctcttatctttgtaatgactttttcaaccctagtaattactatatcttaattgttccctttatacagcctgaggaatcattgatatatatgcatcattttacgacttttagtgacccggctcagtactctgtggctgagtttgaacagcctgaccagcataagcacaacacctgaagcagccaccgtagtagcctctgtagcagcaaccatagcgacaatatcctcctcctcggtttccatatcctccacctgcggtttccatatcctccatcacggtttctatatccaccaccacggtttccatatcctccaccagggtttcctccataccctcctcccgggaaccctccataccctcctcctggaaacccgccaaactgctccgtttgctttacttcgtctctttctgtcactcaaaatgaatatatattagtaattgtgcttaatgatatattcagatattgtcactactttataaagtatttgtaataaacatgagcgattcgtgattagtatga

SEQ ID NO: 17525 - DNA, 2820 bp, Arabidopsis thaliana landsberg
  unsure (1)..(2820): unsure at all n locations
acacacattatctccctaaataatgaagtaacttaacaaaggtttcattgcaaggaaaaatattaccatcgtctatctataatatctctaatcttttgctgagaaaggtccacaaccttaaagtttcgactctgttggttggcaagagctgaaagctactatttttctaagtcacacttattgataaagttcaagagttatttatcaacatctagtttatatatacaccatagaattcttatttatataagagaaggttttgttggtttacagtgagcttgcgagaatttcattaacttttttcaagattgataaagtacataattacgttttaaaactgatatattaatttaattgtcaaaaatcatctaacgttattaatattttggattttatggtattttcatttagcattttaagtttttgcacactcagatatccaaaatatcttgaatctcctgtccgtttctaaataaaaaaagtcaaactaattaataaatttcaaaaaaacatataccatgctgtatttctttctttttaaaaatgaaaatgaaataaatatttaatttctatgagtgagatcatttcagaaattacttataataatagtagatatcagtgatagacattctaatcgtaatactattgatactctctttcgaccatttgcatttgcattaatgtatggatcaaggcagttttcaagtaattcatatattttacaaggttatttcagaggatatgaagacactgaagggaacaataacagaccatggttttggaagaaagctttaacgtctgttccaacaaattatggtttgtctctttcatctgttctcggtatagtcagaacagaacttgtttcttaagaacaagaaaccttctaaacgagcagagagctaatgaggatttgttgttcctctttagtgacagaagcgaaattgatgaaaaccaagctnnnnnnnnnnnnnnnnnnnnnnnnngacctgagattacttggaaccagtgctacactttaccaaggcacgtttttgtatacatatggttgaaccattcagttacaaaaagaattaagacaatgcgtagcctctgtctgtataacactacaccttatgatacagcatttcatcaaatgctgaagcttaaagcctctcagctaaagcctcggacctacagagtttgtgagagcactggcttctcttatgcgttgactagtttttgctctgcactggcttctcctgtatcagcctcaacagatgacatagtagggcttggccatgattttgacaggtttcccgagtttgggtttatcttccaatgctgcgagttgaagggcttttgcacagaccgggaaacactgatcattccatgactccagaattacgcctgaaccaatgcaagtggttccctcgtaaaacgctgcaaactgtccagcagctagaccttgatcgtcttcgtctaggtgcacaactgcaacatctccgtctccttccatttcaaaactgcagctgtagaagccaggcccatgtcggacctataaaagccgctctcaacttatcagtgccaagtaaactatcatgtgtagaaagtaatcatattgtttaccttgcaacggagctctctaactttgcctgaaggtttcccactattccatcttaaggagccgacacggaaaatccgccttctcttgtcgattgagtaataatttctggagacaaacactacattgttcttggtgtccttttcaacaacatacctgtacatggataaagggatatcacaaccaaaattaaagatccaaaagaatttatacttggcgttcagccaaattgtcttctcaacactaatgaagtgttcatatattaagaaccagaagctgcttataattgtcatatgagccaattgctggtatctcaaccaacgacaaaaatagctaagaatctcatacatcttttaagaaacataccaggggccaccgggtaaacgcaagccttggcgttgtccaattgtgtaaaaccaaaatccccggtggttaccaagaaaatccccagattcggcttccaatataattccttccatctcccctatgtgtctacagacaaagtcgctgaactttatctattacagaaaaccatgttcttatgtttcagacttgcactagacaaacagccattaatcagaagagcaaactaaaaaacataccttcccaaggaaacaaattccttgcgaatcctttctatctttatttggcaaatcgaattgtgtggctagtttgcgaacttcgtcctgtacaccagaaaaaaagtatgacaaccaccacgaagaaatcaaaatgttttcgttattaattttctttcggaatcgagcagaggtatgggaataaaagctctcccaaccaagtgggacaaacttcctcgagtaccttttttacacaaccaagtgggaaaagcagtcgcttaagctgggtttgagagagatgtgagaggaagtaggtctgatccttcacctaaacaatagaaaaatacagactataaatggtagaggtactgaaattaaaagaaatgcacctacgaagcattatagccaaaaacaataggtacaatgcaaacattaaacatgctgatcagaaataaccggcagattaagtcaagagtattttactggagtaagtaccatgtcttgtgatagttccaaaacagatgatgcatcattttggtcagcaggaggatggaccactttagcataatgacctgaacctacatagtcatactccatatcaatgataacatccatgaatgcacctgaatatataaggtcaaa

SEQ ID NO: 17526 - DNA, 3076 bp, Arabidopsis thaliana landsberg
  unsure (1)..(3076): unsure at all n locations
gtggggaatgaggaggatcaaaagacactttaaatgatcgacaagtcttgtagagtaggttcctctttatcgagtaaactggtcgagtagaggatcgaggaagaggggcgagtagatcaatctgctgcttcatctaaggctgccttgatcgagtaaaggggtcgactgaattgatgcctcttctgtagctgccttgatcgagtgaatggatcgagtgaaatgatgcctcttctgtatctgcatggatcgagtagagtccttttgagctccttctgcacctaaaaaacacacncaaaacatgcaatgcgtatgcaagatgatcctagatgcctaagtatgcaaaataagctaaaatggtgcaaaatgatatgatacaataagcaaatgcacatctaaatgatgataaatgtccatgttgtcgatttgagttaccttttatagtttattagattatttaaattgattattgtaatgcttaatattttagatctagatattctaaatgcaatattttattatatttgagatgctatatttgttatactgcaaagcaatttattcgtattttaagtaggactaaagcaaatgtgtaaaataaatcataaacactttaatagtgagtttgcttatgtataaaatgaaaaactaacacatcttaagaaataatatattttttaaataatagaaaaaatagtaatcagtcttcttctgaataatatattcgtaacattatacattatactacattaaagtatccatatagaaagtgatctctctttctaccaccgactgacaataataattactaagcttgcaacgcccaaactagacttccacaactatgccacaacgccaaggtgttgcttttaagaaaaaagaatctacaaaaataagagataacgttgagagataacgttacatgaccgaaagtattcaactaagaaatcgagacattgttcaaactaattatacatatatggggggcgtaattatactttattattatacaaggtaatcaatcatatattcttccaaaatcttacataattatccaaaatgcaacgtaattatacaataactgaatttgaatattataatgttacatcaaaagttatcctcaatgctagaagttctaaaggatttcgcatattcgtaatgttgcattgaagatgtaacattcttcgcaataatattcctcttcatgctaataagcacaatcatgcatacttatcttcttagaataagcgaactcccatattcgggccaatggtattttcattaggaggttcatatgataacagtgtgtcaatcaaaccttcacattcttcttccaaatcgggagagtaaatattaaacaaaagccgaccacctaagctgtcgaatatcatgtcgaatgtagccccggctagatcacccctttcagcacacatttggaacatggcataggccacagtcgccgattcatcatcaggaactagttcatttagcaaagcaagggaaccttgtatatccctttcacgggtcactaaacgcaaagcttcataataaagagcctgacgcgtaaagaagcttctagctacaccaccaggatatattttcggtggctcgagacataaagcagctagatttgctgactttacaatgtccctcgagagtgcaatgtcccttcctcgtttgtttgtgagtatcaccggagctaggtaatatgcgtcatcatctcccagcttcttcacaataatatggaagatatcatctagtaaatcttataaagatattacttttgaggtttatgaagttaaaaaggagcaaagaaaatgaggtgtggatgagtagacgaaccgctaaggacatatttataggaaacaaaaacaaaactaaccttcatactttaacctaaacctatctggactattgtactaatgaaacatccgtacaccacaggcgttgtacagaacaaatttgtacattgaaatataagaacaaatccgtatgctttatatacgatacagaaaccatatgtaaaatcacaagccaacaataacctatgtagatgaatcataacagtccgtacacccaattcactgtaaagataacagccgtacacccaattcactgtacaaataacaatccgtacaccacagacgatctacagaacaatctgtacatcttaatatatgtacagtctccaatgtgtacaccgcatctgccgttcaaacacattaaacatcaacaactaagttcttaaaaaacaataattagttctttaataattaattcaaacagtatacgttctcttccagtacgccacaataattagttctttaataattaattcaaacaataattagttctttaataattaattcaaataatatgtatgctgtacaaatacccattcgtacactgttcttatagtacactacgtatgctattcttatagtacactacgtatgctgtacagaaaacaatccgtacaccttacacggtgtacagaagcaatctgtacaccgtgggtatatacaaaataataagttataagtcatattaattctttgacatcaaataatatacaaaaaacattctttcgattttttaagtcataagcataagttcaaatctaataaatatacaaatgcatacttcgatctcaagtcctaaatataagtcttaagtcataagccccgaataagtttagaaacacccaaactctaagtttaggaacaaataactagtactcgtcctcacattcaaccaaagcagcatatgtatccatcgcataaaccttccgaatcctaatcaccacttcatccgttagagccgtcatgtcagtgtaatccattccatgagcatgcatttcaaggaacttgcatgccacaggcccacagtctccatcgcctttgttgtcgtacagtcctgttacccgtgtacagctgaaaggctcagtcgtcatctcagtggtgagagttgggcagcaatacttcttcagtagccaaggaatgctactgacgattggngtcatttggaattcgactgcttcttctggagttggngagatgaacgagtctagaacatctat

SEQ ID NO: 17527 - DNA, 1115 bp, Arabidopsis thaliana landsberg
gtatgttctcgtgtgttacccatggtcgttgttattcaacaatatgcatctgaagcatcattattgaaacataatatatgtgcagctattatgaggccattgtggcacacatttgagtcatctctacaagtttatcttcgatcgtcaattgatggtgctgaagattcatatgatggaagatatgattcagatggtgaagaaaagagtcttgacacttttgtcatccaggtaactttataattttaagtgatcagttttccttcaaggtctcaatattggaagttagtcttttggttttttggttagaactggggcatttggctcatagattgtggtattttgatgagtttgaggccaagtgagacttgtttctgtgcagctatttgagtttctgtcaactatcgttagcagtagaagactgtcaaaggtttggctaaaatcgcttcagtttttttccccttcattttggtcgtatgttactttggaattggtttcttacggaaatacttttatatcagaccattgccggtaatgtcagagagttggtatatcaaaccgtcgctttcctgcagattacagaacaacaggtaaagatgaatcatgcatcttctgctactcagacatgatagtatatattggtcatatttgttcttttaaatctcggatgataacatgaatctatcaagggaagtcttacgaagctagacagcctatttatatatatgacgaagtaatttgtttgttgtgcaatagaacttatctcttgctatcttaacgaataaaagatgaccagaaggcttatccactttatctggtttaattattatatggtttatatgtctaacattggagacaagacatccctttattctttatctcatatgtagtttctcttcaggttcatacttggtccatggatgtaaatcagtttgtagccgatgaagatgaaggtagctacagttgtcgtatatcaggtaagcggtctctcactcttcttaagtcaaattcatatgcataactgagacaagatttggaggtcgtatgcatatatcaatatccaaaatttatgaccgtgtaactataaaactacctgcttcaccacaggaatacttttg

SEQ ID NO: 17528 - DNA, 1817 bp, Arabidopsis thaliana landsberg
ctccttgtacagtcttaagattctcttttaaatttgcagaatcctgatttaattaggaaagctcaagctgagattgatgctgtgcttggtcaaggtccacccacttatgaatcaatgaaaaagctcgagtacgttactcgaaagatatcttctttcatctcttcttttggtctctatttaattcgttgaccgctttgtttcatgcttctgtaggtacatacgactgatcgttgtagaagtccttcgtctctttcctcagccacctttgctcatcagacgcactctcaaaccagaaacattacccggtatgtctcaaaagcacttgctaagtactacgtatacaaatctgctttcattaacagatcatatctccactagaactagagaatgacttagtccagagctcatatatgtctattttcctatgtctttctactgcttgtatcaacaggaggacacaaaggggaaaaagaaggtcataaagttccaaaagggactgatatcttcatttcggtaagtggtagtttttgtatttgtttatgcttctcctcatcgggacccgcttttctttgactaccctattgtgtatctgcttgctttcaggtgtataatctccatagatctccatacttttgggataatccccacgattttgagcctgagaggtttttaagaacaaaggagagcaatggaattgaaggatgggctggctttgatccatctcgtagccccggggcactatatccgaatgaggtgaaatttccaaagcttgcaaatattttccttagcatgtgatcattttctcaaagaagaaatgaataatctttcctcttgtaacaaaagttgcctctgtttggtatttatgatgacaacagataatagcagactttgcattcttaccatttggtggaggaccaagaaaatgcattggagaccagtttgcactaatggaatcgaccgtcgcactagctatgttgtttcagaaattcgatgtggagctgcgtggaacgccagaatctgttgaactcgtgagcggcgcaacgattcatgccaaaaatgggatgtggtgcaaactaaagagaagatcaaagtgaaatttatggataggcaaaaagactcaattttaacttgaaggaagctgagtgtaaatgaaaaatgaattgcttatgattcactagacgtgcattcgtgagattttgaaaatgcaaaaagctaatacagagatgggatctggtggtgaaacatagatcagatctggtggaagatagaaccaaacagctttaaggttatgttggatcattactagaaagtaacatagtaacacactttttagaaaaagaaacatagctaacacacatcatctctcttacaatgagatccttatttttaacgtaacaaaacccacaatctcacaaactttctgaaaacttaaacactcaatattagattaccacagcatctttttaattcttgatttaattagtctctaccctcgatgacgacagaggaacacctttgacaaacgccgagaaaagagcgagagagctgcttggtttaaagctaggcactgtatgtccagctcctctaaaagtagcaaacgttagaccttcgtattcttgaacccatccacttacctgttgttttaagtataagaatcatcaaataggactaatcaaactcaaataagaatctaaaataaccggttaaataaattcatatgtaatcatgtattgacctgtttctcatggtaccatggcctccaagctgttttgatgggtaatccgagtgcatttaagctataccgagttccgagtaca

SEQ ID NO: 17529 - DNA, 1388 bp, Arabidopsis thaliana landsberg
tattttgactgacgtctccagcagtgatattggaaaatttttagataacatctccagatttagaaatttctcgtatcaacgtctctcatgaacaataatactccattaaatagccataatgtagagttttcttacaaaacttgcaaaacttgacaatttgactatagttaactcaacgtgttggtttgtatatttatttctagatatgatagctagctaactcattaagaagttaagtggtaatactaattctaattcattaagtgttctgctaaggattctaaataactactaactataattcattaaaaaatatgtatgtaaagtactcacatcggctgcaagatttaggtcggtgtctctataaccaatctctttaagaatctccctgaggtgaagaaacggacttgagatctctgttatccaaagtgctgccaccatctcggatccacactttaaatccaccatatattcacaacaaaaaataagtttatttagttacttaagatccaacttttcatagtacataatctacaagactacaagttaccatttaaaacaaaataaaagaggggaaaatataccttttggtagaaaagtccagctacaaaaccaagaatgcaaacagaatgatgaaccgcattatcaatgctaaggacttgatcatcaaagtggctacaaatgagatcgtagatcatgtaagacaatgaaaaagccaacgtttccatctgccggagagacgatgtagaagcaatgggacaaacaggacaagaccaatcttgaatcgagagagttgctaaagtgacagcgattgttgcgtgaagcgttgagactatacgggtgctgaagtcgaacgagtagcttgagaagattcgtcttacaaggatgaaaatgagaccccatgagattactcctattgttgttatgcttattattcttatgtattcttcctccattgatctccttctcgtcttatatttttggttctgacttcagagagacacaactttgttatctaaggtctttttaatgctcaaaccataaaaaagaagatgatgtttatatgcttttggtctttggtttggtctttaatagaccgagattgtgagttcggtgtaagttagttggattattcaatgaggtcggtcccatttattttatctttattcttctttttctaaaattaactgatccgacaagattcgatccaaagagttagaaagtagctcccaaccaatcagctgaattattaaataaaggctatccattgtcaacctgatttagaagccgtgtagaaacgtgcctaatgaaaaataaatataataaaaaaaaattcttaagccctttaatattatacaaatttaggatttcaaattttttcatgtgca

SEQ ID NO: 17530 - DNA, 1329 bp, Arabidopsis thaliana landsberg
gtgagttgtatataaatagatagaagattattgcacaagttatgcatgtattgatgtgtgtgtaacaaaccatagaggagagttaggagatctcttgaacaaatctccattgttagggcttggaagaattttaatcggaaaatcacaaggcattgtaatctggaaattcaccattggcatctaaatccaacaaagccaactaattgactcagacaaaaattgaattgagaatagcattcataatgataatacttaggaaaaccatacaattcaacacaaactcttaatcagacaattaaaactcataatctaaactagaaacagatcgagtcagggacttgatagaagcttccgctgtcatggttatagacaaagactgaatatttgctctgatggttactcaatggtgacgtcgataggtcttgctctgtgtttgacacaccattcaccaatggttctgtccattgttgttgttgatgatcctcaggagaagacaatggattcgttgtggaagaaaccgcacggctctgacctagctcggtctggttctcgggttggagtaacagaagcttatcttgtaatacccgtagaccactttctagcgaatccttcatctctaagactttctccgacaatttattgtcgtcgaggatctttttacgtagaaacagagaaaggtttgttcttttcttgcgtcgctctctctcgtgtagtttgctaaacctctcagccatgtctcgaaccttggattgatcttccggccatgtcttgatgagttctccgtcacgaccataatatatgacacagacttcgatgttgcacagagttgaaagctccaaggctttcttgaacatggtctcttctctcatagacaaattcgtggtcttttttgcagtagaagaagaagacagggacgatttcttgaaacaagtttggtttctcacagacaatttggttttcttcttcgtcgacattgaagaatccattgttgttgtttacccacagaaaaagaagaagaagatacctagtttcttatcagagagaaacctagaaaataaactcttagaataatagtgtaactaacacacggttcagggttatatagaattgtgaaattatagtatttccatataatatttgatattgattttactaaaccaagagagacaaattgagctgtgggttttattcctttttctttagagtatcttttcttcattatatgatgatgatattaattaatttaaccgttggcatttttcagtaattgtaataaaaatcttcttttttctccgtgatcacgtgtaataactcgattttatgattgat

SEQ ID NO: 17531 - DNA, 4584 bp, Arabidopsis thaliana landsberg
gaaactctctcgactcgaccctaaatgtaatgcaactacatgaacactccttttttgtgaaatcattttctgaaatttttcaaatatgttttgttgtttctatgccttagatgaatgcagattcaagaatatatacaatgcaacacacacttcctgagctctcccccaaacttaaatcacacagtccactgtgcgaataaacttggaagagagtactcaggacaaatccaatcacagaaacaaaatgaagaaacaaatcacaacagatgatataatacaatggtgaagtgaggcgcttacctcagtcgaagaatgaacgtagttgctcgtcaatggctgcctgtgattgctcccaggccatagacaaaccaccttgttctgtatcagctccagcaggtgggtactcgacctcatcagctctgtggcggccagcaccgctctgaggatactcgacctctctccttatgctgcggccagcaccgcggtcgagtgaccttctcgagtgaatgaggcgtgatctgctgctagatcgagtgagtgtagccttccttcttctcttgtgctcccgggattcgaatgacgaatgcctagccgggacatgtgggactctctgctcgctaagcttaggcctgtgctcaggctcatcaaatctcctcgatggcatctccagaggaggttgtccctatggaatagcagtggtggaggaagagcagcttagaatggccttcagagacttgatagtctttagacatttgatgatgaacttgtcctacttcttgcaccacttttgtaacttgttattgtttctgtgagcttcactcaagttcttgctctctctcgctggaggtacatgctcaccaaagtgatacatgctagtgtcgaactccactgccctatcttcatccatcccatcctcagtagcttcttcaagaagatcatcctcatccaatggcggagcgttctcatagtagaggcatccaacctcaggcctaaaatcaatgttatctccctctattatccgtgtaacctcagggctagggagaaggatgttagctctcctgtctgtagagtgctcaaacctgaacctgtggaaatcgtcaaccattgcaaactccaggaattcgcagtgacgtaggtgctcgatatccattgctcgcggctcgagtccagcagaaatgattgggactccacaagctatcaaaatcggtgtcacaacgccacctatgcacaaagcgcctcgtgctctcttgcggttattgctgacagcccaactcttgtatccacacaaatggatcagaagaagtagagctaggggtgtgtcattgatttcaccctggaggggcataccattcttagtttggcgaagagttcccttgagggccattgcgatcatctccatatcagagttagtaacagtccctgtaatctctcgggagtagagtacattggctacagaacgctggaagtacctgatgacagggctgcgtatctgattgctctttgacctggaagcattcaacggtacagagctgccaatggtgatccacaagtctttcagctcttctctttcatactttggcttagatcccgttccactggggaagccaaacaatccttccaatcgcttgattgataacctatactcatgaccatacacagaaaatcacaagaatcccaatccttcacaatccaactcatcagaggtcataccttggtagagctctacttgcagtgtggagaggaattgtattgtctcatcttcatatgctacatacggataagccatcaaagtgtccaaatgacaactttggtacaggtgctgaacatcttccaacaatccgagttgtgcaagtgaggtcgaccaaggatacctcgtgctacagaactcattcagcttaaaaagcctaacatattcctcagcaggcaatatgtcgggcttgtgcagaagtttggtagctctgcgagtctgttcaggcatgtactcgtcctccagatcttcgtctataagctcatacctctctgtcatcgctctctttcctcgggatatctcagctttccttctgaaactttcgtattctctctgttctctctctggccttgaagatgacgattctgtctcatccatgttgtagtcaggatcaacagaagaactgccactgtaattgctcatgattctcctatagggatttagaactcaaagctcaaatgtcaataggttagtctcaaagatagcaatgaaaccaaaattattgtcaataggcaatgaaatagattgaattggtcgagtacaattctgtactcgagtaacctaagctgttcctgagcttagatgaattgaatcgagtatcttctcagaggtcgagttggaatgctacagccggtcgagtgaatcgtggagattgagtgaatcgtgaaagttagtggtcgagtaacttctctgaagttggaaggctccactgaattcacgaacaagaagccgagtagatttttgcaggggtcgaatgctttctcgaggtcgagtgagttcttgaagtcggttaggacggcgtcggtcgagtgcctctacgagaccgggaagcgaggtcgagcggtttcttttgaaagagacggcggttgatgtggaagaattggtcgagtatatagaaggaatcgagtgaagtggtttggtcgggtgacggaggggatgagctggtgacggcggcgagggggtcgagtgaaattctcaggatcgagtagctctttggacggcgatttgtggtgtagagagattagagtgtcggcggtgaaatgaaaagaggaaggtcgagtggatttggagtggtcgagtgacgcttcaaaatgagtggtctaggttgagttttagattctctctccagcttatccacagcgcgtggtccacacactgttgattgagaaaattttgcagaaaacctactgtaaactgtaggaaatttctgcaagtctctgtagcttctgttggtcgagttaaatgatgatttaaaatttttttaggtttttaaacatcactcatactcgaccactatactcgatctctaggccatcactagagtaaaagttttgaatttttactctaccttcacgttactcctttcttcctgagaaccacaaacacaaccaaaacaaatcaaaaataacaagaaagtaaaaattatttacaaggatagtcatgggacttcctcccaagtgagcttattttaagtctctagcttgactcctcacactcatcaagaagaaaatgaatgatagagagggtctgcatagtcctctctagcatcatcatcatacccagcgtcctccgtggagaggtctgcagcagaatactcaattccccttttttcaaaataggcttccttctcttctggaggctaatctgtctcttgaaaccatcttgaagtgaattcttttctcgggatagtgttaatcccgcctttaggttgagctttcttctgcatatgattcagcttactcctaagttcctcaatagtgtgggctagtttctctatagtttcatcttgcttatcagacctctttttaagttctttcactctttcagtctcatatccttctcctgagatcgctctatcatttccagaggttcttccatcttctgttgacccttgtggagttctgttgatgttaaagtgcaacttgatgtgctttccaaggttgagacctattttcccttctctgacatctatcactgcttccagtgaagctaagaatggtcttcccagtattaagggatccttatgctctacttccatatccagcaccacgaagtctgtaggcacttctactccattaatcatgactggtaggtctttcagcatgccgaagggttttctagaagacctatccgcaaggatcaaagtcaggtcacaaggcctatactgaacaagtttcaaccttcttgccatagaaagtagccacaaagaataacatttagctgacagaggctcctagatcgcacacgcaatcgctgaaagctaattccccaatagaacatggtagagtaaaagatccaggatcttctaatttttcttgaacaatcctcctatcagcagctggtgatggattagcatcacattcatcatctgaatgctgattgtccttccaagtatctgactttggtaatcaatgcctccactttggcgttctggtcattgtaaatgcagtccagcttatggtgcaattcaattaacgtcttagcaatttccatgcagctagatgcttgtccctgtagcagttgttgtaccatctgcttcatttcagcatcaggagcagcaggaccttggtgttgctgaggtacaaacccaggtgttggttgcagctcgtagttcccctgaaattgctgcttgggaacaaaacattggttgtagggaacaaaaggtttgttctgaccttgttgttgttgtggaggatacactttgtcctatgggttagcaacgtgggtgctacggtaagagaggttagggttgttcgtcttgaagttgttataccctttgtagccaccctggttgttgttgatgtagctaacttcctcgaactggttaccctccccat

SEQ ID NO: 17532 - DNA, 870 bp, Arabidopsis thaliana landsberg
ataaagctgttaagtatattgactttgaacaccattcgtaatgtgaagaaagaatagagtttcaaagtcctccttctttatttgaaggaaatctcattctcttattgtctttgtatgggtgaaagtgagatctatggaagggagttagttgacctgcggaaccagagtcgatgggagacgctgaagcggttggaaacgtttcgagttgagcaagaacttggtctaggtttgttcgaagagtattagggtttgctttgttagtttgatcgataccacgccaaatctgatattcgacgtaaagactcttcaccttctcttgtaaaacccaatttaggtttcgaatccgtacgatgtcgtcgtccttctcttttagttcgttggctagaacgttttgaaccgcagaagctaacatccgcgtttgcgtttgttgccttgcttcaatctctattcttagcttctccgtttgctgagctacgaacctatcgatctctgactgttgttgattttgaatctgagatacgagttcatcgtttatcaaagacggtgatgatgagtcaaacgctacgcacctccgtttaaccggaacgtttgagtcggagaattgaaaatctcgctggcgttttgtagacagaggaagaacagtgaaattgtaactgagaccatcgtttctgctttgttgaagttggctttcgcagctaaagggtcgacaataaaatattctccggttattaacggaacttcaccgccggtaaactcaaactcgttgtggttcatgttttcttgaaatttaacagaatctctgcaaataacaaaaaaataagaaaaaaatagtttctgcttagcgattttaattactttttctggatggta

SEQ ID NO: 17533 - DNA, 1153 bp, Arabidopsis thaliana landsberg
  unsure (1)..(1153): unsure at all n locations
gcccatatcctatatttccttattgccaagatttatatcttttatagcaagttcgtaatattctcgtaatattctcttaatannnnnnnnnnnnnnnnntacttgtatgtatatatttcatgatgaatgaaaataacagagttttcacaactaaacgagttcgtgaagcattggtatttctaccgccttggcttggtttatgtacaccgagtatgttcagctccatcctatacagattttgggacatgtgcctagggttgaggtttcatatatagaaagaactgaacaaactcggtgtacatagaccaaaccaaggcggtatcaactactaataccctatcaggagaatccagactctccatatcacaccaatataaatttctcttagtgctcttcttactagatccttcaccatactctcggtgaagtactttgagtgcatttttgcttataaagttgtttctggtataaatcataataataaaataaaaactaatttcgcacaaaaattcacttgcgtacttgattaacaaaaccttctatatattattagtgtttgagcaaattgttagggctagaaatatttttttatgtagactaatcattgattgacaaaaaaaaaattaaaaatttagactaatcatttatagtttacctaaacctactttacgccggcttatggttgaattctacgtggatttaagcataagtttacaatagccatagtaattcggtaagtacatgcttttgggtccttatcatctctattggtgtggtcatatctgaataagcagagctactacggatcacgaatctcttcttctcgtatgttttatgtttaagtgaggttcgatctagaatctcatcaattaatatcaataaaagtacacccatgatcaatgagaactcatgtaacaataatctctgttcgtaggttcttggggataaattagtcatcggaatagcataccagagatcgacgatctcattaatcattatgtataagtacaaacttcgtaaaactatccaatgctacaaataacaatacaagatagtacagtggtaccacctaattattgatataattctatgacttctgaacttgaatatgtatgtatgtatggttagtcatatatttataaatctaggaatt

SEQ ID NO: 17534 - DNA, 1156 bp, Arabidopsis thaliana landsberg
  unsure (1)..(1156): unsure at all n locations
gtaacttaaacaatctgtcctcaattttaaatctgtatcatattcatacaccaagatatgaccgacacaaactgtgtgcctgacatgaatttgcacaagaacaatcatgtcctatacgtgaaaatcttaagcatctgggatcatcagtctatgatctgtggaactcctgctaccatgatcctctgtgatgtgaaggtttgttctagaataaatcttattggtttcctattttttgttcttggtttctattgtattccaaagaacttgatgtgtttgtatttgtttccaagggaatagaatcgacgctagagtgccttggcgtgattatttatacaatttcaagcctaccctatttgaaggaaagtggtattacattcaggacttccgattgaagagagcaacttcaatacctaagtacttagtttacgtttatgaaatcgagtttatgtggcacacaaaaatgtggcctttaagtgatatatctactgaaagttgggtcgggtgcatccatgctgatgaaggcgaatctgaatatgaggattatgtaactagtaatctatgatttatttatatagtttatgctttgttgcaattgtatttccttagtactaagatttataagtatttgtttgctctttcgctattgttagatgctattagagtcatatcaagtgtctcaactgtggcgaggtttccatatgtctgtcgtgaagggaaaacctactattaggccagatatgttacatttaccatcagagataatttgtaagttaacaagtaatatgtatattgctattaaaattcgttaggaacatacatatatttgtagtatggtaaatttgtattttggttggctgtaatgataggatcatatcatgtgttgctagagggagtgcgtgtgagtcgtttctgaaaacgttttagcgacttattggtttggtaacttannnnnnnnnnnnnnnnnnnnnnnnnnnnnnnnnnnnnnnnnnnnctagttttaaaggttagtaaaaattcatgaatatgttagtcacattcctttatgatgttaaaccctgtgacctataactaattaccagaagtctttacaaatgttttagaaactaaggccttaatcagcgagcatgggtgttcaagaatcttcattaggaatctt

SEQ ID NO: 17535 - DNA, 1161 bp, Arabidopsis thaliana landsberg
tatttttaaagtatatcatatattcttaccaatagggtttggcattttcttttggttcacccagatttggtttttaaatttaagttgtagagtttgtaaatatattatattatactaaatttaatcattattaaaaatttaactcttatttttatcatttattagctttttcaactcaacatttaattattattatatatatactttctctgttttttattaattgatttttcgaaatttttttagattttatatatattatttattagctataattgatgaattttaaatttaaaaacaaatgattgaatattggtttagaattataaaaaattataatcataaaagttaatacatttataatatattttcttaatctctgtgttttataatatagttggcaattcaatttatggtcaacatcaaactctcgtaccaaagtcagcttcttcgagaatgaaactggaattttaaagtcaacttttaaaattttctctttctgctttcacagagacgacgagagaaacaatggcggagtctgcgatccgaaccatcgtcgaatcaattcactcatcgccgacgcaagccgtcgtgtatctctccggcggtgcctctcaggtttctctcactatctctctatatttaccaaattcatgtaattttgcttcgagtgatccaaaacttcaaattcagtctttaggttggttaatgtcagttcctggagcttcgaacacacttctcgaagccgtggttccatattccatgatctctatggttcaattactcggcagggtttgttctcagtacctccaatctaatgatcaaatcgtttctctttcccgactatatccacattttatcatcctctcaggttccgaaccaacactgtagccaatcaatggcgaatgaaatggctttgttagcttataatcgtgctcttaagctttctaaaccaggtttttttactttaccatttccttctttaacattgttgtgttgcttagttacattgttagttgattttattggtgagagtggtggttttaactttcattctttactcggtatgtacgggattatctaaagaaacatagagatcttggattggttataacttgcaaatttggtggaaagaatgtgcggtttttggtgttggtttta

SEQ ID NO: 17536 - DNA, 1927 bp, Arabidopsis thaliana landsberg
cagcgccgaagtcaaagcggcaacaaaattgcagatcgccgccggcgtaagctgtgagaacgccatacgacggcgattcagaaaggagatgatcagagacggaatcggaaaccagaggtgacactgtctgaagtaggcttcatacatacaaacataccctcgagggggattccatgggcgctcctcctctccgggaatcatgcaagtgagcgggcgatctccatagccacatagggcgaatacttccgcgacagactcggttgttgaaagggtctttttcgcggtgatctcggtgttccagctaacaactgggtcgaggtcaaattcaacataatcctcgtgaagtaatctcgcattaacctcagcctctgtatactgcggctgcgtgttataagcatcctctaggtcgatgagtgggtcgaactgagataagaaatccaccggatcttcaggagcagcgagatgtccaccggaaccttcccgatctggctcatcaagcaacgtcggaatctcgatccgattcgatcgactagactgagcttcgtcacttggattcccggttaaccgagagtttcggcgaacttatcgacgcttcactctcggaggaagaagaggacggagagacaagaacaaccttacccattgccggaaaaatcgataaagaatcgagagtacaaaataatttgcagaggagagagcgagagctacctttgattcttcttgcaagcggcggaaaatgatttcccgagggtttaatctaatataaatagaggcgaatgggcggcaaacctacgaggtcatcattaaacctacgagacgcttcggttcctgagcttcacgcgcgcgtactgacgcagcgattggacacatgtcagatacgttcgaaatacgaatcgattcggaaatctaatgattaattcacgctttccaagatttaaatcgaatattcaatttctaagttcggaaatttcgaattaagcaactcggactctccgaactgggggactaattgttggtgcaggaattagcacctccgacaataccaatttaaaccaaggaataacgtgaataaaatcgagaattcgattgaaccggggaatcccggatagcctgttaatgggccttaagtcatgagctcgccagaagatttaggtcgacaatcgagatcgccataagcggcttctgaggtcgtgtgaagggaaaacttccatttaaaagagggtaatctcatgaagaatggaagtaatggagatttagacttaagataattagaagtttatcatattttggtatgttcgacccattgtataaataggggagggtcaaactctccagggatccatctttaacctaatacaaaaagactacaattatagagcaaaccctagctttctattcatgcaactctgttcttcccctttgattatttattaactgagagaggagtgaatttgtctaaatcctagctttcttttcctcagcttttctcctgcataatgttcaatctatttttcaaattaatcataatgtaacctttatctctctcccttctgtacctggtaaaaaagcaggatcgattatgaataaaccacaattaagtctattcctttgttgaataaggcatatctcatatacctcacaaatctaggtacttatatatggttgtaaagacgtttttgccctaataattcattgtcgattgtttttctctttctccttccaacatccaagttctctaaagcttcgataaaaattgatttctcttttggtttagaattttgatgaattggaaaataattgatctgatttgtgtttaagattagagtttttgggttccctggacagtatcccttagagtttagattccttcaatgacaattcgtttgattggatccatgggattttagaaaagattggtgttacggat

SEQ ID NO: 17537 - DNA, 1048 bp, Arabidopsis thaliana landsberg
aacgaaacgaaccgaaacgaaactaaacgaaacgaaacgaatcgaaggtttagactgtggatatcaaccttaattaattagagtcaaagcattgtgattagtttgacttttacatccgtcactatgtcaacgttattgtatttatccccaacttgctaatgatagaacaatatttattttgatttatcttgaatttcaacaggttaattagctaattatagttataacatttaaaaaaaactcagatgcgtgaacaagatcgcaaactaattccatgcataatgcatctcttgactttgaaatgcatttcttgacttcgaatcccaaatgaaccattttgttatatacttgaatatataatatattatatatatataacttaaagcgtgacattgttctcccaattatatagttaatcactataaactacaacttggtttgatagtcaaattcaaaaccaagactcaatatcactaagtcttctccattaacgctataaatagattgaaatcctaagctaattacaatcacaaacacaaacacaaacaaaacgcctctcaatactaaatcaagaacattgaataaaacaatgtcttcacgacaatcggtgaggcacccgagtcacaaccatccattgcgcggtcacaaatgcgaagccaaagacgaaatcatctgctccggttgtgatctcgatctggttggtgcagctttcaaatgcacaaagtcatcagattgtgattacttcttgcacaagtcatgttttgaacttccacgtgaaaccaaccacaaatctcaccaaacccacactttgactttaatctattccccaaagtcaacgtacacgtgtaatgcttgcggcgaatacggatcaagtttcacgtacaactgttcgatctgtcagtacgatgtacatgtcggatgtgtttcaatgcttgaaacagtgaagcgtgaagatcacccacatccacttactcttttttacggttctccttataaccatcccgttttagtttccaaatgcgatgtttgtgaagacattgtaccggat

SEQ ID NO: 17538 - DNA, 822 bp, Arabidopsis thaliana landsberg
atctaattttcttgacgctagtctttctttccggaaacatcatcttcatgtcattattggtacgttgttcgaattttgtgtaatcaaatttaagcggtggttggttgggaaaatcgtcggtgtagatgccactaatgttgtaaaaataagcctcttgcatagagattctctccgggatcataaaagtgcggttgttgagagaaccagcatacctttgacctaacggtccaatacacttggtgcccgctggacatgggtctaagccaagccccatggttatgaacatcttctcgtccacgtgacgagggactggtgtccagtgtggtccaccaacgaggctagtgatgtttgaggagaacctatgagcggtggacatgtcattcggcacaggcatcaacggctccgctggcgatgatgatgacatggcaccctggtagacgattaagcctctggtgggtttgatgtcgggggttggtatcccaatggcactaatgtaagggagggtggccatatagtactttccaatggcctggtcggcggtgagaagtgcgtcaacggtctgtcccggcgttaagatcatcacatcggtgaggtacggcgtcgagtagacagcatctacagcgacaactgtgacgttgtgattggctattttgaagaagaggtgagtgttgagtgctgcgtttacgatccttagcaagtatgtttttccttgtacaactttgaggttaaacattcctaccaaagccaaaaataaaaataaaagttaattctgttttttgtaaacaatttacaataaaaagtaacttttattcaagtaaagag

SEQ ID NO: 17539 - DNA, 1482 bp, Arabidopsis thaliana landsberg
  unsure (1)..(1482): unsure at all n locations
ggaccattgcgacagtactacttcaaagcaaaacaaaatagaaatacattcaatttttctttaaaaagtttgaattagactgatggagaaggagaacttccaaacgaaggtattcattgaaacaagaagtttgttgatcaacctgtacgttagtgataacttctaacttgacaacctttcaacgtaggtatagattacataaatcccccaataaatgtctgttccaaaaaaaattggtgttacaatattctctcagaactagagttccaaactcccttttttttcctctgtacaaaatatcatcaaatggttctaccacacttgatcgcataaatgtttagtaagaataatatatgcaatccaatctcttgcccaacctacccaactttgcaacttcacatcaaatccctttcacgcactttctttaagcttccaccagagaaatagagaccagaaccgaccaccagaattacagtaactaacctgagcaatacgtttcttttggtagtttgtgtaatgacccaaatacatcacaacacaactcccataatttcagtggcagtctctgcttataggtctcctccacgctgtaattacacatcaacccactggtactactgctcaaacagacccattctctatctttctctgttctcatgaacgtctttgagtcttgaagcatggcattgaggaacaaaaaggtaaaaaggctcaacttttattttaattagttgtccttgagaagagaattgtcagataacgcagcacgagtcgcttggaactgtatcatatactttctttgcaggtctcttaatttatccatcagttcttggaatgtgggtctcagctttgtatcactgccgcgtggacagaccaaaataaaaacacaaatcaatgtcagcatcagctatgtaacatgtagaacacctaaatcaaggagaaccataataattaaaggctacacacggattatgcagtgttcaatatgttaatgtacctgtgccaacagctctccattaatgagatccaacgaggatcaatgtcttttgggatttccagcctctggtccatgaaccccacagctccaatcacctgcacatatttcaaataagcatctcgtcatacttgattcgtgtatagagagaggatatgcagtgaaactgaaattggaagttttcggcaatcaagtcgtgcaatggaattaggagttaggacatcaaattcgtagcgatgtggtatagtatgactatatataaagaacacacttcacttgtatctttacattttacagcaagtacaatcgtttttatggttcccactctcttaactctcaagtcttaattagtacaacggattttaacatatcgaccctggaactattcttctgacataaagattctagttatttgttntagcataattgacagaacatagaatgtagtttttaagtgaaactttcccgatttttagatttctaggaca

SEQ ID NO: 17540 - DNA, 658 bp, Arabidopsis thaliana landsberg
agagcttccctttctgcgttattgaatcaatttttttgattattcaacttctgggtttttctcctacaggaattctattgggaagcagcagtcaaagaaatcgacttggcttgtcttaaaaccacaaacgcttcttcttcttcgtcatcccatttcactcctttggctaatccaccaattacggcaaatctcactaagccacctgcgaagagacaacctactctcgataaattcatcggcagaaccgaacataaaccggagaatcatcaagttgtttccgagtgtggtgttaacgataacgataatagtcctttagttgggattgatcctgaggcagctaaaacttggatttatccaggtttgttgagattgttaactttatgataaaacttttgtaagtcggtgaccgaataatcgttgtttgtggtgttttagtgaatgggagtgttcctttaagagattatcagtttgctataacgaagactgctttgttttcgaatacattggtggctttgcctacgggacttggtaaaacgcttatagctgcggttgttatgtataattacttcagatggttcccacaaggtagaagaatcttcatcaagtagctatggaaatatcttgcttaatgctttaggaatgtaacttaaaagctgtc

SEQ ID NO: 17541 - DNA, 1587 bp, Arabidopsis thaliana landsberg
agcttgttgctgtgaacggagaaccatccagcgaagcgaaatcaaagaatgagctttgattacaccataattgtttttcatttaaaaggaaaccttgagtagtcatcgatgttggcatttgaatcttaaacagcctagaatcatttactttgctaggtgaagacaataattatatgttggtcataacattagttatgttggcagttgtaaaatgacaacttggccagaatagaacgacgagcaatcgcagataatcagaaaaacattggccaatttagtaaacatgtacaatcttccaatttagtacattgtttacggtgcccctctctctcgtcccacgttggatcggtttttgggcttttaagtctaattttagtgaatattgaccgacccaattgagttttttgggtttatttgtttggttctgtctattgtcatcgaatcctttcttttagggtttgtttctgcatcttcaatttgtttcataaatcacacataaacagggaacaagtaaaatacttctttggttttatatttgttttgctaaggttaacctaactagttttccataaagagaacgagaactaacgagtttgcgctatatcgatcctcattgaatgactaagatatccaatcttccaagggatttgtcggaagaggtgctctgtagaattccgttgacatctctgaggcctgtccgatctacttgcaaaaagtggagcactttatccaaatgtgggagctttgcaaagaagcaccttgctcaagcaaaagtactagcagacgcaaaggagtttatggtggtcttgatgatgaattttagggtttatttgatgagagtcaatcttcaaaacaacgttgttgaatcatcatcatcatcatcatcatcatcatcatgtataaaacgtgaagctaaacttattagcttaggcgatgaagaagctgatatatctcaagtctttcactgtgacggtttattgttatgcatcagcatcaccgaatccaagactaggctcgttgtttggaacccgtattgggggcatacccggttattcgagcccacacatcaattcaacaaattcgatagctattcgtatgctctcggatacgacaagagccgcaaatcccacaaaatcttgaggggtattacttgtttggatcccttttttgatgagttcaaaatctacgattttaactctgacttatggagggatcttgatgtaactccggagtggcacttatggcaaatgctccatggcgtgtctctcaagggaaatgcctactggtttgctagagagaattataccgaaacaatggacacagaccattttttcttactctgttttgatttcacaagcgagacatttgggccgcctttgcctcttccgtttgagtttgctgtttctgaagatactatgagtgtatctagtgttagagaagagcagcttgttgtattatatcagccgtgggattatttatagttggacatctgggtgacgtctaagattgagcccaacgctgtgtcgtggaacagcaaggtgttcttatcagtgagtttaaaacaactcgtcggccctcagttttcag

SEQ ID NO: 17542 - DNA, 747 bp, Arabidopsis thaliana landsberg
tattgcggtcagcggagtgttagtccgagaagacagaggcgaacagaaaccgattttttacgtctcgcagactttcaccagcgcggaatctcgctatccgcaaatggaaaaacttgctttagcagtcataatgtcggctcggaagctgcgaccctactttcaatcccattccatcatagtaatgggatccatgccacttcgcgccatcttacacagtccgagccaatcaggacgcctggctaagtgggcaattgagctcagcgaatacgacatcgagtatcggaacaaaacatgtgcaaaatcccaggtcctagccgattttatcatcgaactgcccaccaaggaggcccgggagaacccactcgatacaacttggctactgcacgtagatggctcgtcctcgaagcaaggatcaggtgtaggcatccgcctcacctcaccaacaggagaggtcctcgagcagtcatttagattaaactttgaggctaccaacaatgtggccaagtacaaatcgctcgttgccggacttaatctagctcggggactaaagataggaaaaatccgagctttttgcgactcccagctcgtcgcgaatcaattcaacggagaatacacagctcgggacgaaaagatggaagcctacctgattcatgttcaaaatctagcgaagaatttcgatgaattcgagttgacaaggattccacgaggagaaaatacatcggctaatgccctggctgctctagcctc

SEQ ID NO: 17543 - DNA, 283 bp, Arabidopsis thaliana landsberg
tataaaccgaacacgctattagttgggttcatgaacttaaactgaggttacatacttctttcttcatcagatcccaaaaaaaatgcatcccgcatcgcgccacataaaaagctgtgaacgtcataaatcctagctctttgagtgagatcccaccaccatgtgcgtaaggaaaattttcgctacttgtgagacacttctggcgatgagctggcgcatcacgtgggatttgtggtccctgactgatcattttcctaagccgtacgggtggagccatgatagcaga

SEQ ID NO: 17544 - DNA, 1147 bp, Arabidopsis thaliana landsberg
cggcacgtgtcccaccccctccaacctagaacatttttgtttaaaaaggttttaacgttcacaaacaaatataatagtatatttttgatcaagagcaattataacgtgaataagtatcactagataacgccaaaacttcatattcctataatcctagacggccaattattaaccctgcaatgctgaaaatcgatgtcaatacgataaatttaagagtccaaagtctaaacaaacagtctatatgaggttttctagaaattaagcaaacgaaatttagagtagggtacacttaaactaatgtagttacatctaaatcaaaatgttgtattcgaagtacttgtttttgtcatatagagactagagacgcagaactagtaattgatatatacatgaaaggtagttttgcgatttgacctatatctattctatgaaagcctacaaaaagcaatctagcacgagggtcacacgctacgatagttctttccttcgtcctctagaattatctttttttaaaaggcacttcttgataatcaattattgagtggcaattagatccctaaacattgattaagttcgtactaatcatacataatctcacctagattagttataaaatgactttagaaacctgcgccagcaaggtgtggaattcttcacgtttttactagtttatcattttccaagtttttcgccaaaacggttgattataataggatttaagaaaatatcaataaatcatacatctatgtttttctttttttttttgtcaaacaatcatacatctatgttatattctctctttcacaaccctaatagttacttttttttttttttgttaaacacaagtacacaaccataataacttgtagtgaggaaaaaaaaaaagtacttcttatttactccctctgttattttttatttgattgtttagaaaaaaaatttatttctaaaagattgattttttaaattttccatgtaatatttattggttagtattggtgaattgtaatttttttaaaaatagttaattatcattaatttaaaattataaaaaattataaaatatccccactaatacatttataataaacatttaaaatataattttaatatgtgtgttttttctaaacaatgaaacatcttattt

SEQ ID NO: 17545 - DNA, 594 bp, Arabidopsis thaliana landsberg
agatgtttaataaatggcaagctcaaaaatggtgggtggagaatttcgagaaggtcatggagttatacaacgtgcagttcaatcagcagagcgtaccgcttcaaactcctcctgtatctgaagatggggtaatgcaatttcactattgaacacacaaatctattaattgacaaccaaagcgttatgggttatatctctctttcggttattcaatggtgtgccagggctcacaaatacagtccgtgaaggacagtcctgtaactccaccgctggaaagagagcgacctcaccgcaatattccaggctcttctggttttgcttcaaccccaaagctctctagcatcagcggaaccaagactgaaacatcatctatcgatggttctgctagaagtagctcggtagatcgaaccgaggaggtctcagtgagtaacgcaagtgacatggaaagtgaatgggtagaacaagatgagcctggtatctatattactatcagagctttaccagatggaaatcgcgagcttaggcgagttcgattcaggtacataactgaagaacccattctgctatattacatacttctctttctgaacactg

SEQ ID NO: 17546 - DNA, 850 bp, Arabidopsis thaliana landsberg
ttcttttactttatattaggaaaaaaatagaataaaaatctaacaaatattaaaatctaaaatcgttaaaattgacacgtgtcatgatcttgtgagttagtaactttcaaaaccgtactttatataataagatttctcgtaatgtaaatgttaaaactggcaatttggcacgaaaagtttgtaccgaaccgtttcatgtcacttatgtaaataatattccttagaattatctcttttgagatttaaataaaaactgatgataaaaaaaaatttgcataaattttaaattaattatatattgttatttatttgtatatatatatatgcgctgttaattatatatgagattattatcatagctcaaagtctcttgtgtgtaagtaggtcagcagttcaactccctattgacacagttttccatctttgttttttaataaaacgatgctttgttatagaagggccggttgttaacgggccgggcttagcgatattaatatctagcagtcgctttcattgaccttttacttcttctttccttagactttcagtgatgtttcctgataccgtgtttatcaccttgtgtttcgcgtgtcttcccccactttcgatagtcaaatctcgaatatttcaaatgctttcgttttcgtaatatgcgatactcaaaacatataaattcgcatatcctccaaagtatgttatctctaattcgcttccaccaaaacatttcaagaaaatcatcagccatctgaaactaatgccgctaggccactacaaatacaatcatacgaagttgcagccaacgtttcaaaaagagaggcgtccaaggaaccatgtgtgtatcacatgaagc

SEQ ID NO: 17547 - DNA, 1273 bp, Arabidopsis thaliana landsberg
ttccgaaatgaagagaaattttttaaacccacactcagccggttcaaccggttcacgggttaatggtgagtttttgtggttttttttgttttgaacttgtcgggttttagcactaaacccaaaccgaaaaagtattcgggtcacggttcaaccggtcggaccggacggttcgggtcgggcatgaaaacactgctcacatctcttattcaagtttaatgacaactttacccctcactatacgaacccccatattacgcaaaaatatttaagttttataaataattgatttttagatttatctaattttgaaagaaaaaaatgcaagattgatgtaattggacaattttggacaaaataacgatttttgggcctttaaacaaaactatatatataatttcggctaaaagttttgcttttctagcaaattagccataattttaattttgcaaatatttataaaaaaaaatcttttgataaagaattatcagaaatttttgtaagtaaagttatgtgtacttaatttttataaactttctaagatgttcaattcaagtggtctcgaagagcttggattccaaatgaaaaaaaaaaagtttatcacattgaatttttaaatattccgcaagttaaatagttgatattatattttttatatctaaaatgtcaaaaagttcaatctaaaatatgcttgcgcattaaaccggtatagtacattggtattgtgccgttaaccaattctataattctatatttctttgcataggttgagcttttcaaattattaaaaaaaaaaactgagttttcaaaaactttacatttgggcattaattgtgactcgaaaaggcggaatgattcgggttaccggcacggcggctccggctatgtctgtggtgtttccgacttcatggagacaaccggttatgcttcctctccggagcgcaaagaccttcaagcctcacacatttcttgatcttaaaggaggcaaagagtacagtacaaagtacaaacatctctctaaaatttatatttgcttctctagtgtaatcgtttttggattcaatgttttgaaaaacgttcgatattgcagaatgagtgagttccatgaggttgagcttaaagttcgtgattatgaattggatcagtttggtgttgtgaacaatgctgtttacgcaaactactgccaacacggttagtttgcaatttttctgcttctcattgttgaaattgtttacacatttgttagtgtacttgattagaatttgagagtgtctaa

SEQ ID NO: 17548 - DNA, 963 bp, Arabidopsis thaliana landsberg
aacatcaccgatcactccaagaaacaagatttggactcgttctgatttccgtgtggaactctgtttcgtgggatcatattattggttccttgtcggtagattactgaaacaaaactttgtccttccatagacaaccatctctttcatctatctggatccttctattcagccaaatcacatgtcggccgaaataaaactcagtgtcctttgatccgtccagatcaatctacaggtaaaataatttacaagcagatcaatatagtatgcactgtgcttgatcaatatgtggatatgattctgatttctcaaacgatagctttgtaacatattactctgccttcttgttgtgaccagtttagtctctgcataaatcttagatcattcccatgagagatgcttttgtttatggtactataaaccgtaaacatcgaagagaagccatcaattttgttggttcgtcatttttctatcaaattttagtcaaacaaattccactgaagagtgatatgtacaaaaaaatcaagttcacaaaaaaactgtactcaaatgtatcattcattttgtttcgtaaacacaagatattctagtggaatgttgaaaccggtcaaggtagaggcataggaggtctccagctactgaactggaccagttctctattcacaaaactgccattgtgcagccaaaacgtctcagtcgattgctggaaatgtctaactttgcgttgaagctcccatagaatccctttaaccgcactgcagggtgcggaatctggaccgtacacaaacaaacatctaatcttccgacctcgggctatcattccttctatgtctctatctgaaagacaagccgggaagaagttcttaaatctcaagaatctgagcaaatccattgatataagcgaagagaaagcggttctgaagtaacttaatgttacctgatattgaagttaagtaatcaagaaac

SEQ ID NO: 17549 - DNA, 1713 bp, Arabidopsis thaliana landsberg
acaagaaaagagcgggtttaatttgtacaacaggttgaaatgaggactcttaaaaagcctttaagaaaattttgaaactgaggtcttaaccactctctttggagctgcagtcccctagtgaacagaatataaagaagattaagtagagcaagaaaaacaagaaataaaaaattaagacagtccacacacatgtaccctttgaagtctgaaaaaagaaataacacagtttgattcagttaataagatatgttagttagagaaagcagaagcagcttaaaggaattcttaactacctgaaccaacatacttgtgtaaagctcccaacagtttgattgcaagatttcaggtgtcatcagtaacatccttacaaaaatctatcaaatcatgtcccatggatagaaaaagctcttttgtcgtaacgaaattaactgcactgcagtttaacaaacatggatatcaggggctggaaatttctaagtagagaaaatttcaaaaccgtaagtttcaaaagttagacaccaaagtcatcaactggtgaacaatccataacaagcattcactaaaaaaccttgggattccttgtgctctttcatgtttttcaaagctacaaacaagagccacaaatcatcattttgatcagattaataagaaaactcaaagaaaagttactgaaccagctcataacctcttgaaaccaaatctaggaccaactgcttcgtagtattcagtagggtacttcatagcaaacagctcataacctcttgaaaccaaatctaggaccaaaccttaggtggttcaactttcattccttacagatccatctttttttgcctccactagttttgccagtcccaaccttgctactcacaggcctggaaaaacatttcttataaaagatacctggcttaaactgaatatattttcaaccatcacaaataagaaaaattggtaaaagagttacctctttctgcaagatgccatttactattgcaatcggtatacatatgaaaaagattatagaaaagatagtaacaaaattaaattattttctgtttttgttttgagcttccttttgtgtgtgtttgaatttgttaccattgagtgttttatattatgttttttgttgttgtgaacttgactttgtatatgcgtgttttttgtgtgtgtttaactttgtgaatgcatgttttgttttgtgcactgttttttttgttgtctttgagtttttattgcgtttgagtattttgtgttctgtttttgaggttgtgtgagagagacagagactctaccttaaccttcgggttctcttggctacccaatcgtctccccagtgagttgtctctatagtataagaatccattctcctgaaaccgaaacatttaattagcaacatttttggctttcgcatgtacagaaaacgagtatatatgccttatggaaactagttacattatcatgcaaccaaaaaaggtctacctttccagcatctcctcaaataaatctagagaaaagcgtacattacattacacctcctgtaagttaaaatttagcaatttaagagctcatttcaaaaagaagacaaagccacgaaaacataaagtaaaagcgagaaatagagaatcaaattagctcatgtgaataacataacatgtctatatggtacttcataaccaacaaaatctttaagtggaatgcaaatgaaggaccacttaa

SEQ ID NO: 17550 - DNA, 1776 bp, Arabidopsis thaliana landsberg
agcgatttgggacattctaaaatcgtaattattatccacccaaacccgtcctaccatataacccattcccgtgaaatttaacataatttttgtcattttcttataaatttcaatattataaaatttgaaacttaaaaaaatacaatatcgacccaaaattcatcattgaattttgattgttatatttaagattttttctgtaatatatcgcttcgtattaatatattttttatatatttataatgttaaatttcttgtaaaattcaatttataatttttaaaactttataagttttaaaattataaatatttaaagcattttttaaagataaactttataaaaaaatttaaaattataatatttaacttttgataaagttataatatttataatttcttgaaacattttaaagtttcaattcttgaaaataaaaaatccgagtaaaatcggataactattttaattttggacgcctgataaatcaagcttccagctcattcgtaatcagaatcattttggtccttttataatatgggtctgaaccattgtccaatttttctaagcgatgtgggacattgtatacatattatttcttcataggttgaataatatatgtccgttttaaaaaatttgaattacatcatattcagaaaaaaatataatattttattaactatatatattttatataaattcaaaataaataaagtataagatcaaataaaattgaaagaagaattatatatttatgtttaaattaggtagaaatattttaggaaattagttaaggtaaataagaaatatgattagtttagagatattgtttatattaaatttggtaattaaatcattaattttcgtttttaattattagtttttaggtaactttttcaaaaattaatgttatccaagatcagaacagaattaaacatgttatccaggatccgaatagagttaaaccgggtaaaactcacccatttgaattaattgttgaattatggctcaaatcttcaacattatcttcaaaaacttcctacaaaaatatatatatagataataaatctagagcgcaaaaaaaaaaatctaaaccaaatttgcataatttttaattaattgattttaaaaggacaacaaccaaaaaaaactacttaaattgaagagacgacgatgtgcgtaaaacgaagagactcaagacaattttgggattcgtgagagatattgattcgctgcaatggaagaatctgttcatcaatcgatacgattcggctcaggtttcttctctctttctctcactgtttcattgttctacgaatccattaacgtgtagtagatctaccgattcatatgattttggactgatgcagttgcagatttaatcatgtggaagaatcgacgcggagggtttcttctactcggatcaacgacattgttatggttcctctttgagaaatgtggatacagtttcttcccctttgttgttaatactcagcttctctccgtcgttatactcttcctctgggccaaatctgctattctcttcaataggtatcatcatctaaacctgattgtataatgtcacattatttttggtttgcatagttttagtgaagaagaatgtcacaatgtttgcataagtttgttgtagataagaagataatggttacaggtttaagtatgtttgctaaagctgaatctgaaatttcttgaccagacctatgcctctgggccaaatctgctattcttttctataggtatctcatttgtagataaaagat

SEQ ID NO: 17551 - DNA, 843 bp, Arabidopsis thaliana landsberg
gagtcctttccactcgaacggaaggtaagttggcccagaattcatagaccacctcgtcctaaaatccttgaattcccgttactgtgttgagaagacccgcctcagagatcacatccgtgatccatttatcagccagaggatccaaattcagttccttgatcatttgtcgacgagagaaatacaagtacctttgttcagcgagaggagaactgaatttgaactcctgaaatagattgctccttctaggacctgaaacaacaactccctttcctttctgttgtttctgtgacaggaactcctcacttagagtgtctcgtttgcgcttcgccagacgcgatgtcacggatgatacccctgggatttcagtagacattggcacagagttctgtcggtttctgactggaacgatggaagacgaattgtcctcatcatcatcactaatatccacaagttctacaggaagctggacatgtggaggcagtccggtgatgaagcacgtcgcaaatgtggcctgccgaaatctgcatgcagaaccaactgattgtgaggagtgctcacaagatcatccatcatatttgggctgtagctttctgatgctatggatgaagattcagatcctgaagactcgattctagattgcacaagacccttgaagaacgatttcatttgcacagaatgattttccttagagatcagagtgagttctctagagcacgcaagagacttttcactttcctgagcggttcagatatgaatcctcaaaaccctagctttttccctccaatcaattcccgcatgatggacttgcacctcataagccggggatcctctgatcctctagag

SEQ ID NO: 17552 - DNA, 978 bp, Arabidopsis thaliana landsberg
tcttgaggttgagagctcagacacaattgataatgtcaaggctaagattcaggacaaggaagggatcccaccggaccaacagagactcatcttcgctgggaagcagcttgaggatggtcggactcttgcagattacaacatccagaaggagtcgactcttcacttggttcttcgtcttcgtggtggaagcttctgagcttttgtgatgtgatcaaaagtggttgttcgagtctcatgcacttgggaggtgagatcttcacctggtttggtttctgcttcggtctgcgggaaaaacttatccttatcgatgttctgaagtttcattttctgttttctcttattttcttatgaacctttggttgctgtttcaacttttaataataatccaagtgcatgttaaaacattccgctttctagaaattattattaccctaatgtccaataatcatagagtagccattatgatttttagtctagtttgagtaattgatttcagacattaaagtagccaagttcaaaggatcttgtttgttccactgatctcttaactgtaccacaaacagcgattagtttgatccgcaaaacctaaaactgcacacacaatataaaccacatgcaacatttgaagtgaatctacacacaatccaccacaccacataacattaactttacttagcatcaaaaatacagagcagacacatgctactgcttcagtttcattttggcattattacattcggatttcgaatgtgtgtgtacgactttcccattttcccaagctctttccatttagacccagaaccagagacactccacaacttgtcaccaggctttgccgaacccaattttggtttcataagaggaagcttgttgttcccttttcccattccgttagccatcaaccaccttgaaccagactgcacctgctgctgctgagtcgtgattccccatggcttcttatctgtctcgctcttcata

SEQ ID NO: 17553 - DNA, 1692 bp, Arabidopsis thaliana landsberg
aaaatcttatagactcacgccgcttggaagagttccaacatttcaagagatctttaagatttggcaatccaaacatcattttaacctaaacaacacaaaatagtttttcttaccaatctgtaaaattgtctcgatcagaaacagttaaaatttactcaaacactatcaaatcccaattattttctttcaacattataaactgcggttccagacatatcctccaaccaaaatctaccgatataaatgtaaatctagcataaaataaatttctctctgttagttacttaatttttatatcataattaacatttcaccaaaactagttttggttttcaatgatgttcaattagatcaccttacaatttattcactttcattatatattttttagtcagcaaactgattgagctttttctcaactctttaaggtttgaaaggaagtaaagttgaactctcgtactcaaagatctgcacaggtaaaagtttctcgacttgagctagtgaatccgaccatttattcattttcatttttataaggaaatgagtgaattttgtttccctatagactaaaaatgcactatccatattttattctttaataggccaaagcacacaaactatttggagcgttaaaacaacaatagtagcaaaaacaggggagagaaatgggtgattggtcaaagctaccagaggagcttcttggtttaattgctctcagactttactccgtcatcgaactcatccgtttccggagcatatgcaagtcatggcgctcctctgcttccggcgtcaacaagaaccattccctgagctcccctctcatctacttcaagccgctccaaatcattctcgctcgcgcacaagcaaacggacaaattttgagcaagtatcatggcacggtcctctcacgtgccacattctttcgcgtcacactcgcctcctctccggaccaagggtggttgatcaaatcagacaccgatctcaaataccggaatttccatctcctaaactgcctctctcgcaaagcactaggacgttctcgcaagctcatttctctatcggagttcatagtctccgagattcaagaatcttatgcggttgtaggccgccgcacaagagaaacagctagcgaattcaaaagagtgtttcttgtcagagtccaaggaggagatcatcgtgttctagtgatcggcatcgacgggaaaatcaggttctggaaaggaggaatatggaacggaatcaagaaacaagtagctcaattctctgactttgtacttgacgaaggtcttacttacgctgtggatacaaaaggcattatgtggtggattagttccgcttacgacatcatcaggtacggaactaaactacatgaaaacatcactaacggttcttgcggagaaaaaaggtttgttagatgtcgtggagaactttacattgtagatcgtctcattgacgagaatctcctaaagagaaaagctgattcctatgatgataatgccattgttcatttccggaatgctgattataccaatgctgatctctgggaagatggtaatggcaacgatgatttcttcgctgctcaggctcatcgctttatccatgtgctacacgacaatcttgggaatgtaagttgtaaaccatttgaacgtgacccctcccaaaacgattggtttcaaggtttacaagaatgat

SEQ ID NO: 17554 - DNA, 1161 bp, Arabidopsis thaliana landsberg
gaaaattgtctttagcgtaggcagttggatggaggaagagaccttctggagatgactcattttgcacaccaaggaaataacttgtagcgcccaaatccttcattgaaaaacgtttgctgagagacatgagaagctcttgaagtagatggtgatcactcccggggagacgagtgtcatctacatatagaagtaacaccaatgtcttaccattcttgtgatatgtgaatagagaaggatctgatttgctgcaagaaaaaccaaagtcaagaagatagttactaatcgtgtcaaaccaagctctaggagcctgttttaagccatacaaagctttggtgagacggcacacatatgaaggtttttcttgatccacaaagccaggaggctgaagcatgtagacaggttcctttaattcaccgtgaagaaacgcattagacacatcaagttgctttatgttccatcctttagcagtagcaacatcgagaacaagacggatagtggctgttctgaccaccggactgaaggtttcaagatagtctagaccttcctcttggtgaaatcctttggcaacaagcctagcttttagcttatccacagacccatctggtttgagtttagttttaaacaccccacctgcatcccaaaatattcatatcttctgtgggctgaaccaatgaccatgtatgcaacatgtgaattgttctcatttcatcattcaccgcattgttccaaccagggtgatttaaggcttcatcaatcgattttggttcctcaactgaaaattttgaggtaagaagtgcataccgtgtgtttggtttatgaatcccggctttagaccttgttgtcattgggtgagtgttttctggttcttgttgtacttcttcttctactgtaacctctgcttcatcattttgagtgtgtgtttcttcattcagagattctgtttcttcaaaggagtcttcttcctcttcttcattcaatactccctcagttaaaattgcaggctgagttgtagtatcctgaattgtattcttctggatcgatggaggttttgctaagctttcaatttttccttcttcagcttgcggtatgagtgactgatcagcttgtggtatagatgactgccaagcactgagaagagaggactcgtattgtaaaccaaga

SEQ ID NO: 17555 - DNA, 1333 bp, Arabidopsis thaliana landsberg
ctggagcttcaatactaccccgagaatatagctttctaagaaggggcacagggagagggtgagccttttgcattgcacacatcacatgttctgctcccttgaagggagaaccattagattgaacattctttgtgggcaagagctaggtcccctctacacaaacattacatattgaaggctcctgaatactctctcccaattctacaaagcagattctacacacagcattcttctttacgaacatcttcagatccatcaacattcgcgtctgaaacatttcactaatataaggcacagggtttgttacaaggatataatcacaaaaatatcaaactttcatgtctttttggctttaaaaatcaaatgaaaaaatacaatttctaaccgttaagtttaatagtatttctggttggagacatgtttggagttggaatcacccggaaaacacctaattgcctttgacttccatctttgttgaatgctgggacagagccgtgaacggtggataggcagtggaggcccttttttctgttgggaaaacatttttataaaaataattggtcaaaccaacaatgaagtgaagcagaagataacctagttagctaaacttattttacaagcacaatgcatcacttaagattactctactgagaccaaggtgaagtacgagacaataaaatgtcccttgccaatgagataacagcacaaaccacaatagaattcacatgagaacctaaatgaaacgatccgtcaagttactcaccgtggaagtaactagatcaacggcaaatctcccgtgagtggactcaggatttgagtgagctataggggttacaggaagagactcagttttcttcaatcttggagttaaaatattagtgagagtccatgtagacctgtccctgccatttcctgaagaaggggaggacacaaagcccaaatccgcggctttctcgatatccacattatcgttattgctgttccggttcttaaagcttaacttggggattagattcttcaggctattaggtttgtttcttgaagaagaagaagtagaagaagaaggactcaaggatgcaccacgttgtccgactctagggctggacattggagaaaagttgactcttttggcaacaggacttgaagttaaagatgcatttcgtctaaaaagatcatctcttgtagtatcttcaggtgttgttgatggtaaatctaacacaagacctcgcctccataggtctcggcccggtgatgatagctcttgtccttgtgcaatctcagcagaatttccatcctgcaaacaccaaagaaagattaatttcaaatccaattt

SEQ ID NO: 17556 - DNA, 2076 bp, Arabidopsis thaliana landsberg
  unsure (1)..(2076): unsure at all n locations
aatgtgtgttcagacaactcgttaatatgtcaaagaacgtgagccaaccgcttcatgccacgtaagtttccaaatggacccccatttttaaaacccaacccctttcggcaacctcttccttcatctccaacccctttgacaactccgataatttattcggatatcatctacttcgcgtatatattctgttactgtacaccctcaccttctttatgttaattgtttgacgaatataaattaatttatgtccattgcttatgattggctaagacatggtttggattcatgaatccttgataatgatttgtacgtacgtcgactaccgtatattccatgtctgatcatgtcttcaggtcaaccaaatagaaacataccagaaataagtcaataaatcaagcgttccaaatctataggcacgtttttgttcatttgtcttctccacgatcggtgatccgatcacttaagtaaagagacgattttttaaatgttgaggttataaaaacgaaaacgattgcgtgaagctagagggtgtgtgtgattttatctttgctgagtaaaatattagcggacaagatcaaaccgcaacttgagtcttggtggataaggattaaggagatagggcaagtgcattgtttcttaaaaacatcccaagaacttctccaagtgtcattaggagtgacataaaacattttcttctaatttctaaaatgatcctttttctgatttatttgttctcttttcaaaacgactaatcattccataaaagtaaaaaatttgtaaggattaagtctagatttcaatagatgtatatataattaaaattgttaaaatccaaaccgaccatcgaacatggtataatttgttcaaaaatctaatgatagactcgaaagtttgtgttgtacatgacatatccacgtgggaaattttacaaagatgagactttacaaatcgaaaagacaagtgtacaagaatagtccatgtcagaaacaaaaaaaattgcaactttatttcacgttcacattttctgttttgcagttccaaaacacgcatataaatagcttcgtgttgcacaagtacgacatatgaaagttggcacacatggagaaacagagcatcagaaacacttgttcttcttctttaatgttatcctcaccatcttcttcttgggttcgtggtgcgtgtatcggcagaggttgtttcggtgcagttagtacggcgatcagcaaaaccaacggtgaagttttcgccgtgaaatccgtggatctcgccacgagtctccccactcaatcagagtctctcgagaacgaaatatctgtcttccgctcgtaaagcctcacccttacatcgtgaagtttctcggcgacggagtctcgaaagaaggaacgacgacgtttaggaatctctacttagagtatctcccaaacggtgacgtggctagtcacagagccggaggaaaaatcgaagacgagactctgctccagcgttacacggcgtgtcttgtctctgctctcggccacgtacactctcaaggcttcgttcactgcgacgtcaaggcgaggaacatcctcgttagccaaagctccatggtcaagttagccgattttgggtcggcgttcagaatccacacaccgagggcttttatcacgccacgtggaagtccgctttggatggctccggaggtggttagaagagagtaccaaggaccggagagtgacgtgtggtctttagggtgtaccnnnnnnnnnnnnnnnnnnnnaaaaccagcttgggaagatcacggtttcgactcgctgagtcggatcgggttctctaacgatttgccttttattccggtggggttatcggaactcgggagagatttcttagagaaatgcttgaaacgtgatcggagtcagcgttggagctgtgatcagctcttgcagcatccgtttctgtgtcaagatcatcatgactcgttcttcactgagtcgtctccgcgttgtgttcttgactgggtcaactcggagtttgacgaagaagaagagagcgacgaatggagaccagaatccatggtttcggcgatggcaaggataagta

SEQ ID NO: 17557 - DNA, 997 bp, Arabidopsis thaliana landsberg
aggagtcggtccaatcgggttattaccttcatgaatccccgggatattattctccgcttgatacttggtaatagccgcaggaccattacgatcaaacctaaccttatctttccaccactcccttaaattatcagaagcaccagtcacaggcttcccattctccggaataatcccataaacaaagccttgagctttacaaacttccatcatcttcaacatatacttcaagatcccatcttgagctctagacattttcttcctcctagcttgctcttgagactgcctctgtttagcagcatcaacaccttctttacccttatcctgctccttgagacgtttaagccgcattttgtctctccacatcctcctctccaattcatcaacatcaatctcatcatcagtatagtcatcttcaacaatggaatcaggctcagcttgtggaacaggacagaaatcaacttcaccaagtgatccagaaaaaaaaaaatccatgtttccacacattcccatctcattaaacatcattgtaacctgtaacaaatcaaatacacaaacaaaactaatcagtacaattatatttcttctgaatcaaacaacttactaaaaaaaatcatcaaaccctaaattataaaagaggggcttttcgaattcaatcagagttttaagtaatacacacataatcagatcgtattttaatcactcctcaactagataatcaatcggataataaaaattatcatcagattccatttccaaaaaaagcatgagatcttcaacataggaaccaaatatagaaagtgatcatatatgaataagaaagagcaaacattttcaaatagatcaacgatttataagcaataaacaaaaattcagccaaaaaaaaaactaaaagtagcataaactcatgaaattagatcgtgtagacactagtaaactaaagtaaaaccatcgatctagtaaaaccctatgaataaacctatcatcatcttcagtatcg

SEQ ID NO: 17558 - DNA, 677 bp, Arabidopsis thaliana landsberg
tctgatctcgattgcgttcttcgtgctgtttgtcgggctcggggtggatttcggaattcagtacagcgtccgctaccgggcggatcgttacgatatgcccgatctgcaggaagcgctggaggcggcggcaggtcaggtggcagtgccgctgacgctcgccgccgtggcaacggccgcgggattcctgtcgttcctgccgacgcactacaaaggtgtgtccgaactcggcaagatcgccggcgccggaatgctgatcgcgttcttcatggcgatcacggtgctgcccgcgctgctgaagctgctcaacccgccgggtgaaaaggagccggtcggctatgccttcctcgcgccggtcgataaattccttgaagaccatcgcatcggcatcgtcgcgaccacgctcggtctggcgacgctcggcctgccgctgctgtacttcctgcacttcgatttcaacccgatgaatctgcgtagcccgaaggtggaatcgatcgcgacctatctcgatctgcgccgtgatcccaacaccgcgaccaacgccgtcgatgtgctggcgccgtctctggcggcggcgaaggaggccgaacagcggttggcgaaactgccggaagtgtcgcgcaccacgacgctggaaagcttcgtgccagacgatcagcatgccaagctcggcctgattc

SEQ ID NO: 17559 - DNA, 1832 bp, Arabidopsis thaliana landsberg
ttttcatcatcctatgctaatgccggtcgtctgtttctcgcaatattggtccgccttaagcctctctcgaaccggtgagatataagtagcggctctagcgtctacgcagtcgtccactccgtttattcctctgccgatcagcttctctgccatcattttctgcttcttttccatatccttaccctcaggagccgaggctgccagtcactaattatagacatgtatatatgaaagatagatagctataattagctaaagtagatttaaaagaaaggttaattacgtacatggttgaaggaggaagctaactttaggagggagaggcgtagtggcagttacgtagttgttgaaatcaggttgacgagcgtaggaagtcgtagtggaagaagtgtaatgaacattattataaaggtcttgggaaggagttggagatttcacagctttgcaaaagggcattagcttagctatcatgaaccctcttgatctccttctgttcatctccatgatattacaactctttttttctttcccgatcgagatctacctgtagctggtgtttcatgcattcaaacatagtgtgttgttgcgtagatatatatgggagggtttcgttatgttgtgacgaatacatgcagggagatagagaggtatcaaagacgcgtggtccttcgtcttgcaataatatcactcagaagcataacatgttgatgacgagatctcaactttcaggctcaaacagccacgacgacacatctcattttacaatttaaaatatatgctatatgtgtaattatacagtacagggttcaatccttacgcattatatttacgctccttaattatctatcttccgcggtagacagatgatacggacgatttatgagaaatctctcggagaaaatttataagatatatcttgtagttcaattaatagatatattattctctaagttctatatgaaataatggatggcgcaaagccgcaaactctacaatttctcattgcaaaacatattttcccaattgctatataaaaaaagaacataacatttttccattcaatgggttcggaaaaaagtgaaagtgttgagattaaggaaccgttattttatccgtgtttaataaattttgtgtaactaactttttcgtataacttttgaaaagaatcaaaaaaatgtggataagtttcgatttatgtaagaatgtgaattaatttattcgtgagagattaatataaagaaattcacaagcgaataacattatcttcgtgcggtattgtggcggcggtaaattaaaacgcaacaatttgagtttgataattattacgaaagacttaattagctaaatctgtaaaataacattatcttcgtgccgatgtcatcaaaacactctagaatagaaaaggaagaaagcatatcttttgagaagattctgactgttatgtgatctatatatattctgttgcatatttgcttttgtgttaaatggtccaatggtataatccaataatatcaccatattccggatgacatggtccttggttctttttgtaaaaatttgggcttgttgggctgacttgacattatgaaaaacacgagagcccaggctaatgggcctaacaaagaaagcgtcctccgttctaaagcgaaacgtgaagcatattcgcaattggatccaagaagaaacctcaaagttagctttcgtactctttctcatcttcatctccacaatatccttagcttgtcactagttttggaataatcggtaggtttgggatacataacattgtttttgtagatgatagactcatcattgcttctttatgtttggta

SEQ ID NO: 17560 - DNA, 1444 bp, Arabidopsis thaliana landsberg
ggggttggcttatataagaattaggtctttctgctctcatggtgatgatatgttttctgtaatctaaaatctaatgttaagttttggttgttttcttcaatctcttaactttttattttttcctcttgttgatgctaaccaaatgaatgaaaccatgatccctctgttacaggctttttgtattgccctaatgtgtgaaatcaaactaattcagtatagaccccaattttatcctcatttgcccgcctctgctgtttttctcattagaaaaagctgagatgtatattatgactccagagaatgcttcaatacaagaccaacaactacttgacagacattgagggatcaaactcaaactaaaacagtcctaacgctttctgcgtttattcagatcaattatcttgacaagccactccggtttgtatgaagcaataacttgtgctattgccaatccaagcaataatccagatccataccctattgccactgctctcccgttcaacacttcttcttcttcttcttcttcttcttcttctttgtcttcttgcttttggtgatacatcggaggtgcaccagtgccgaagcaactttccttgagaggaagaccacaaagccctgcattcccttcgaaggaagatttagattgcccagtaatctgtgttccttgtggtatttcacccgtgagttggttgtgagacacgttgatgtacgccaaaaacgaaatgctccctagtccattaggaatagtccccgagagttggtttcttgacatgtctagtgactcgagattctcaagattggccatagacaggggaatatggcctgtgaaggcgttgtttgatatattgactgcaatcagtgccttcaagagaccaatagattcaggaatctgtccttcgagtctatttccagaaaaatcaatggcggcgtaggaagtgagggccttagcttgctccatgtgtagacctttgtattgcaaatctaaagcatctgtataaccatagccgccttcgtcgaacagcttctcctcgtataccatatataaacccccatcttgattcatcgtgcgtgatgatgctttccagttcacaaagtagtttggtggcaagcttcctgtaaacttattgtcagatatttcaaatatccgcagctctggaaacccgagaggaccttgatgcggaggagatataggaccataaaatctgtttgagcgaagagtaaggacttgcaaattcggtaaagctttgagccagaacggaaacgtatcttcaattctgttgtttataacgcttagaaactttagcgatgagcagtttacaaaagaccttggaagcttccctgttaatcggttatggctaacatcgagtgtccgtaaagaggcaccatcacagagcgcgtcagggatacttccttccaggttgttgttacggagatacgcaagttt

SEQ ID NO: 17561 - DNA, 825 bp, Arabidopsis thaliana landsberg
gttaagaggaagagttcatcacgatctagttatggttcaggaaccgttgctaagcctacttaccaaagagaagagagaaccagcagctataagccgattctcagttcaagggctgaaagtaaaccatatgctgcagttcaagatcacaaaggaaagactgaaatttctacatctagagtttgtgatgttaggtgttacaaatgtcaaaggaaaggactgataataggtttttaatcaattaaacctaaagcactatcttgtcgttgtaatactgaaggttgtcaattcaaatgggtgtgatgctaacaatcaagatgtgatcagaagtcactaagtcaagccaagcaataacaggttttggtgtgttctaacagtgaacatgcagaaaacagaaaatcaagcagaaacaataaaacactcgaccaacacagctctttgcagagcactaggtgaggtcgagtaacagacagaaaataaaacacagatactcgactgcatagtctgttgccagacaactgggtggtcgaatatgaggtcgagtaacaagaaagaactgcataaattaagcgatacataacaagatgcagtaaacaacagtagagtaaacaaagaattcaatcagataaagaattcccgaggatggggtaattgagtagtttcgttttctcagtttacaggtgattgacatgctcaataaattaaccctagacaacaagttcattaaccaaatctaagtgccaccgccccagagaccctcaagttaacctagtcccagactcaatcaccattgacgagagcctaacctaacaggcattacgaatcaac

SEQ ID NO: 17562 - DNA, 847 bp, Arabidopsis thaliana landsberg
  unsure (1)..(847): unsure at all n locations
ttagtatacatattaccaaaaatattatgttaacattcaatgttaattttgatcactcatctaagccatttagaattgctcataagaacaacacaagattctttaaaacaaattttcagttataacattctcttcttgacgtgaacgtctttaaatacaaaacagaagcaaacttgatcctagaaacaaggaagttagaaagtggtaagtggaaagtagaaagtggagacactacttctcctattaataaacagataattaaaagacactactgtacttatatattaggatagtgaccacaagctagtttcgaacgcaagcttgcatgactttgaagctctgaccacactttccaattcctccaccatttcaagattctcaaacatgtcttgaggattgttctcttcatagatttctctggtgaaagtcgccctcttcaaacgatttgtgttccttaggatgtatttcgccacctctttttcatcttctcctagctttttgcagcctttccacatgaatgtctcgagattaaacaacaaacatccaggaacattctttgggttgatcccaattcatactggctaaatgattgttttcaccagacaatttctaagaccaacgaaggggaaacacactcaatgctattattaaatccatcacaaaatttcaaaccaacttggaaaaatcggtgaaagatgaacattgcttacaccgttgagcttgaggacttgcaatttaggagaactatcgagcatcaacacaagcagattccaccactctgctntatttgtatatagctccaaagataccaactgatagaagatgctaccagttggaaacttaatct

SEQ ID NO: 17563 - DNA, 1463 bp, Arabidopsis thaliana landsberg
ttcttataaattagggtttccatgaggacgctgtagtcatttggcacttttttaatacaaaagaattctttaaaatagtaaaataattgacagctgtgggatttgaacccacgccctttcggaccagagcctaaatctggcgccttagaccactcggccaaactgtcttgttgtatttacacatcgatttgtaatgaattaacctacattatccggttggcaagaaagtttgtgaattaataatcgaagtgtaaatacaacaagacagcttatgatgacggagttgatggctactatatatcctattatcttcaccggagatcatctggtgaatttttttagtttgtgaagaagtactttacataaccgatactttcccatgtttactatagacaaaagttaaaaattctaatgttacttttattatgtaattacttttattatgtaaaacatttatatgacgaggtttggctctcctcagttctcataggcttggcttagcttttgcaaggaccaatttcaaaggaggccattgttttctaatcgaaagggtcaaagcgggggtcatgctcgctagctgttaccatcccggtgcaaagacatgtcggacacatcacctgattcatatacaaatacacatttcaacattacaaggacaacaatgaattatataatactcagatcagattgcatgaaatagagagaatcttacctttcctgcgccggaacaatttagacatctttttgtggtcgcgacctgcataagctggtttgtagctctaggtcttgtgatgggatcaatgctcaaacacacaccactagctgagcatcgagcgcatggcaagtatcctattatcatgtgaacacagaccagtgagcatttctccaactcattttgagaagtaattcgaagaaaaaatcaagaattttcatgatatatacaataaaattaccagtcccaaggcagtatttgcacctcttcttctcttgttgtttaacattgttaacttcgattagcatcaaggttgaaatgactcccacggccccgccagaaaaagatgccacaattggatctacctggctacattacagaacaaaaaacaaaaaaaaatcaatgtcgctgtttcagattcaggacaagtaaagttgactagtttgactatgttttcaatcatattggtcttcaagctactgaactagtagtagtaccttaattgcaagggtagatgtaagctccttataaaatcttcataagaggttcctccaagtcctaccttcagttccagctgccatgtaaaatcatcaatttatcattcaaggattagaaaaaacaagaatagctattgttcttctggtaaagttacagtaactcaataaaaaaccaaaaaactgtatacatcacaaagaaggaaaaatagtaatctccacaatctgttgctatcaacaaaaagcaagtatattta

SEQ ID NO: 17564 - DNA, 2117 bp, Arabidopsis thaliana landsberg
gagattctttattaagacagattaactaacacaccaaacccttcttgttccactttctattcatacttaatctcattctcctctcttccccttcatacttaaatcttatcattcatccatcttttaatcattactcgagattctgtttccatggccatatcctcaaatcttctcctttgtctctctcttttcattttcatcatcaccaaatccgccttggctcagaaatgttccaactacaaattctccaccaaccgtctctttgagtcttgcaacgacctacctgttcttgattccttcctccactacacttacgattcttcttcaggcaatctccaaatcgcgtatcgccacacaaagctcacccccgggaaatgggtggcatgggccgtgaatcccacatctactggcatggtcggagctcaagccattgtggcttatccacaatcagacggcaccgttagggcttacacgtcacccatcagtagctaccaaacgagtctcctagaagctgagctgagtttcaacgtctctcagttgtctgccacttaccaaaacaacgagatggtcatctacgcaattctgaatcttccacttgcgaatggtggaatcattaacactgtgtggcaagatgggtcactgtcagggaacaatcctctgcctcatccaacttctggcaacaatgttcgttctgtttctactcttaaccttgtctctggtgcatctggatccacctctaccggagcaggaggagcttccaagctacgcaaacgcaacgtgagtccatggttttatcaatttcttcatttcatgttttttaggaatctcacatatgaaatgagatttatcaatcccatcattgttagttggttttatgaaacttatcactcctaatcattattgcagatacatggaatattgaacggtgtgagctggggtataatgatgccaataggagcaatcattgctcgctacttgaaagtctcaaaatcagcagatcctgcttggttctaccttcatgttttctgccagtcttctgcttacatcattggtgttgccggttgggcgaccggtctcaaactgggcaacgaatcagccgggattcagtttacctttcaccgtgctgttgggatcgctctcttctgcctcgcaacaattcaggtaggttttagttaacagtacagagagtattacacttgtcatgaatatgttgcaattactaagttgcttgtttcacacgttaggtgtttgcaatgtttttgagacccaaaccagagcacaagtacagagtctactggaacatttatcaccacactgtaggctattcagtgatcattcttgcggtggtaaacgtttttaaaggactagacatcttgagccctgagaagcagtggagaaacgcttacaccgccataatcgtagtactaggtatagtcgcggttgtgctcgaagggtttacttggtatgtagtcataaagagagggaaagcagaggcatctgcgaaaacaagtcaacgagtaggcaacgatggtcggtctctatacgtgtagactctgtaaagattagagtaaaatgttctggtttatttggtcattatgggcctgtggttgttaatttttgtttgttttcgagattaagttaatacatttgatgtttaatagttgttgaagttgaaagactcttgtgctcttttacaacattcatgatgtgagcttttgacaaaccattttatttcatcgacagtgaagtagtgtacatatgaatacatatatcgaatagatatctcgtatgtgtatgtgtgtgtgtgtgtgtgtgtgtgtgtggtgacaaagtcagagcaagattggttacctaatgtaaaaaaacaacaagatgcttcaaaaatgtcttttcgagtgttttaaaagggaagcaaggatgaattgcattagttggttcaagcaagatctcgaggttcaagggctgcgatttctctcaaaacctgacttttgtatgcttcaaacctctcatcctctgtcaaccaaatgaaccaaacaatgctttaataaggttaaggagcagaaggatcggatacaagcgtgtcacttaacaagattagtttcatacctttgtctggt

SEQ ID NO: 17565 - DNA, 1271 bp, Arabidopsis thaliana landsberg
ccgtttaacctatcgatccacgacaaactaggaatgtattctccaacaggaaattcacccaagagtgcggcaaatgtccttactatgttctccacatcaatgtcatctttcttgccgctatattttcttcctaaggcaactctacatattatatcgtttgtcaaagtcattaggagttggcttagatttaccggtgagggtgaagatgaacaactcgctttttccagcttttcaatcattagtttgatctcttcttctcttatcttctcatacgacctgaccattttattgttgagtagattctggatgcatatactctgcatccaacgtagattcaaaatgttttgttacaaaaaacattttgtggtgacaaaactaccaacacatagttatgaataaaatgttcttctaggaaaaaattacgcaacaaagaaaaaagcgaaaaaaaaaactagttgttctttcaactaccttcatttgtctccaatattcaccataaggggcaaaagccacatctctcccaccactcagaattttatcgaccacttttgtttttgggcggttggcacaaacaagatcgtgagtcttcatgacgtcatgagcaacatcggcggaggagactataaggactggtgtacggccaaaatgaaggagcatgagtggtccatatcggagactgagggaacgaagagatcggtgagtatggaggctgagctggtggaggtttccgatcaccggaagtcgccaaggggacggtggtagattaaagttttttgtggcggttcttttgagtctggattttagcagaagtgcaaggagggtagttaagcacaacgtgattaatatcatttccatttcttattcaatctctcatgtaagtatttagtgaatatatgttattctgaaatttgtgcatttcttcttcctctctactttgtaatttatagggttttggatacatttgttttttccttggccttttttttttcagacagaaaaaaaccatgtagccaggcaaagtcaacaattcacatcactatggatcctcatgttgtggttcttatgatatgacaccctgactacaaccatttgtggtaaacgcatgttctcggaccgtaaatttcactttcgtctggtggctaatttgataagactttttttctatatctttttttgaccaacaatcacaacactaaacaatcaagccaacgtcctacgagccctccacatactgctcgatgaacaaaatttaaaaccaagttatgatattt

SEQ ID NO: 17566 - DNA, 1144 bp, Arabidopsis thaliana landsberg
  unsure (1)..(1144): unsure at all n locations
tttaagtaggaggccctctttttttagaggctttcttagtaaaagcatacgtgagggggcagtttttggtttgtttggagtctaaaaccctcatcatcttcgtcgacagacacatcgtcgctatccaacagacaaatcgtgaatttagaatttctggaaaaccctctacatctgctcgttgtttccgtcagtcggaagctgcgcaaggattctgttcaccacgagttgtttnnnnnnnnnnnnnnnnnnnacgcgacggcagatttctttaggaactttgtagatcgcgagtacgaggaggttaacgagtccgcgacgacaacaacaccatacggcggcgcaactcgccgtagtgccaccgcaaaactcggcgggattcaagatgaaataaacagaagctcgaaggtttttcttagttgaaatacatgtacatatatgaattgatcaatgacgatgtctacgctatggtatgatacgaatctttacaataaggaaataataagtgcatcgctgattttgtggctgactttgtggaccattccttactcaacgccactctgttttgaccactctgtttcacctccaaactaacttaaaccaattgttaattttagcaaaccagaataataccaaatcgtcttcatctccaacacaagaagcttgtggtaaaggagaagagagacttctctgaagtaaaggctgtctccggtgactataagacggagaagacgatggtgtcaatacaccaaacaccaccaattacaccaattaattcgtcacatatctctttttcctccataaaaccaaaatcatattttcattttctctataaaaccaaacataaaccaaaatcatattttcatttttctctacaaaaccatacataaaccaaaatcatatctttcttttttttaagaaccctaacttaatatactacctttgatgttgctcaaaaattaaaaccttaatcaaactcttaactacaaaaattttaaaatctattcataaaatagagctaagaaccattgttaataacctcccattgaggatggtcttaaagaaatctttacaaattcgggtttaagatatagaaaccggaatatttaaacacaatgattatagagaaactttggttaagttttgt

SEQ ID NO: 17567 - DNA, 1486 bp, Arabidopsis thaliana landsberg
  unsure (1)..(1486): unsure at all n locations
tttgaagtctaataatcctttttttcgaatttggtttttaattatgacaatgtctcaaacagatggagtggagtgtgcttctaggaacactaatgaaaatgnnnnnnnnnnnnnnnnnnagcttcggtctcaatgggttgctattgagagatcaccaacatttgaaagaatcactactgctttgttctgcaaaagagatgaaaaagggaagaaaagccagaggcgagtcatggatgtttctaaacttgatgatcttgatagacgcctgtttattgatgatctcatcagacatgttgagaatgataatcatgtcttattgcaaaagattaggaaaagaattgacgagtaagtgtacgccttttggccgttgacctttgtatttatatgttgttcctattacattagaaatgttaattccatgtattttgtagggttgggattgatttaccaaagattgaagcgaggttcagtgatcttttcgtcgaagcagagtgtgaggttgtttacggaaagcctatcccaactctttggaatgctatttcaagcaaactatctgtaagtgtcattcaattgctttgacttgtctttctattctcaattccttctgagattagaaaataatggttgattttgacagagattcatgtgttcaaatcaagcaaagaagatcagcatcttgaaaggtgtcagtggcatcataaggcctaaaaggtagattcttgtagcagaaatttcctaatcattatccaaagaatgattggtttaattccagaagagttagtggttttcttgtagaatgactttgttgcttggtcctcctggctgtggtaaaaccactctactactcgcattatctggaagactcgacccttctttaaaggtttggcttctttttttttctctccttcaaaacgtctctattttttttcagaaatcatattggttgcttccattttacagactagaggagacattagttacaacggtcacttattttcggagtttgttcctgagaaaacatcgagttacgtaagtcagaacgatctgcatattccagagcttagtgtaagagagacactcgatttttcgggatgttttcaaggcacgggaagccgtttaggtatgcgtaatactaaattcttatgcattgaactttattgacactaaaaaccactgtcttttgttcatcagaaatgacgaaagagattagtagaagggagaaactgaaagggattgtaccagatcctgatatagatgcatacatgaaggtaaaataactatggatatttcatatgacaagtatacataacttggaacttgttttgatgaataagaaaacatctttggaattcaactttttatcatgacaggcagcttctattgagggttcaaaaacaaatctgcaaaccgactatatcttaaaagtaagatacattcagagtctgttcttttttttttaatcttttttatttcatctttagcttct

SEQ ID NO: 17568 - DNA, 1013 bp, Arabidopsis thaliana landsberg
  unsure (1)..(1013): unsure at all n locations
tcatttcccgtctcacatcacgcaccaaaacaccttcttttatctcatgcattgttaactaaaggactatcaaactcatgcttcttctcctcagcacaatcacataccaatacacgctcaatatgtctaccaatttcttcaaccgcctcttccactgcacctagaaaactccgcgaattactcactttcgaacactctttgaaactctctgcaaacggtttcaactgcgacgcaccgcaccaagcaaatgtcccgtctccgaaacacgccacaagcaatttccctttttgctttatcttcaaagccaaatctgaagcatctgatggatcataaatctgacctggccaccatggatgattcttaatttttccccacacaaaatctcctacacagtatccatgctcttcttcttcttcttcttcttcatcttcgccatcttcttcttcctcttcttcttcttcttcttcttcttccacatcttccttcaatttgagcaaggaagaaactccattcataacacaatcttcaataactccagattcgttcaaattcttctcatttttctcgtcaacatcaacaacaacatcagactttttctcaccgttgtcggaaaccctaacaccgttctcttgaacaacaccatcatcttttagggttttctcagctnnnnnnnnnnnnnnnnnnnnnggcttaggtcccgcatcttctccgattcccaaaacaacttcaatttccatttttcttcccgactgtagaaaaaaaaaatcacaaaacgacaaacaaatcagaaaaaaaaatcaacctaactatttacacacaaacccaacaatatctcccaaaaaaccaaattttgaaattaggttaactcttacgaaaaacctagaaaaacgaaaatataaagtaacaaattttttacctaaatttgagctccgagagaaacgaaacaacaacttttgagcagcgaccgaaaaaacttcaagaaaaaacaattattgtaacaaggcgatagacac

SEQ ID NO: 17569 - DNA, 1498 bp, Arabidopsis thaliana landsberg
tcagcttactcgaactcctccctatgcggtaggaactacatgtggtaacgtctcgagagagtttatgattctgagtactgtgatattcttcgtgtgcccttcagaacagagaagggtattgttcgcaaatggatctcaaggttcgaagtctggccatatctagagacttacaccgaggtaaagtacactcatcctcttcctctaaaaccttgttctgttctccattttagactaaaactgaacctttcttgttgtttcaggatgctgccgttgagctatcgaaagaattggatggcaagcctgaccttatcattggtaactacagtgatggaaaccttgttgcttctttattggctcacaaacttggtgtcactcaggtttaccttcttgaatttaatctttagcatctatccaatgagatatgtcaaatgtcaagctaatgcattgtgaattatctcttacagtgtaccattgctcatgctctggagaagacaaagtacccggattctgatatctactggaagaagcttgacgacaagtaccatttctcatgccagttcactgcggatattttcgcaatgaaccacactgatttcatcatcaccagtactttccaagaaattgctggaaggtaaatagattgtatatgaagtaaacataagtagtttctttgaagttgtgtcagtataataatggtctgctttactcattttgcagcaaagaaactgttgggcagtatgaaagccacacggcctttactcttcccggattgtatcgagttgttcacgggattgatgtgtttgatcccaagttcaacattgtctctcctggtgctgatatgagtatctacttcccttacacagaggagaagcgtagattgactaagttccactctgagatcgaggagctcctctacagcgatgttgagaacaaagagcacttgtaagcttttgttcactcttcatgttcatctttaacattttgagtgtagttctaatgtatctgatgttttgaaacagatgtgtgctcaaggacaagaagaagccgattctcttcacaatggctaggcttgatcgtgtcaagaacttgtcaggtcttgttgagtggtacgggaagaacacccgcttgcgtgagctagctaacttggtggttgttggaggagacaggaggaaagagtcaaaggacaatgaagagaaagcagagatgaaaaaaatgtatgatctcattgaagaatacaagctaaacggtcagttcaggtggatctcctctcagatggaccgggtaaggaacggtgagctgtaccggtatatctgtgacaccaaaggtgcttttgtgcaacctgcattgtatgaagcctttgggttgactgttgtggaggctatgacctgtggtttaccgacttttgccacttgcaaaggtggtccagctgagatcattgtgcacggtaaatcaggtttccacattgacccttaccatggtgatcaagctgctgatactc

SEQ ID NO: 17570 - DNA, 867 bp, Arabidopsis thaliana landsberg
  unsure (1)..(867): unsure at all n locations
agattcagctccatgaaacccacaaaggcaaatataaaagctatatctttgaatactcaaacacataaatctgaagctcatttcgtgctattaattgtcaaagttgaaaaattgttcaatgattctcgcaaatccctaagacgaaacaacgacaacgacaacaaaatcaaattcctcacataatcagaagaaagatacaaaattgcagccaaaaactatcatgaatcctatgaaaaagaccattccaattcttagaaacgaagattaccaaacgagaaacaaagattgagcaaagttcttttttcgattctcgatactcaacagagaaactcgaaagaaatggtaaagtcaagcttcgtgtgactaatcgatgagccgggtcgggtaaggcctaggagtgacttaatcgggtcggattagtttttgttaaccggaaactaacctaaccgaaatcgcttagccaactgattcgttgacattgtgattattccatgtctaatgagaaaactaaaggccagattacaaagttttcaacacaacgaaactgattcaaacaaacacacagaatttcataaaacaaaaatagatcgggcttttttctttaaatcacaaacacacacaaacacaaacaacaatttcaagtttttttcaaaattgctttgcctccatgagtcaaaccaaaacatttaaactttgctcctaaaggaccttaagaactttatctacccagtaaaattgtagtatgagttgaattatttcagaattagcagatccaatctgataatttcataaacagatccaagctaacaatttcacaaagtaaaggaatcaaaagctanaaacattttataacaatcgaggtgaaag

SEQ ID NO: 17571 - DNA, 1379 bp, Arabidopsis thaliana landsberg
aaattgtcttttttagctgtatattttggtaagcaagcattactcaattttgtttttgcctttctcttaattaaaacaaataagataatcagtctctgtgagatttttaattgctaacttgtttgaggttttaaatagtaccatgctttgataattatcagtaaaatataatgtggattaataaatcttagtgatttgtaataataatgtggtattttttttctatttatgctaactaataaaataactagaattgattaggggatttattgaaattaataggcatgtagatttttagaaccagattaattttttggcagtaaataacaagaaatcacaagccaatcttattggaattattagcacacagtaagttacttgaacttacaaccacgtattaaaagtaacatagtaaagagaacacacacacacacacactccaatcttattggaagtttcatgtagtatatatgactaactggttttcactcggtggtggtgatgggcactatagtgactccgatgctgtgaacaacatcactagcttgtccatggaatccaacgatcttgtggccttcctctccaagcgagaacttcttaccagaatccattccaaacggcattgactcccttttgttggtcttaaactgaagacatacaattattggttcctcaactccgaagatcttatcgtagtagccatctatgttcatgagatattcaccatcttcaagcacaaactgcaaagattcaaaaccaacaaaggataagtgtaaataatctagaatgaattggaaaaaaaaaaaaaattgttgtttttaaatgacctcttcagctccgagtaatgtcttcttcccatggtcatctccgggtacaaggtctttgcccttactgtactcaaatttgacaaaggatacaccatcgttaccttgtcctacaagtatcttccttacaccgtcgtagacaccatcatcccatgtaactccttcgttgccgcctatcgctggtagtttcttagatggaatcaagggagtaggagtaggaacaggtccaaaatatgctccaagagcatcaatagctgcatcttcctttccatggaacccgacaagcctatgacccttttgctccaacacaaacttcttacccacattatacccaaagaatgatgttctcccctttgatgttaagaacttaagtgacgtaattgccgtattgctaaaaatgtttggcttctgataggttgcttccaccgatttgatgtattcatctgggtaaccaagcacaaactgcaccaagaagcaacaaaataagaagactttttgacttaagagatctaaatacatgtgtcaattatatctacaaaaatttgagccggagtg

SEQ ID NO: 17572 - DNA, 1764 bp, Arabidopsis thaliana landsberg
  unsure (1)..(1764): unsure at all n locations
tgacctctcacagtgcttcctctttaattattttttcatgttaacattatcaccaaacgcaaacgcaggcacgactttatccgatctcaaacatcttgttgatggagatcaaatataatttctgcttgatgaaatttctttcaggttattgcaggtgttagtagctacatttgaatctttgtaacaaagccaaatacctaaaaacaataaagaaggtgatcgttcatatcacttgcagatgcgtgactctatagcaagacatgcaagagtattcacattacacatttcactcttttcaagatattttgaaattccttcaaaaaagaaccaactgtgcattggcattaacacacattacaaactaaataaagccgaataccgtttaaaaacataaaaaaggaaaatgaaacacacttaaaaagagtttaaacaaccttctttaaaaaaaaaacctactaaaccggaccaaagcacaaaccgtactaagagggattaaagtaaattaacaaccaaatctcatcgctaataacatttatgaaaagacaaatttaccccttataccggtaccctaaattaaccgccgtgaatcagaaaactctcatagattgagtagatccggcggactttgaacaccagacttcggcgaaagctcactctccggcgctgattccgtcatcggctgatccttcgacggtggcaacttcgggatctcagtgagaatctgaacaacttctctcatagtcggcctctcaacagcttgttcttctacacagagcatcgctacatagaagacgtgcgtcacttcatgaatcggaatcgaagaaagtctcggatccaatactttcagaaccgaatccttgttcgaatcagtcattttacgaacccattgcactatatcgacaccgtctccaaattctccgacaggttttcttccggtgacgagttccaaaagaaccacaccgaaactatacacatcgctcttctcatctaccttcaacgtatacgcatactctacacaaacaccaaaacagagcaaaagatagtaaagttagaaactttaaagagaaaaacagagcaagagattgtaaagttagaaacttttttttgaagattttagtacctggagctatgtagccgtaagagccagcgattgcagacatacattcagaagtaccggaatcttgaaggaatttagcgagaccaaagtcagcaacatgagcttcaaagtttgaatcaaggaggatgttgtttgatttgacatctctgtgaacgatcaatggagaacaatcgtgatgaaggtaacagagtcctttagcagcttcaagagcaatcttgtaacgtgtgtcccaatgcaagtgtcctcctttcttaccgtgaagcacctcaccgagactaccattaggcatgtactcatagacaagtagattcgtctcgtggtttgagcaaaatccgagaagcctcactatgtgtctgtgtcttatccttcctaaggtttgaatctctgcgttgaagccgtgatcatgggaagatccacgagacattgcagcgagtcttttaaccgcgactagatcaccattaggcattacgcctttatagacaataccagctcctcctttgcctataatgctgtcttctttgagagaatccaagacatcgtcacacgtgaagtctagtctctggaaagctgttaacctccaagcccgtgactcactcgcctttntcaatgatctagctttgattnatgctactaccgcgaacgcaatc

SEQ ID NO: 17573 - DNA, 1658 bp, Arabidopsis thaliana landsberg
caagaaaatggagagaccatgagttagagcttgtagaaaacgtggcggatcaggtccatctctttacttgtatatgtttggttgtgtgtcaagttgctttaccagcttttagtgttttgttttgtcccctgactctcacttcattcaggtggctgtggctctctcacatgctgcaattttggaagaatccatgcacgctcgtgaccagcttatggagcagaattttgctttagacaaggctcgtcaagaggctgagatggcagtacatgctcgaaatgatttcctagctgttatgaaccacgagatgaggacaccgatgcatgccatcatctctctttcttctcttctccttgagactgagctgtctccagagcaaagagttatgatcgagacaatactgaaaagcagcaatcttgtggctacactaatcagcgacgttctggatctttcgagattggaagatgggagcttactcttggaaaatgaaccattcagtctacaagcgatctttgaagaggtaactaaatccccctgattaaccagtgaagtccattatatatgtcttacatgaataacatgggcgctttgaatctgcaggtcatctctttgataaagccaatcgcatcagtgaagaaactatcaacgaatctgattctgtctgcagacttaccaacttatgctattggtgatgagaaacgtctgatgcaaacaattcttaacatcatgggcaacgctgtgaaatttactaaggaaggctacatctccataatagcctctatcatgaaacccgagtccttacaagaattaccatctccagaattttttccagttctcagtgacagtcacttctacctatgtgtgcaggttagacccaatctacaaattactaaactacaaagttaagcttcttactgtgttcttactgttataatcatggtgcaggtgaaggacacagggtgtggaattcacacacaagacattcctttgctctttaccaaatttgtacagcctcggaccggaactcagaggaaccattccggtggaggactcgggctagctctctgtaaacggtaacaacccaaaagtatatataagttataagcagatggtgttacaaatagctaaaaggtaagtttctgttgatggatgtctctggttaggtttgtcgggctaatgggaggatacatgtggatagaaagtgaaggcctagagaaaggctgcacagcttcgttcatcatcaggcttggtatctgcaacggtccaagcagtagcagtggttcaatggcgctacatcttgcagctaaatcacaaaccagaccgtggaactggtgatacattacgttggaaagacttgtattgaggtgagactttttaactacacagcagcaagagaaagaagaaaatacatgaccggacggtgtgatctaacttattggattttgttggatgtaatatgtaaaataaaaatcctatatacggtgagaggtaccttatctggtctcactatatgttattgaacattactttagagaatatgttttggaattcactactaaataaacgatttaaatctttacgaatagagcaacattttgtggttggggagattcacaaattctttttatatatgataaattaccctaaaaggttacttactc

SEQ ID NO: 17574 - DNA, 866 bp, Arabidopsis thaliana landsberg
ctctactccgaacaaccgtgaattgtacctcatatgccatttaaccttatttgcatctaatccaagcttcgtcaatatcgtatcttctaacattgagagagttatcttcacccctaatctcttcatcatcacattatacatgcgaccttcaaatttaaaatatatgatcacgttctctttcattgtatcctgccaaaacaatacacatactcagtcaatattaccagtattaccgattctactacattttcagtaatactagtactaattccgaaatactacatgtctcattaatactattacatatatgaaatactacatgtctaagtaatactggtgctattaaaacataatatctacataaaaaccaattgtttcggtacaactgtaactagttcgaccagtattattttcgcgacaagaacaatgtttagattcgagtttaattcagtatgaatcagcatgcaaaatcaatttttgacccatttatagaccaaatcaaccctaaaactatacttaaacttctaatgtacgtaccaaaacacaataacccaaatctaattgaattgaatctcaaattcctcaaaatcctaatttaaagcttttgaagctctctccaactcgatgcacatacttggacttcgtagactgatgcagcttgtaggaggagaaaaacggcaacaaatgcggctcgctggagctcaccggaggaagaagcccgaagaagaagaagctcgagctcgagctcgtttttttttttccgtttttgtttgtgtttttttgtgttaaaacatttccccaatattcattcaaaagaaattagaaggagaaattttgtctatacgtgtcattgattcaaaagggat

SEQ ID NO: 17575 - DNA, 1235 bp, Arabidopsis thaliana landsberg
atcctcacttttcagactttgcttcttcgaagtctataagatactcttttcttggtgtcatgtgaaaggaatacccagtatccattatccactctccatggtttcctttgtgttctcctagattgacttctgaagctactaaaccgaccaaatcttgagcatcgtcttttaccagtaatgtttctcctgcaccacttcccttattcttctcaagccacttataacactgcctcttgaagtgtccctcctttccacatatccaacagactttcttaccttctgttgatttagattcattaccttcacctttaccagattggtaatttccacttcctctggcctgagttttacctcgaacgtatacaccttctcctacaggtcttgatcctcctgaaatatcccttagttctagttcatttgattttgcagcgcttataacatcatccaacttaatgccttctcttccatacttcggagtttcctttagcatatcataactatccagtaaagcacttagtatcaacattgcttaaacttcatcatgtacctgaatctgaagattactaagatctgaaatcatctttaggaattcatcaacattctcttcaagcgtctttgaatcttgcatcatgtagttatagactttaagttgcagataaacttgatttgaagagattttaccagatacaacctatcaagcgttgcccatgcttcagcagttaactttgagttttcaatatttctgagaaccttatctccaacgtttatgaagatcatatccattgctttttcatctcgatcgattcttgcttgttcatcttcgatccacttattcttctttgctggatctgactcttcttcatcagttagtggcgataactgatcttgttccaccagagcatcctttaaactatcactctcaatttgtttgtgtacaatgtacatctaatttttataaatacatggaaatagctcatgaatagacacaactcaaaagtgaatacaatagaaactctataaattaatactttataaaataataaacacgataaattaataaattttgtcggtctcaagtcggacctaggtaaaaattaacccaaatcgataagataataagatattatttttttgaaatatatatatatatggtcccaataatatcataatttaagaataaatcttaaacatacattctaagataatccagtataatataatctagtgtgttgttt

SEQ ID NO: 17576 - DNA, 1305 bp, Arabidopsis thaliana landsberg
tgtagtttagtatgcacatgttctgtatcagcctatcagggtattaaaaaggctaggaacgagccttattctattagttgatacaacttaagagagtgatatttctgaacatgttggatcctccagttttgtcttgtctgttttcatgttttttcaggagcatcaagtggtataggtgtagaagcagctcgtgttcttgccctgcgtggtgtgcatgtggttatgccggtaacaaacgctggcgccggtgctaaagttaaggaacatattgtcaagcaagtccctgtagctaaagttgatgtcatggagttagaactcagctcaatggaatctgtcagcaaatttgcatctgagtacaaatctgctggtcttccactcaacctcttgatgtaagctattgaaatatcgtggttcatctatagccgtttggatttattgacgtttatgtttggacttgtctcaattttgaaagcaacagatggcgggattatggcatgtccttttatgctctctaaagacaacatcgagctgcaattcgcaaccaaccatttaggtgagtatgataaccaaaccaacattatggctttgtcctacattttatataattagtttctaatcagtgcaacggtttttgtaatccaaatacatttcaggacattttctgcttaccaaacttctgttagatacaatgaagaacacatcacgtgaaagcaaaagagaaggaaggattgttaacgtatcatcagaagctcatcgttactcgtacccagaaggagtccgctttgataagatcaacgacgagtcaaggtactaatggtgaaccaaatagtataattctccgatcccatcttttcttctaaagccaacattcttccttgatttggtctccacatgcagttacagtagtatacgtgcttatggacaatctaaactctgcaatgtattgcacgccaacgagcttgcaaagcaactgaaggtaaactacactaaacaaagcaaagatatagcaaatcaagaatctatgtttccatggttatcttcaattctggtatatgattaaaaacaggaagatggagtcaatataacagcaaattcacttcatccaggagccattatgacaaatctatggggctacttcaactcctatttggctggtaacttcttttctcggattcaactctcatcactccatgtttcataaggttacactcaaagtaaacaaacgcatacatatattttgagtctcttctgatctaaatgtcccggcttaagcaggagctgttagtcagtggctagatatatctc

SEQ ID NO: 17577 - DNA, 1330 bp, Arabidopsis thaliana landsberg
tgttggttatatttgccaattccccatgaattttttgattattgtcattgttagtcttgggcattcgattaaataatcggtttcggaatatatttatttagttgtggtttttttcggttctaaagtttagtatccatttggttattttgaaagttcggctcggtttcggttcggttccgattcctttggttttaaaatttagtattcattcagttatttttctttaaatatttttggatattttcggatatttttgagtatttttactattttatatattttcaactaattttaattatttaatctagaaataactaatatttttgaaaatatatttatattttgaaaatttttggttacccaaaatattttggtatgtatctttttggtttcggttataaaatttagtatgcattcggttattttccaatttttagtttggttcgttttttttgcttcagtttcggttcgatacattcggttcagtttatttgtcatggcctaatcattgtttagtttcagttagactatataatttgtcttgggattcttagctttacagtatttggttaagcaagatcagttttatatttagactattatattgtcttggttcagtgtataaatatgaagcaagagtgacatgttgaatgaattattgcgtaatttgtttatacggaaatgacaaagctacaacaacatttacaactgtgaccaacaaatataaggaagatggtccaaatggacacaagcaaactttaaatgtccatctttcttggattagaagctaaagtcttcgatatcagtcaacccaagacctttcgaatagcagccaccagctcttctcttttcgacggctccacctgcatcacaaatatttacttaggcctttaaaaaccgagccatacagataagaatactagaggaccaaaacctctgtttttctggagggttttgttttataccttgtttagaagattagcaagtccttgtggcagagcttgcaaatctgaggaattcccaatctctgcaagttggttcagtagtttctgcgctctcaactcgctcagcttcaactcgtagttactaacattgtccttccatgtaaagaacacttggtcgtctgtccaagcttcttctttcccctttgcaatatcagagttgcagaaccaatcctgaatcagacgcattgaagatttatatgctaagttgtctccagatgcttctcttacgttttttacaagagagctctcagcgattctcctattgagctttttgtagaagaaggaccgcgagccgctccattccacaacacttttgatcactccct

SEQ ID NO: 17578 - DNA, 787 bp, Arabidopsis thaliana landsberg
gaagagtatcagaagattattacttctatactagataataatccgcgatatattgcgggttaaaatctttttatatagtataaagtttagatttgttgccatccgaagatctattttttgaatatcttgcatcaactagaagagtttctctcaatgctaaagtgcttcaagagattcgttggctcaatcttatgaggctatataatttatttcatttggttgcaaagaaggttaaaatgaaaaatacttgggttcaaatactacagagcattacaaatagttctacggcacaaggggaggaaactcatcgctcgcggagtgcatccaaacttggtttgcgacaaggcaatgctaaggatagatttaaactaaaagttacgaatttttttgcattaaacatgtgtaaacttttgttttttctttgaatataatttaacattagattcaaacaaaaaatagtttcctgcgacatgacattgttgtttgaagtcatgactatgatgttatcatttgtcaataaaagatgaagaacaagataagatttacagccacatgacacaacaataagtgaatagacaaaagcttcttaattgtttccaagaactactactcaagtttgtatgcatgaagaaaaaggcaaaactctggcggccaagggttactactcttggtcgaataatacctgctccctgtacttgtatcgctctcaccaccaccaccaccaccgtgaccacttccttccatgtcgctgtcttcggtggtccctggtttgaatatgaacaaacca

SEQ ID NO: 17579 - DNA, 861 bp, Arabidopsis thaliana landsberg
atactcaaagagcatgactttgtcaaagtcgtgaaagtaaaattgtcaggagcaaaacaagtctccttcctaagatctctgtaaagagcaaacaaatcaggatactgacgggtttcaagataggccttgatcatagagttactgaggaaactgtcgtctctctgaggcctttgatcgaacaacttacgtgcataaccaattccaacagccgaagcagaaataaccaagaatttggtgaagatctgaacgttcgtctcaatggcgtggcggagcatgaaagcgtgaatttgaagaagagagaatcttccgtttcggtgacattgttgaagaagattaaagcattttctctcagtcggattccataatcgttgagtctctcgctcgtataacatcatcatcatcatcttgtttgcaactataataattcatattttagttaaatatatagccttggttattgtagtcaaatcaaatccgaaccggaatcaatttcggtttggttttggttcaatgttcatgctaagaaaacagagcaaaacactatgttgcagcctgctggtgaattctgttataagtttataaccaacagaaggctaaagaatcattgaaagatccatgcaaacaaatctaaacacaaagtttgttattgcaatgtgtacgtctctcatggactgtaatgcgagtaaatgctcaaaattggagctcaatatcatgaagggatatacttacttcttcttgccttctttccttttagaccacaaaaacaattcatatttttcccaaagcaaaagaacagaggttacttttagaacatgttaaaacaaataaataatggagatgtaaattgttttcataatatcg

SEQ ID NO: 17580 - DNA, 1625 bp, Arabidopsis thaliana landsberg
ctctcagttatttcattgcggagaagattgaagtttaaactaaggtctagggttgtgcaagaaagaatactcaattgtgtacacgtttcgtgtgaggtaaaagatatcgtaaatcaattatttgcgacgttgattgcaaaatcgagaccaataaagagtatcccaaaaatgtttaccataccaaatcctatttctaaccattttagtgtaaatattttcgcatgaattcaacttgggatcagtaaatcttagtgtcgattggaatggataccactcatgtaagtttatcaaccttttgttccaatagattatgaattttttttgtgatgtttggatcacttatgtcatgacgtttgaattattaagtatccagaggacaattttgtttattaggattccacaacgaagaatgtattttttgtacttttacatttagggttatccaatttataacaatcgatcaaaactatctcattagattctattatagttcaaaatggtataactacattccatcaggatgaccaacagaccaccaaacttacaatcttatggcagttgtagtcaatttacttatgtcgagttataggcattgacggcgaattgttttgagaattttggagaaagttgaccaaaaaaatcacctttttgtggaagaagttatacagaaatgtaattcatggatcactaatttttttttttcagtttaatggtaaattttgatcaacggaatcgcaaccacactatttacgttcttttttaagaattattttctcgtaaagatggccaattaaagatcgatatgatgctatttttgcaagaaaagtttgtgtgttaatataattaaaaaattattgtgggctcctataaaggtaataactagtaaagttgtttgggaaagtcagctacaagaggatcattagtaactaacacagctttattggtaaattcttaatcggaaatcaaaacactcattctattacgaggaaaataacaaaagtacatcgaaaacaaaggttgaaccactttcaatagagcagttgtccatctttaacatatcaagactcacaaagtctttttttgattaaaaaacaagaacaaaaaaccaaaccccataaattctttagatccaacggtagaagttttttattagcatcttggaagatccaatggtggagcctgcaccgattgcaactgtccacgaccgttctctaccaagaaaaccatagccaaaccccatcccaaatgtgaatcaatgtgacaatgcataaaccatgctcctgcattacaccacaagtatatcaaaatatgtttttcatttttgagtcaataagatcatttaacctatggttacaaagtatcaaatgctttcgagtcaataagatcatctaacctggattatcagcgacgaaccgaattgccacccaaccacctggaggtgttccaatggtgttcctctctggtgggtcaaataagttaaacctagccgggtctgttctcgggttgaaattaccgaaacctgacccgaccacgtagaattggtacccgtgtagatgcatgggatgattctctggcgtgacaatgctagtgtcttgtaacacaatctgaacattagatttgtactt

SEQ ID NO: 17581 - DNA, 2031 bp, Arabidopsis thaliana landsberg
ctcatgggctgctctgttcgctggaatctgtttcgctcttcttctctgtaacatccaagacgtcttcgacagttacatcttcaaacgaacggaatcaaccaatcaaaaaccaagcttgcctctgttttcgaagttattatcttctcttctctcgttgctacgatcatctccgtcgtgggtctgcttatagccggtgagcaacacgatttaagagggaaatgaatggattctcgaaagggaaaggttcttatgtgatggctatggttggtcaagctgtttcgtggcaggtctattgggttgggattgttggacttgtctactctgtttcgagcgtgttgtcgaatgtgatcagtgtcattacgtggccgattgtgtcggttcttgtggtgatcttcttcaatttcatggatgatgagtttgatgccttcaaaggtgttgccttggttactgccgtcttaagcgctgcagcttatttctttaggcttcacaaagacaatcgtatggcttattaggtttggattcttgaatctctaaagaaagtttttttatttcccttgattttttgtgtgtatatctaatcatatattctaggtgtttatcttgtgtaagtgtaagtgtgtaacagctttggttatagatgtaaatttgtatgttttacaatgaaaatgtttggaagtgtgcaatctataagtacttagttcaagtcatctgtatcaagagcctcaaagtcaggttctgatgcctttgttaaattcattaaactctttgaactctcggtgacccttagtttatgacccttaagcgcgttagcagcaaatcttgatgcaaataccgtggaacgtaatgtagaacttgatccaacagaactatcactccttgtaaccataccacccatattatcatcataatattcatcatcttcataatccatttcttcttcttcttcttctttacgtctaagctctgcgattttccttcttaaatgtctacgccaagcggcttggatgaaacaagcagcccaagtcctccattgttgagagtaaaacctgaaagtttgttgaacctgacgactgtgaagacgcctgaactgactagccacaaacttgagctcttccgcttctaaagcgaaagcctctacttcagttagagccttcactgttcgtgtggaagaaggtaagtttgagcctgctttagggtcaagtgcccaagtcagaagctcttcaccacaaaagtcaccttctttcaataaacctctgttaaagaaaccgcttcttccaccatctgttgttacactctctaaccggcctcggattatgaagagcatttcgttaaccgggtctccttctcgcactatgtaagtgctctctgtgtatagacttggctttagtctctcacatattgcgtctagtaatctctcatccatattagcaaacagaggaacctgcaaataaaagaaagaacattgttccttgtgaatgaagtgtaggatctttaggcaattcacattttttgaaacttaccctgcgaactaaatttagacagagatggcgtttgatgtctcttctaagatcttttggtaaactctggaatgtgttttttttgtcgactcctcttgtttccaaccatttgtattgatcataacgtctgactcgttccctcaggttttgtggaagtgacctgtgatgcatccactgttcggaatcacgtcttttaatcctcatttcctctaagcgaaccgtaagtgactgaagataagtttgcatattcccaatgagaagagcaaacaaaagaagtccagctacagcaattgcaattgaaaacaaaacttctcctggatatgtacttgtttgcagcccttgacctaacgtgctatacaagaaaacacccaagtcaataaaattgcaccacaggctaacaactattcatcgattttccaaggaaggaacctgaaattttggagacccccccatagacaataacaaaacttggaaaaaaacgttgtcgaaaatacaataccggaagacacagcct

SEQ ID NO: 17582 - DNA, 1578 bp, Arabidopsis thaliana landsberg
ccctttaaaaatcattaaaaaacctttataaatctttgaaagcccttcaaaatcccttgtaaatatttttaaacccttttaaaatcacttgtaaatcttttaaaacacttttaaaatcccttgtaaatctgtgtcccgccaaaaaaaatttacaaggatttttaaaagcatttcttttgctgagaaaaaatttgtcacgaacttttttttggcgggaaaaattttgggggaaattttttttggcgccaaaaatttggcgggaaaatttcagtttccaattacatattcctattagatgagggtaatttggtcattctattcaatggaaggggtatttttaaaaatgaaaaacacaaaaagatattaatacgaaaggatagtaaaaaaagatagttttgcaaatttccattataaaccatttatatttgcgtttaccttttgccattaaaccaatagtttaaagaactgcaattttgtttacgttttctacgaccatgtgattttcaaatttgtagaaaacaagttttccgttaatcaaaaaaaggattaaatgtttgctttgacaacttctttttcgggttggaaaaccgtagttgacaaaaaaaaggacaagacgtttacttttaaaagccatcataagtaattagttacgtaatatagaatttgtagtccaaatagacaacccaatggctcctattttgtgttaccatgattatgcgaccaggatagtataataatagatatttttttgacaacaatataattatacttactagaatttacaaaacataaacaaaaaacacgtttgtctctgaaacacgccttgccactttcctaagggttatgctggaaatattgaagttactataaaatcatatgacgtattgataaagttatggttttagagagaaatataacgtataagttgttggtggccaacgagtataaacaaaatatgttgcgatttttaacaaaaacttgccaatattggatattaatacgtttgactctagaatgaaagatgatatatgtgaaaataggattgacaacaggataaagaaagagaagacgtacgtacgattttaaggatttttagtcctagaaaatcctatcaaacatattttttctgatttgtgttttcaaactgttttagtgtataccatcttacgtaccatattagttttctattttagagaagacgcttttcccataaaatcacgaatgcgtttaaatctcaactcattcaaacggtatgagcctaaattcatgacatgaattcagtaaaatgaaactagaaaattgaataatcatccgtccttcttattttctctttgtagcatcaaagtcacaccttttttttcctctcttctatttttgaactcattgctttcttcttatatattagagaaattgtagataactgccaattttaaggtggagaaaatgacaataccaacatataaccttttatgcataggatcattcattttcttactatgtttcagcattacctttggtcgcaaaaacctactagacaagcccggtggcactctatatgcctccaaacctgttgaagcc

SEQ ID NO: 17583 - DNA, 761 bp, Arabidopsis thaliana landsberg
aaagagttttcgtgcagtcgtcaaacttcgaagacagctagtaatcaagatcagcaacattctttacttgtcaatgctttcaatgagaaaatacagaagcttgaaagcaacttccaaaggtatggatggatcagtcataaattgtttttgagagataatgtttcttaagaatacatttctctttcaaattgtctatgcagtttagagaggactacatcaatattagacatcatctttgaaatccaagacctcgaaagattctctacgataaaccatctcggcaagtttcataaccgcgcaaagacctttaaaagacttattccgcataaatacgctgttgcgatacaaatgccaatgaacctaccagagccactacattgtcttcctctgtgatcatatcagattatttggggaagaaaagatagttttgatgtgtatatccatcggagaatcttaagggaatcagaaaaataagctttagtatatagttttttactgtatctctgtcacatatctcctctatatatcatctgtaaattacactaatattatgcaacatatatgtataaattttgtggttgcaaaatatttgttttttttaacgttgggacaatcgttaaccaaacaattggaaaaaaaggaaattaattaatttccgttgaaataattatacttcataaaataaaaaggaaattaagaatcctattagaatctctactttatcaatgttcattctcctcaaaagctgttcgaaggacaag

SEQ ID NO: 17584 - DNA, 1390 bp, Arabidopsis thaliana landsberg
agaaaccagttctattgaattttttgagacttgtaactaccttgattggttgaccgtgttgccttggggaaatttcaggtgtgccatttgtttcatatgtcttgaagagagttatatataacagcatttgtaattcattttttttgtgcattgattgacaaatctcatttataatcatattaatttgatttgcagtgatgagaattttaatgtcctacgggcagaaaagattcttgacgaggatcattacggattatctgatgtaaaagaaagaatactagagtttattgctgtgggaggacttagaggcacttcacaaggtcgtatttttgcctttctagttcaatcttctttgctaaaactttttgtcctcatcattttataatttctgaaggtgaaaatttgtcaacagggaagatcatttgtctctctggcccacctggagtaggtaaaactagtattgggcggtctattgcacgtgctcttaatcgcaaatttttccggttctctgttggagggttagcagatgtcgctgagatcaaggtataatacctttgttttggtatacttgcaaatattagtcaaacatttgtgactgaattctttcctagaaacaaaaaaccattcttgtaattacatgtttaggggcatcgtcggacatatgttggcgccatgccaggaaagatggtgcaatgtctaaagagtgtggggacagcaaatcctcttgttctaatcgatgagattgataaggtaatatattttttgttttgatatttgtcatcatatggtagcttcttttattcatcagtacaatactgtttcaatctctagttaccaaagacaaatttctctgcaataaattgctatattgttcctttgcagctggggagaggccatgctggtgacccggccagtgctttgttggagcttctggatccagagcaaaacgcaaattttctggaccactatctcgacgttactatagatctatcaaaggtaattaaatgtggtcaaggaccaaattttgtatttcttttcttcatgatgttctgtccaccaatagatggatatgagtaccattttgtttcatgtgatactaggccgattgaatttaattgctgatccatttccctacaggttttatttgtgtgcacagcaaatgtgatagacatgattccaaatcctttgctagacagaatggaggtgatttctattgctgggtatatcactgatgaaaaagttcatatcgcaagagactatttggaaaaaactgcacgtggagatcgtggtgtcaagcctgaacaggtctcactgtcatcctattctacaatggtatcttcttttaactctcggtgacataaaatgagtgagtgattatcaatgaatcaca

SEQ ID NO: 17585 - DNA, 1681 bp, Arabidopsis thaliana landsberg
caatctaccttaatctacattcccttacacatcataccacattttataatgaaatgtcgattttgtcctcgccatttcttctctattttatctctttttccttgaaatttgtgtgctttaaccatacatcattatctttccgaagacaaaacgaaacgcttttgtctctctatcacttcacatgacaacctgcacagattctctacatgtaactttcaattaaatttgtctttcaatatattcatcataaattctctgttgtatctagatcttgtcctcgatttcgtcatctttcaaaattatcatgaatctcacatcttatccactaattgttatcatttaaggatttcaaaatttatttagatttttcaccatctattttggtccacagattagttaagcattattgtcttcatatttcacaagactaaataaaattcaaaattcttaaatgagaataattgcatataagatgtagattcataataatagaacaagatgatgaaatcgaggacaaaatgtcaacgcatcagagaatttctattcggggacaagatataaagacaaaaacaaaagtttgtcatcaattgtcctcctctaacaggtaatcatgtccctaatgcattatatattatgttgtcttccactaacaggtaatcatgtcccctaatgcattatatattacgttgtcccccgatatcaggtaatcatgtctcctaatgtattatatattacgttgttccccgctgaattttgaataaccaatttgtttaaacaagtcatttttaaatatccaataacaacagtagaagccagttgttctccactattctgtcccctaatcctttatgcttccaccatgatttttcgtcatgtatcatcacatcagccaaaaactgtcatgtcaccatctaagtcagagcccctgatccaccttaagggtatttttgtccacggaattccacgtatagtaaaatgtggcagattttgtaaggcaactggaaatatggcagggattgtaaatttttgagtgaaatatggcagattttgcaagattctctatttaatattttaaaacataataatctattataattaaaatatttatataatattacttttaaagttgtattaaacacataaaaaccagattttaggttcaaatttatgatttttcatataaattatgaataaaaattgaatattttaaatttaagattttaaaaaatgaaaaaaaaaatgaaaaacaaaaatgggctatacgccttctaggtgaatctaggcggaaaaaatcggatcaaagattaatctttccgatctagacaaaatcgccgcagatcccatttgatcagcggctagaaggccaatttttttaacaagggattaaactatcgataatcaaagtaaaataaaatgaaaaaaatgaattaataataatagaattaatgtttatctgtttttctctatttttattctcatttgtaacttttattgttgtgtatacaatatattcataaaacaaaaacacaaggctcataaaaaataaaataaaaaagtaaaaacttgtaaaatagattaattttactaaaaaaagacaaggctcataaaaagttttctttcccaaaaatccctatctatattgggtgaaagcttcatgacaatatcacaatcaacaaacaaa

SEQ ID NO: 17586 - DNA, 1746 bp, Arabidopsis thaliana landsberg
ataaatgggcttgactaatggaccagtaatggccttcttgactttcttcttcttcttcgttgacgctggtttcttcttcttcttccttaatcttaaacctttgatgattgtgtttattctttgcaggcttaatcaaagtattcaattccaacataaacggatgcattaaaacgtatcacacgataaatatatacattcaaatcagatttggtttgtgatttaacattcctagccaaacacatacctcatattaggctcataatctcacatccctctctagtgcggccgtagtacggtgaccaagattatctaacttttacaattgggctgaactcggcattgttatttccataatgaggttgggcatataactgggcctaatatccaactaataaaattacacatactgtattagacaaaaaagaaaaaaacaagcagggaaaaaaagacaacctcctgatatgatttgttctgtcttcatctgttgatgcgagttcactatggaaaaaaagagaatatagtgcacataaaatatatatcagatttgtagtagttaaaagcaacctctaaatttaatctaatattgttcttagtagtgacggatccaggaaataatcttatatggggcacagttataaaaaaaaatcaataaaaagacatcagcaatgcttgaacttgggttaatgtggggcaccattaagtaaaaaaccactacattacatacatttttaattacataatgcaaacttatataagatttatagaattgagtatcgggcacatgccccacccaaaaccaacgtgggtccgcccttggttcttagttgcatatatatacctcgtgttaacgtgaagtccaatattactaactaatcattttacatatttttccggaggtaacgttaattcgtttttttgtcgtcgttcttaacaagagaaacaaaaggaagttgtctcatcgtgtgctgtaaaaactatgatgtgaaaacggcaagtgttcgtttatttcgttttcatttttggtttctcctttttcttgttttatgtgaaaacggctagtgttctcacacacgttagacaaagaagtcttcgtccttttccgaaatatttttgtccaaaattttacaaaattacttaataataattgtcggatacaaattccccaaaaaattctatttgcgtttttaccccaagttttttaaaaactttttaaatccacttttttaacgtctccgtgattcttatgtgtagataaaacaagaaaagtcagatacgatgatcttagcatctattaaaacaaagattaaaattgtcaaaataattttagcacctaaataaattcttacattatgaaactggttactacgatcaatcattgttaagaatggatataaaaataagaaagtgggtttatgaaacgaaaaagagaggaaaaacagctatacgatgataaataagatggcaccagcgaagaacaaaaccaaccaaaacagctttcttctttttcttttgacaaaagcaaccgatgaagggatttttaacggatcactcttgggtcccgcgcaattgtaccaactttacctttttcaaaaacacgatatttttccaataaatatacttatagtatttgcagaatctatttatatatattattaataaaaattgtaaatcctggtttttttgtaatttatttattttaccactactaaactcgcattataattttatttgtgtgtaatttaactt

SEQ ID NO: 17587 - DNA, 857 bp, Arabidopsis thaliana landsberg
  unsure (1)..(857): unsure at all n locations
ccacaaagctcctgatacaaactcttccttatcgacgcataaacctcaccgctccatctcttcgccgccaatttctcaccaaggcgcacactagccacaacaacaccttcctcactatcatacgcggccgagtcaacaatccccaaacccaccgcttcttctcctctaatcttcttcccactcaacaacagctctctcctcgccgcactcgtcccgatcttagccctaaccaacgccgagaaataatccggcatcgaaagcccgatgtcaacttcactcatatacagaaccccacgatctttcctcatgaacacgtaatcatggctcaaagccaaaatcaatcccgcggcggcggcgtggccgttcaaggcggcgatcgtcggcatagggagatcgagaagcgctgctaccaccggtttgaatgatnnnnnnnnnnnnnnnnnnnnntttgcggctccggttttggatccggcggtttgagcccatgcaagatcgaatccgttggagaagaatttgccgttggcggtggtgatgaggatggatccacgggtggattgagatttggcttgttcgagaagggagagaatggtggcaattgtgtcggggtggaatctgtgttcgccgtctccggttagggttaggaggaagagatcgccgcgtttctctaacgtacacatggtggtgatcggaggaagaagaagatttctggatgataatgaaaacttgaaatgtgtgagaaatcgtgttgttgttgaattgtgcaaatatagagagacatataccccatcctgattggtctatgtttacattttggtacaatctgttgtaaaggcccatgggccggcgtgtcgagttct

SEQ ID NO: 17588 - DNA, 1255 bp, Arabidopsis thaliana landsberg
ccttttttattttgctcaataatcatttgttttcacaattttgttggaaagaaagagagccccttaaccattgttgtttttaatttttttgatgaaatatacaatatttataaagccaaagcaaattccaatcttttaaaagaaattcttaaacttgaatatataatttaaccattgaatgattacattttttccaatgatttcatatatatatattttggaaaggtaactaaacttaatagttatagttattttgtaagtttgattattagttaatgatgattgatgaataagtaattttaatgacacatgtttaaattaaaattacatatttgtaccatgaaaaaggtactcttctgttaacaaagaaaatgtactcttatggttttgacatcaattgataaattttctctttgtcccaaactttacatggtaaactatatagaatttttaaacataaaaatataggagatattgatggaataacatatttatgatgtttaattgatttgatacgaaaagcgacaatatgcaaatatcattttcactaagaggaaacattatagagaaacgaaacaatattttccactcgtacatggctaatagaaaatccaactactaattccatatgcttggtacatagttgcgtaattgtatacatacatttaataatgaacgtagttaataccaattagtctctatactgttgggtacaaaattatatctatttttttttgtcaaagattcaaaaaagtccttattattattgcacaagagatgtttcatggactgcggacgaactcatattacaaagaaaagtatatgacaattaaaacagacatgagtaaagctttttttttttttttttttttaaagaatgtaaaattatattcaaccaaaaaaagactgtttttacaatgaatgcttcatgagtttagagaaattcaaaattgtcaaagagattgaaaacgagatcttcctagcagcgggtatgaaaccaatactgcaacccaccatggagtcttgtattccctgacctttgaatcgtgctgaaccggtttcgaatagttttatcaatgaacttagcaagtttcgcagcagggatagcagtttccccgtgtcgcctgcagttacgttctctccaaagactatggatcgaagcttggaaggcatagcgaagagtgaagacgtgtagatatggtctagacgaatcaagaagatgtggggtgatgagattccaattcgagatgttcct

SEQ ID NO: 17589 - DNA, 1529 bp, Arabidopsis thaliana landsberg
ttaataagaaggtcaatgagctgcaagatgaacttaccagaataaagcagagacaagaacctgaagtgggtgaaaactctgctgctgccagggtaagtgattccttctccctttattccatcagttttggaatcacttctttttattaaagtttggccttcttttgtagagtgtaaacagaagaacaaaccctaaatgtctgttggttaattggtctggtcctgaggatatcattggtgaggggcgaattctttcttctgatcctgatgacgtggttaatgactgtcgtctaggccctgtggacttgaaggtgttggttgaagctgctaatacaccagatgcatttctatggcgacctgcacctaacatgtatactaccacgcacagctgttggacagatgattgcatggcctgcatctaaatgtgttcttgtagagaaggatatcgaaatagaggacattgtgcctttggtaaactgcagatttcagcacattcttagtcagctttttgatgagttcatgtttgatctagtagagacagagttaatttgattttttaactgaatgtgtttgacagggacttagaggaaattctcagaacaaatgtaagctattggatttgtcaacagatgaagtcattgttgctgagggtcgatggcagacacaagagcaaaatgcattggttaatggacttcctcttggaccgagcgcagttaaagtttttgtggataaagtgctcatgccagaaacatttgtatggaggcctacaatggaaatgacgtaccttgaggattgtttgaaggcttttatatcatggcctgtgcataaagtggtatttgaaaatctcccatctgctagtggtaatcagaagtcatctcttcagccctcaggatcaacttccaaatcttcagcaggggcaaaatctgcagcttctaaatccacaagttctaagtcttcagcttcaggatctgaaactcctttggagaatgcaaatgctccaagctctacaagtcagaaaactctacagaaatctcaggtaaatgtttccttagtatcttgaaattgcttctgtcatattgaatcagtctttggtttattaatgttatgaacatggcagtgtttcaatcaaggcgtttcaaaggaaaataagaagtgcatgttgatagacattacagacaagaatcaagtagttgctgaaggacgatgggcaacaaatgatccaaaccagaaggttcactttgttcctttgggtcctaatgcagttaaagtgtgggtagacattgttaaagttagcgacgtagaagtttggaggaaatcagatgaaatagagattatggaagatgccattgggacagttattgcttggcctgaggacaaagtgatcatggcatgaggtttggtttgtggaacttgttagttaaaattgttttcagacttttagtagcttttggatcttaatgagatgtttgtgaaacatgttaatgagatgattgtgttttgtgatttgtgttttggattagaaagtattaa

SEQ ID NO: 17590 - DNA, 2242 bp, Arabidopsis thaliana landsberg
tagccttttctcacttcccaacgtactcggttggtacgaggcaccgataaagaactcacatctccaggcaaagatggttatacatcagttggtctgtaggtgcggattaagttactagggtggtgtatcatacgtctgcggattgaccatttgtagtctttcagcctccttgcattgaaaccctatatgttttatagcctatatgtgaactgtagaaagatggttcaattcaatataatttattcatgttgggaaatacaactcctcaaacaggtaacacaggatgataacatgtgaaacataaaacatgtacaaaactcttttgttgccgaataacaggataaagcgttatgttttatttccgaatcggattcaggacaactagattttaaccgagtccactaaacattcttcaatctagtctgctctaaacaatcaaaaacaatacatatttgaaataattactagaatagaacacaattgtatgtttattcctataatagaacacatcttttttttttattcgtatgttttcagtacttgtgtaattacacttaagacccttgattagttttaattaaatattattattaaattcgtttttaattgaaaaataaataaataaacaatcataatccatgtcaccaatccacgtcatttaccctaatccacgtcatctgaaaccaaaaatttccataaaacttctggtttcttattattcacacgatatttgaccgttcttccgcgcatataaaacaaacatcgctctcttctctcgttcagtggatggaaccctaatttcttcgccgttctctatttatctcgtctcttctggccgaaactctttcggtggtatcgaatttcaagtcatcaaaaatcaaaactcaaatcaaagagatttatggaattttacatgattcgttacaggtttgagttaaatcaagaatatctactcttttactttgattttacatgtctctcgtttagtcttcctctttggagacatttatacttctatcaatattttgattcatacggtttagtctttctcctatgtatccctcaaacatattcttacgtttcttaatttgattgttgtcttcccccaaaaaaatttgctttccgatttgaattataaatcagccgtaaagtgatgtaactcagctataacatgatgtaactcaaccgtaacatataatttacacaacctttcgtcttccctgaatgataattcagtcgtgacatgtaatttaacgaacctttcgtcttccttgaatcatataactcaaccgtaacatataatttacacccatctttcgtcttcctttgagcatatcacgcagctgtgacattttaattgaccgaacctttcgccatcccttaagcatataactcagccataatgtaattttaccgagccttacgtcttctttggaacatataactcagtcgtgacatgtaatttgaccaaacctttcttcttctcttaagcatataagccagctgtgacatgtaaatattctctgaaacaataagagacgcaacatttcgtctaactttatcattgagcaccaacttcacaagtttgtccttcgttgtttccgcatctacctgcacaactctacaccctctttcgtcggtgttaaatacgtatttgtgtttctttacgcaaataccaaaaacaacaattatcggaacaagatcaacgatatctcgagaatgatgaaagaaattgaagaagaataaggatgacgatgagaaattggaagttccagtgatgtcaaaaactcacgtgaaaagctcaggtgaagaagacgagttgaaaaaaaagacatctcgtatttcttttgatgatgatgacatggaatgttgcatcagacgtcattttttttaattgatgaagtgacaagtacgccaacaaaggaacatgtaaatttgcctaaataaattagccatcaagcaacgctataactcagccacaacatatatactatcacaattattaaaaaataaaaaaaggtcagttaattcagccatttaatgttgtaactcaaccgacaatctttaactcagccatatcgtttaataagtcggacgtaattgcatgctattatagtaattaatctttcgctactaagtcagctataacaaggccgagttattcagttaatcaagctctttactgctgatttataactgtcaaacataaatcagcggtaacaacatcccatactaacagaca

SEQ ID NO: 17591 - DNA, 1096 bp, Arabidopsis thaliana landsberg
  unsure (1)..(1096): unsure at all n locations
tccttagtccgcttatcagtttaaatcaacagaaatcctagagatcaagaaaagagtactacctcatctatatctccgagagggacaacaacctacaccatatgatgaggaagtttttagcattggttcaaagaactcaatatgtagttacttnnnnnnnnnnnnnnnnnnntttgcttagagaaaacattggagtggaaacatatgtgccacgcggaaacatacattcggccatgatacaggaatgacctctccagggcacatgaataactgtgctcgacaacctaaggaaaacatacatcgaaggcatacatttttgaactttcatatatactacaatgagattttgtactagttaagttacctcatccgggaggagatcaaatatcgtctgcagaggccctggcttttgatgtacaattgttgggccttgctgatccaatgtgacccttcttctaccggctccagcatatccagttacagccctacccatcaaatccattttgtacaaagttctaaatcacaaaggctactagatatcaagtcagaggtgtggttccattgaaagtgaaaaaccagccaattagcactctcctatctaaacaagataaacccacagcttatagaaagattgaagtagcactggcggattacctaggagcattcacgggtagtttgattgcattaatgttaaggcaaacctgacaaacaaaattagattagcttctaaagagaaaataaggattcgaataaaaccattcaagagaaaaatatacaaacggaaactaaggaaaaacacacctgcccagacgggctgtctaatgagtgccacactggacccgtttggccttcacgtgcaacattaatagttactgagccaagaacagtacttttccaaatgatatcccaatcatgaattgttacattaatctgccataacaaatataatagtagatgttagaaataggtatctggtaaacataacaggtgcatgttttgcattcaaagttactgaatctgtatgtcaattttgaagaatacgtggttttcatattcgttaccaaggcctatataagcgaaatctcataccaagaga

SEQ ID NO: 17592 - DNA, 978 bp, Arabidopsis thaliana landsberg
taattcccccccctccaaggtactctagcgtcgattttggttccctgtataaaaagacaaacatatcaaattctttgaactataacagaaaccaaaaaccaaaataggaatctaaaaagattgtttacgcacaaaccttcacatcacagaggatcatggtagtaggagttccaaagatcatagactgattgtcccagatgcttaagattttcacatataggacccagttgttcctgtgtaaacttaagtcacagatatagtttgtgtcggccattagaagtttctatggtttgatacagttttcagagagagaatagattgactgaagttaacctaatcttcgtcttatatatatattgaatggagaggaaagttgtaacgattcagtgaatctatatgaaaggtttctatataatataactgttcaaatcctttagtcaatatataattatttgctaaccgattctgtagccaataaaaaaatggaaaacaaatttgctaataattgctgcgatgttaagtagataatgatgataaagtatttggattcagtagacatataaataatggttgcttatgttttagatcccaaacgaattcttcagtatttaatctaaataatttagtaaatatactaactttgttgtcttactataatctcaggcatttgaagtcggagaagatagcacactgcattaaggtaatatgattcttcttttattttagtcattttagttatcatgagttgtaatccatgacatttttagaagttggtaaagtaagtagtttcatagacaagtaaacataagcaaaataatataaagtactcacatgaaatccaacttataacaaaagaaaataaacatagttcataaagcatagcacaacttttttctcataattcaaattataaatcgataacttagaaattggacaacacactctcaatgaaaatgtcatcatctttatcgtctgatc

SEQ ID NO: 17593 - DNA, 642 bp, Arabidopsis thaliana landsberg
caacgtggaatagcccaaatcgaaccttgtatccgtacaaccattcaaaattatttaatagtgaccatgcgaaatatcccttcacatttgctccatccctacataagagtttacaataaatttattaggaattggtaattgcctaagtgtttataacgtacatttaacttctctatgtttttgagatccattgtataatatgagttggtttataatctaactaaatatacaattcacataccttattgctgctttcaaagcatccaaatatccactcaagtattgcatcctttttgtatcatgcagaagttcttcaactgtcgtctctggtttttgcaactgtccgaaacctgcaaaaccagggttaatatgaatctctcagcatgccattcttataaaatggatataacccaaaaaaagttgaggtattagtaccattttcggtgatgtacattggtatgctgtggtacctattatttaggtgattcaacatctttctgaatccgataggatcaatatgctgccaatttacgtctgtctttcatgtgcaaaaagccaaatatttcaaaagcccagttagaaaattcactattatacacaaaggggctaactacaaactttagatgatagctaaagaaatgt

SEQ ID NO: 17594 - DNA, 1439 bp, Arabidopsis thaliana landsberg
attttgagacttgcagattaaacatatagttacatacatacttttaggtcttttacattttagatttttagtacttagccagttcaactgtagaatcacctttccgcatttgcatcattttgcttgctactcttatttccaatttgttcttgtccaaaccttacagttaaaccttacaagtattctcctttgggctgaattttattagttctattgtgaggttataggtgatatcaaagcttacggatgtgagggcttcacatgtaccatacagagactctaagttaaccaggatccttcagtcctcattgagtggtcatgaccgagtatctgtaagtcttgtttaagctgttctcaatcctcgtggtacaataaatataaaatgcacaacatgatctttatagtagtatactttactgattagtttttctctctggatatggtagctcatttgtaccgtcactcctgcatcaagcagttcggaagaaacacacaatacactgaaatttgctcatcgtgcaaagcatattgagattcaagctgaacaaaacaaggttttccacgcatatcttctttcagctcttatcttttgtactgaaggtcttttttggtttctaactctagaaaactgtagataattgatgagaaatcattaatcaagaagtaccaacgcgagattcgtcaactgaaggaagagttggaacagcttaaacaggaaattgtaccagttcctcagctgaaggatattggtgcagatgatattgttcttctgaagcagaaggtatgcttgaaatttttgttcggcactgatgttttctgagaacaatttgtcagaaagagattatggcagatagaggtcaaatttgatagaggtcattctggacacaaaatgcgacagtttttcaatactaccactgtttccgtccattttatttatattctattagacaagtgtgaggacgttttatgtcattgccttttggtttacaatcaagcatttgagagaagctgaagtaacctggttttgttgtttttggctatataacgtgatgataaaagctagaagatggtcaagtcaagctgcaatctagactcgaagaagaggaagatgctaaagcagctctcttgagtcgaatccaaaggctgacaaaactaattctcgtgtctaataaaactccacaaacatcgcggttttcttatcgtgctgatcctcggaggagacactcattcggagaagaggaggtagatcacttttctagcctagacctattttacaaaacaatataaaacataactcttcatttcccaaaatcatgtctgccaattactatttttttggctgatcttagttgataatgcatggccagcttgctagccaccgcatagaggcaagacttacagatatgagaaccttaatgatgtttctgaaagaactccga

SEQ ID NO: 17595 - DNA, 2394 bp, Arabidopsis thaliana landsberg
aaaaatatacaaggagtcaagtagtagtggaaaaaacacctttttatttaacgatatcttataacaaatgtaacagagcaattttattgacaaccaaatgattagatgaacagtgagagattgttcgatagtaaagtcatcaatgtgttaccattatgttccactctgcatctccagaaaccaaatgcagcaaatccaaagatcacgaatagggtcaggctcactgtactagcaacaatggtcatcttgcgcttatttacatctgaaaaatttagaacaagaattgaacaataagtcatgcttctatcgaaaacatcaatatcaaagaagtagaagatataattacaaaagatacaaaaggtccttgaattatcttctaattcatacccagctcagaatgtgcaagacgaatggaaagaatttctcctcctgcagaaaattgcattgtgtccattaggtctttgctccacattaagcaccctattccaggaatataagcgaaggccaagcaagaacaattgtggaggcaactttggtagcatccttcagcatccacagaatttgcatattcataaaagtctggaggctttatgtttggaacagtatggaagacgtttgcatctttgccagtagagtttccttgacaatgtagttcggtacgcctcgcacaaccacttgtccagtttcctcttttccattcctcaatggatttaggaacaaaacctttgaagcatttacactttggaggatctgagataacacaaaaaccaaaaggcccacatacgccgtaaatatcacatgaattggctggaccctcgtagcttgatttccagtccaatccattatacacgaacaccttcattgatccgtgtgatgttaacattatacgtgaaagcttgtaggctctttcaaaatacgaaaagtatcctgacccatttacatcctgatgtaggctgaatggactagtatatgattcatccataaacggtatcccagtgaaccttgttttagcccatggaccgcttctccagtaaggcgttgaccctctcataacgaacccctgtgatggcacttgaggtgtaatctggcccaaaaagtcgccaggtgatggatcggtgtaacttttccaagaagtcaacacccgcttctcagcggtggcgaggttatacgtcagggatgaggtatgtagcagtgtatccccaagatgatcaaagctttgccacagagctctttccgaaacattatctatgaccttaagatttccgctatctgaaagctctgcacgacacccgctagaggaaaaagttactccactagaccacacagtgccatgtttgccattaagtaacagaagacttccactgctgcttatagctagatatgccgtagagtctgtaacaggcttctctctattggccacccacacaacaacccggggaatggtatccttgaactagattccaacatactgatcttgggtgttattaggactgaagaaccccaattcataaacctcattagcggagctgagagtttgtcccattgacaaaggactttctgtcgttataactgcagaacttgaacctgagagcaaggtaaacaagaacatggtaaagaggtgcaaacaagcaaacctcgtcatcatgtgtgctccttgtgtctccaagaacaatcttcttcagattagtgcaagagaaagtaatccacgaaaacaaactcaagtacttaatagacaataattctctaaacagtgttgaccacagcacccatcttccaagattctattactttattcacaatcaacttaaaccttgtttataaaacaactttattacaagttgaacccaaagaattgaatcttaaaaattccaactttcttccaaataaaccatgcaacggttggcctcatatagaaacattgtgtcactttcatgtctttgatacaaccaataatagatagtcatcaacagtttgaaccaatcaaaagatgaaaatttgtagctcttacctttcattgtctgaaccaagaactccaaacttttacccaatcaaaccacgcaaaattgaccagactcagtgagaggtagacgtctacactctgaatcaataaaaaagatggaactgtgattcgtcatctcgtgtgtaagccaatataccgacttaccgagatgcaagaactcaaatatagaccaaagaccaattaaaaaaagaaacaactggagagcttaggcttgagcagttcaactttctattttataggatctacaagcgattcctgagactccttttatctccagataaaaagagcgtagctttgaactctcacatttcggtcaggcatttcattcgacacatacagtgcgtaatctaaacgttcgaagagacacatgttaa

SEQ ID NO: 17596 - DNA, 1284 bp, Arabidopsis thaliana landsberg
ccgcaatctccacagggaacatccaccatctttgaaatggtgaaacctcttcgcatctctaaccacaaactctctatcaacaatctttgaaatcaacttgatcacattgtgacaatcgctgcaaactctcagattcttgaccacattaaccgtcgagccaggaaccgtgttcatgatcccaaacgcaatcgctagtttctcgctgtgaactctcagtgtcatctctttctcttcctcatcaacatcatgacatacagatgacgtgttcgatacgtaacctgcctctaacagcttcctgttcagttctgctaaaaactcgtaaatcttctcacgctgaggatgctcttcgtctccgatcaagaacacatgaacctcaccattcaactcgagtagactaaaacctggcggtttcaccaatccgcgattcttcatgatcattctcaccctctcaacatctttccaacgacccgcatcagcgtagatatgcgaaagcagcatgtagtaaccgcaattcgaagaggccaatttcaaacaaacgcgccacggatatttcagctagctccacgttcttgtgaattctacaagctgcatgaagtgagctccagatgatagagtgcggcttcatcttcattctctgaatcaaatcataagctttctgaagaaacccagctttacctagaagatcaaccatacaaccgtagtgttctaaccctggttccacaccaaatctccccttcattgcgttaaaccagcgccagccttccacatgaagacccgcatgactgcaagcagctaacactgatacaaaagtaatgtaatttggtcgaacccctgaatcgatcatagcagggaataactctaacgctttagccgcgtggccgtgcattccatatccagcaatcatggcggtccacgacctaacattcttgtttttcattcgatcaaatgcttttctcgccgtctcaactcttccgcatttgcaatacatatcaattatcgacgtccccactatcacatcatcctcaagacccatccttattacctgcatagacacattatctttgcaaattagacacattcatcaatacatataatcaaagaaacttgtcactcatgacaagaaaaggttgcagaacaggaatcaaattcacctgatcatgtatacactttccaatacgcagagcacctgaatgcgagaccgccaacaacacagtagacaatgtaatggcgttaaaggtcacaactttattcttaacaagtctacgaaaaacctcaaaagcctca

SEQ ID NO: 17597 - DNA, 2661 bp, Arabidopsis thaliana landsberg
aatactcgtgtgtgctcttgtgaatacttgtgaatccttgtctttgcttcgatttgaacactcgtgtgtgctcttgtgaatacttgtgaatactcgtgtgtgctttagtgaatacttgtgaatacttgtgtgtactcttgtgaatactcgtgtttccttgtttagttctatacttgtgaatcgtgttctcttgttaatcgattctcttgttaatcgtgttctcttgatgctctattgtggaagttgactttgttctcttgttaattgtgttctgttgctactcatgctcttgttatgttctatagtatgttttgcattcttaattgtgttcttttgcaactcattatttattgttgaacatagttgacttttgaacttcgcatgttttacgattagacatttattatctgccttagttttatactgctgtgtgctctaggtcagttctatagtgtgtgttctgatgtgaatctgcctaagatatacctgtgtagtgtgtaacatagtagacttgtgatctgcctctgttctatagtctgttctcataacttttattgtgttttgattttttaacatgtttacttctttcattgttgcatgtgcttggagtttactcgcgacagaggatctaaactcgttagaaagatcacaagcgatttttaatcaaaagttcaatgctctctactataattggtcatgtgtgccattggctaaaagagagagactgtttttagagttcgcggtaagctttctgtatatctgctcctgtttagtcattgtttttagagttttatagtctgctcaagttcagttcactaacttcttccttttttgtagaaaactcaccactgggatccattaatcacaaggacagtccaatattacttcaatgagatcgtcaagaggcgcttgaaggatatggttaacaccgcaaggagaactcgagagcagcctccatggattggagaaactctgtggggaacaatgtgtgcttacaaggacacaaaagaagcatagaaaaagagtcagacctatttcaaagctcgtctctctgaccctaacggtctcggtccacacatccactactctgggccaaagtcttatcaagaaatccaagataaattggtaagtgtttctgcaaaatctcatgtcttttagtgacattcaaatcataagttagagttttattgtgtgtgatgtttagttcaagctgtcagttgacttgtgaggatattgatctatgtttgtaggaagagaaattgggaagaccggtccatcttggtgaggtgttcatccaaacacacactaagtcggatggcacttatgttgatcggaaggcggagaagattgctctaacttatgagcagaatgtgagagataagctgtttgaactggaggctgcagcttctgctgtctctgatggcactccacgacctcgggatctcacagtagatgagtatacaaccatctttctcgaggtaagatgttgtagtctaattcagagtcttagagtccattgatgcattcagtcactaattgtcttcctctctatttcttgcagtccatagatagggattcaagaggcaatccttgtggacttggatgtctgaaagacactctaggcagtaccaaccgtcaaccgccaactcgccggagactcagaatcctttcaagccttagaagaacggctgcaggaagctcaacggaaaattgaagagcatgatgcatataatgagaagcgggatgcggagattgctgcccgagaagctgagtcagcccgagtcatagctgagcaaaaggacaagctcgaacacttgtccttagtcgagaagtatctccgccaaaccgatccgcaattcttggaattcatggccactcactcttccacatccactgagtgtctcccaagtaccccacctaatactccatagatttaactttccaaacactatacttgaacttatgtttatttgaaataagttgtttgtttaagaacaagatacttttatgtgtatttgaacttgattttcaaaatatgtatatcttttcataatttatagcatttcgaataacaaacaacaacaaaccataacactaacaacaaacaagaaacccaacaattgatgaccaaattcttattcggataaaaccagaagtcgcaaagaagtcgtgaataagtagcaaattagacgcatcgtagtcgtaaaatagtcaccaaaattaccgactattttaagacaaaccaaattagtcataacctaatcgtcaaacagacgtataatagtcgtattcatttatacgactattatatgacaaagtatatcatatccttagtattttacatttaatcgtttaatagtcggcatattgtcgtaaaatattttacgacaattttgcgattacctgaaagatacccagggttcattatatttaattggaaaatagtcgtaacattgtcggaagaatttaacgactataggacgactatatgtttcacacgctttgtacagtgttattaatcgtgaaattgtggccaaatagtcgccaatataatacgactactcaacgactaatttaccctgtatgccccgttgtcctaaagtagtcgtaaatcaacgactaatagacgtcaactggacttagcgactatgatataacaac

SEQ ID NO: 17598 - DNA, 2469 bp, Arabidopsis thaliana landsberg
agttaacatgcaaatcgaatgcagaaacaaaactatactaagcagaagataaagaactcaattttcatttgcagaaatgaaactaaagaccaggaactatcaaatgcaacaaccagaaagtaaaccaagcacaaagtgaggcactcggccgagcatactactaaaacaggtcgagtagaatactaaaaacaccaattttgcacgagaactaaacaaaacgagtagagtactaaagacacgagttttgcacaataaaacgaaacaaagctcttaagaatggggtaattggttctagtggactcctcaatccattagctaactaacaaactcaatcaagctatccctacacaatagattcaaaaccagatcaatccactttcatgacaatgatccttataactttatcacttcctaatctcaattttcatagatgaaacataacaaagtaagctttcaacaccaatctattaaattcaataagcagtctaaacatccaatgtcttgggttagaatctataaatctcttaaattagttggttcagacatttcatcaaacacttgttaggtggagaaagtctgaaatcaattttcaactgatcagaaagaaaatagcattaagaactcctaaaacagaagggaatcatgcaattataaacttagctagctaaagaaaagaggaatccacctaaacctaacccatcctaaagaactctgaagaagactactcaagaacaatgaagaacatcatagaacaaaacccagaaaattcataaaactcagaattcattataaacttagcagatgaaagatctcaataagataaacaagtttacagaagaaatcaaatccaaattctcaacacaacaaccagaaaatgcaaaataaatctaagaacccaaatatctagaagacaaagccaagatattttgggcaaaaaaataagagatctatttataggcaatcctaggttgcccaaattgggaataagacaaaataagaaagtcaacgctgcatcactcgggtcttagccgagtagaaaagtcgagtggcttcctcttagtcacatcactcgggtcttggccgagtggcttggtcgagcagcttctcttcttccttaagtgcactactcggcctccagccgagtgccttggtcgagtagactccttgttcttcacgtgtgctccactcggcctccagccgagtatataagccgagtatacttcaagtccttccttagatcccacgaactcgattctgtccatcccttgtgctagaaacctccaagttgagtccaaaagtacctgattcacctgtaaaacactccaaatgcaagtatgttatgcaatgcaatgcaaaatgtgcaaaggaaggaaaagagactaagaatgcatgaaaagagacatgaaactaagctaaatgcatgaaaaacaaggctaaaaaaggtagaatctagtgttatcaccaatacattcaaagattgtacatttacatcaatatacatatacttaagcttcctaataacaaacaaaattctaacactgggataactatcaaattttgataacatggaacaaatactaaattaacacaaatcaaccaatagtcaaatattatacatttctatcaatatgcatataaataagcttccattgaatattataatgacatgtttctgaggtttcagtcgtaaacagcttccattgatacactccaactaaatgaacaaatctcactatcttttattacatggaagaaaagctaagcctagagataagtaagtgactaaagatggaaactttacctcaaagaacaaacaggaattatatcccttaagttcaatgacctcattcaaagtcgcgcctttgctactcttatattcaactttattgtccttcttacagtgtggtagaagtgaaaccattttcaacatcaaactccgataccttcacacaaaacaccccaaaaccaaatcaatttcaaaccctaaaataaaatcaaaacaaaaaaaagaaacagtttttccaaaaaaaaaatcaacctcaaactgattcgacgagaacaagtaaccaaaacctcctctttactcttgaatccagatgaagtcaaagctttagctttctcaacttcaccttcactcttatcttcccatcccaatatggtcattttgggtctctcaggagcagacacatcgcttttttcacctgtggtggagctaccatctcgttgtatgttcgcttccaccataagttttggattattcgcgaacaggcgttgaaaagtgaaatcaacgtacgactaaagagtagtctctaaagttttagcagacacaaaacagagaaaaaacgaatgggccggttcatattgtgcctaaattaacattggaaacgacccctaaccacttccccgttagtctttgttcttaaaaatgctttgcaaaaactgcttagtcagacagagagccttttccgt

SEQ ID NO: 17599 - DNA, 1120 bp, Arabidopsis thaliana landsberg
  unsure (1)..(1120): unsure at all n locations
ttttcttttaggttttccgcttttccttcttcagcgagttcattatgtcgccacaattttgcattgcatcttttttattacattttatattccaattttttttattttttaattacactggagttgtgttaaataattaatccaaaggattgtcgttgctgtctttgtcgttttgattcattttaaatatctatttttaaaatttgataatgttgttgtcatttatagagtgagcaggaatcttagacattttaaaatcggattattaaaactttggcttcattacttcaataataaagtttagggttttaccagcattgaagcaatcatggcgacactatctcgaacatcaccgtatgcatgtcaacatgaaatagaaagcttacaagtccacatctaagttgttgtttaactaaaccaatacacttatgaatatcacttgaacaaaaccaatgatgatggagaactgattaccaatctagaaagatacaaaatggattagtaaaaacgttcaatgacatatagaacgatgagttgaatccccttctctaggctttcgaaaaacaaaaaggtttaatcattatatattcgctcactcaaaggagatatcgtaaagtgattcacctacccctaaaccagagttacaccaaatataatgcgacatatggtttggattcttacgatatgtggtgtataaaataacgtctctagtttaattggtatcatgtaaagtctagcttcagtacagaataacagaatacataatttttattactagtgttttaatgggattgtaactctaacgtctctagtttacgaccaagtgtgctttgtcttcataacacaatataagatatgggtctctctacttattgtcaattacctttgagttggaagcctacagtataatatggtatcatagcccggtctacatatacccaacctaatccacgtcgcgattcgacctaatagttggcccatcgatccatgcccagctgaagctagacttcacatgatatgtcagctgttcttgaccagcttttaacccgtcggtccatcactgtccccatcactaggaagaccacggtccataactcgatcctncccagtcatacattca

SEQ ID NO: 17600 - DNA, 2374 bp, Arabidopsis thaliana landsberg
gatatttaatacaagattcttaatacaagaaaatgatcctcggcagcatcacaaacaagattcttgttgatctgtttttagaagaagattggaagatgaaaaccgcagctagaacaccaaccaatgctgtaacagctaaagcaaccgtaggcaatggacttgctactccaaaattctgaaataagaagacaaatcaaatcttaagttattatactttttgttacatttcccaaactttcaacttttatataagcaacattatcagttatgatgttttacctcaagaagtccttttccagtggaaatctcaacagtaatggcaactgcaaaaccaaccatggcgccacgaccaagccatatatccaaaccactgcttccttctgtactttgctcacttcttatggaaactgatgctgctctgtttcctcctctacgggtcatactcaacttcaatggcactgaaacggacacacacaacatacaaaaacgaaagaaacaaagtttcaatttttccatggatttactcagctaacaaagacaatgcagaaagcaaaattagaaaactttatgataaatatttgttgccccatatttcagataaccaaactatatatgaacaattcagtaatcagaaatatcaaaatttgagcccaattttcaaactaaacttcaaaatgtagagaattggagaattttctcaggggcaaggaagacgtacagagaggagaaccagaagcgaaggtggatcggattccagcaagttgcggaacatgaacccgacatgtagaagttgggtttgtgattgtggctagctttagggcaccagaatctggaaacatgaaatccgaaactagtcagatacatacattatagagacaattgtacaactagaggaagaagaagggtagcgaagagagaaagaaagagtactgggaagagaaaaggcgagagacgcagacacttgagataaggccatcttccttctacgtagatatcacaagactctccctttcttcttcttctactattctccttccttcgtcttcctttctcaagagtcgcagaattatctgttcaagctgaggacacgtgttttctctccactcattaagttcgtatcttttcgagctacacagttttccaaaacggtggcgtttcacaaacaactgcatctcttagagcaaaccgaacctaatttgaaccaaaccgaaccaattttgaaaaattggattggcttaattaacagattctctacgatagttacatcggttcgttcaattgggttataaaccaatttgtggtcactaatattcaggaaataaatattcatagaagatagaagcactcaagtaatagaaaccatagagttgaaacatcatactgactctactctcaacgttaccaaaactgtatgaaagccaaaagaacattattgcctaaaccaacaaacaacatcaaatcttcaccggtgagatttaagattcaagaatcaacaacacaccaaactagagcttgaggaaaacgaactcctcaaccgctggaatttccccaatcttcttcagtgtctctttgcttggtatgtcatctactccaatcgccataatcgcttgcttcctcggtgcaattctcccaacgctcatgaagttaacattgacattagactctccaaggatgcttccgacagtcccgatcataccaggttgatccacctgcctgcacagtatgatactaccttcaagagttacatcgacctcaaaagatccaacctttgtcaaatgcgggactccgtctttaacctttccttccactttaacctctcctgattcagacagggaactggcgaatttggactccacattgcttagctgaacagttattgtctccaatgggctctctggtgaaccatccaaaagcacacgttcctctgagagtctgagacctctctgcttggctgtgaaatcagcgttgaccaaattgacatatacgtcagagattggctcgatgattcccttggtgatcatggctcggagaagtctggtgtcaagatcatcagtggctcttgctgaggcgtatgtgattttcgcgtttttcacaccgcttcctccggccaccagttgcactgccagtcttcctagtttctcggctagcaccacatatggtttcagctcggtcagaacctgcagatagaatgcatgtaagcttgagcaaataacaaacatggatagtcttaacaattgaaatcttccaacttgaatctgataagaacaaagctataaaccttgctagtctaaaatccaaaacagaaatcacagaaacttgattaatgaggctcttaaaacaaatccctagaaaacccaccctcacatcaacaatt

SEQ ID NO: 17601 - DNA, 657 bp, Arabidopsis thaliana landsberg
cggttggtagttttgttcgtgtggtggtctattgataacctaacctatgtgcacattgttgatttacttatggaaactttgaaatctgatgaaaaagaagatactttgagcattgactgtaaggtactcgtgtggtggagaatgataaaagatggtattgttacgcctctgttggttgatctttgctacaaaactgggttagaacttccaccttgctttatcagtctacctcgagagctaaaacacaagatactagagtcgcttcccggtgtggatattgggacattggcttgtgtttcttctgaactgcgagacatggcttcgtagaatgacctgtggaagcagaagtgcttggaagagtgccaagatcttgtgacagaaggcaatcatgatgtggttaactggaaggagaggtttgctacttattggaggcaaaagggaaagttctccttcataagcagggcatttcaaggtttttcagggagcattggttcgtcataaatcgtggaagaagataaaaagagaccatattgaatccggtggagtgaatgtttgtttgtattcaaatcttgcaaataggcaattataggtttaagatggtgtaaagagcattggaaacttagcatagttcttcttcttctagtactcaagaatgag

SEQ ID NO: 17602 - DNA, 1046 bp, Arabidopsis thaliana landsberg
  unsure (1)..(1046): unsure at all n locations
ggagttcacttttctgaaatcgaagccctaaacatggcctcgggttctttcagatagatggtgggatgagatcttgtgatcccagtttcagcagactctgtttcaacatctttttgcccgacagattcttcttcaggtgtcagcaatctagccttatagagttaaagctcgcgacttcctcccagtaaaatcgaatgttaatttggttagggtttagagaggttgaagctattggaacgatgtacagaaagccatgtcgatatgaataatagctaatagcattatgtctgcgaaggacaattactcaaaatcttatttccatagttcttagatggagagtcaaaagatacaaattatatccattgtgcgcaaaatgttggcaaacaaaaagaaaggaacaaaaagtatactgaacaagtataatatcagcagaagagagaagaagaagaaagctgagatatatgggtctttaagcgttaacccttttgtttcactttgtttgagacctctctgcaaaactgcttcagcttccctacccctcggattcttcagaagatggcaggatttaacggaagcaaaaccatttgttctgcgcagaaagcataaatcaggtgagcaaatctatgttcttggataaagagctaagaagttgaatgtaatgagaaaaagaaagcaaccttagctttagggttttgggactatgggttattgttttgatcggagttttggtttctataaggtgaaaccagactattagggccagcgccggatgctttcttggtcttcttctcgtcactagctttgctgaaaatgactgtgaatccttcggctgatgccggattgttcacatcccattcccnnnnnnnnnnnnnnnnnnnnnnnnnnnnnnnnnnnnccaaagaaacagagattcatcaaacatcaagaaagctatagagactttttctgaaactgatcatcgtggtgatgatgaaaggagagagacttgaagaaaacgttgtttgttcttaccgccattgttgttagatcaaagcagaatggaatat

SEQ ID NO: 17603 - DNA, 1533 bp, Arabidopsis thaliana landsberg
gtcaggtcaaaaatgcgagcaggtgataacagtgcctgttgggatagtcatcattcagatcatgatgtattcggtgatactctctctgaccacagggacgacgcagcgtcaagtggtgctagcacaccaagaggggattttatccaatctccttttggtgttttcacatgttacgatgacaagtttccttcaaaaccctccaaagattccagtgatagaaagcctgcaatccataaggttcccacctcaaaagctgaagaatggatggtaaagaaaggtttgtcacgtccatggaaagggaatgagcaagaaggttcaagagtaaggcctactcattctgtatggtcttgggtagaaaatgaacaagagaaagataagtaccaccagatttatccctctgctggtgttaagtctgaaagccatggctctgaaagtaataagcctactgatgacgaagcttctaatatgtggtcttcctctataaatgcaaacagcacaaacagcgctagtagttgcggcagtaccagtaggagtgttatggacaaggttgatatagatagcgatcccttggaacatgaaattttatgggatgatttgacaatcggggaacaaattggacgaggtagtttacttcataaacagattatctcgttgccagtccattctttataacatcatacatgttactaatatatgtgattttctgtgtctgtttagctaaaatgctccaataattttccattgtacaggttcatgtggaactgtctatcacggtatctggtttggatctgtacgttttagctcctggcgatattgtagaatctacatttgttgatttattcacgcttccatggtaaaataaaattcaagttcagatatctttcttattgagaggtgctaatgtcaccacaggatgtagctgtaaaattgatctccaaacaagaatattcagaagaggtcatacaatcttttagacaagaggtaatgtttttactttctagtcgtccattataattgctcggagtgtagtttttgcagaagacattttaaatgggtcttgctatactgtgaaggtatcgatgatgcaaagacttagacatcctaacgttctgctgtttatgggagctgtgactttaccccagcgtctctgtatagtgtcagagttcgttccacggttcgctctcatctcttttctttctgtgtgttgttggactttcacgtcatagctcctaatcatttgaattataattttcagtggaagtctcttccgtctactgcagagaagtatgtcgaaacttgattggaggcgacgtatcaacatggccttggacattgtgagtattagttatatgttcattagacatttaattatgagttgctctatgtgactacttgtttgtatttttcttgtaaatcttcttgttaactctatttgactcggtcaccgtacatctcatacaccatattacatgattcttcaaacaggctagcggtatgaattatcttcactgttgtagtccacccatcatccac

SEQ ID NO: 17604 - DNA, 1448 bp, Arabidopsis thaliana landsberg
gggaaaaagcgaaacgtaagcgcggaatggcgtaaaggtttaaaccttttcttgataaccgaacaaaaatatgttttcatgtgcaaaatataattttgctcatactggatttttgattgatgatttgcagctgcaagagggactgaagaaaaagcttagttgcagagaaatgtgtttggtttttggtggattctttttgtttttcttctcagaacttagtgaatagttgacacaactttgatgtcttgcatcgttttgatgtttcattgtgaaatatttctaggagtatgccgcctctttggacaatgagtagtaaaatgtatcataatgccattttgtaatatatttaacatgtaaaacaactagatgtggcctctctcttgtctcatatcttaagcatgtcatttagaaccttttattgtaaaaaacaaactttgtcacgagttactttcttttcttctagtcaaaaaattgaatattgaccctttcattgttatgttaacgtttcatcttataacctataaatttacattcgttttgggccttttggctaattacgagatagacccttgtcaatgtgggaaaaaaaaaaaaatcttcgacctgggtagttttgtcgaacagttggtgtccatcactagaacaccgatcaccgatgagaggcgtcacacccataaaccctcagaagaagatagaagctgattcgaatcccgtcaaagaatctgagtaagcttacctaattcttcctatagaaaccaattcaatactctctctttctctctaagtctgtttccaaagagtttctaaggatttcgatttctccggttcgtcttgtagttactatgaaggcgaacgtcttactcatctactcgacttgattcagaggtaaactctctccaaacccttaaaaaaaaaccatcacaaatatcggtttttgttacaaaagttctctctttttggtgaattagaggaattgagacgtccaagctttcgaatgtgaactcattacctgagaagatatggctcaaggttactacttactactcttgctatggtttctttttgtttcttcaagattcgattctcaaacaccaccgttgtgatgtatttcagaagcaaatagctattgggatcaacgaagtcactcgagttcttgagaggatgaatcccaacaatactagtgaccaacaacaaaaccctaaacaacttcaggtacgacactaaaaccctaataactctcattagaaaaatggtattgatttagaaagagactgttttcaattcatcacaggtagtgattgtagtagcagattgtaaaccgaggatgctgaccaagcatatacccaacttagctgcttcgagaaacgttccggttctctatgtaagggacaacaaacgagcctctctcagattaggtgagttggttaagctcaagacggctctagcca

SEQ ID NO: 17605 - DNA, 1709 bp, Arabidopsis thaliana landsberg
cgtatggagcaattggttttgtccaagaagtttgtgatgttgatgttgatcccgacggtcgtgaagtgttccacgaattcctcatgttgttcacccattcattaacctctgcctctgtttgtaagaccacctttgagggactctctctaaatttgttaaagacaaattatttctggccttccagattctccaaatgagccatagaagaattagtttctgtcgaattgtgagagtatggtttgaaaaagtatcaacaagaaatgataaattttcttcagcatcatttgtgaactggtgtcctagtaatgtcggaatattcaaaaggcgccaaatccttttggagtgagaaatatttaacagagcatgacgtatcgtttcctcttcagcaaggcatcgaggacaagttgtagcaatattcatgcctctagtggttaatcttgtgcaagtaggcagagctttcgaaatggttctctataacatgtatttgattattggaattaatagaagtttccaaatcttattttttcactcaaccaaaccacaaggcacaataggtttgacttgggtatctgttggatcatgtgatagaagctaatagcctgatttcaccgtgtaatcacccgtagtagtataattccatatcagcctgtctggagtacgttcccgagagagataatagttgtgtaggtgtgtatgatcagacagactaactgtttgggagatcaagttctcattctaacaacggtatgttccttttgtggcgattaaagaatccattgtatcatttgaccccaaattaatgaggtgtaatggtcgaggtggatgtgacgcaactatattatcatggccgatacgtattgatgttccatctccaatcaaatatctacttcctttctttatcacatctcgtcccgcaagcatggatgcccatccataagactgatattttcttggttttgcatccagaatagaatcatctttgaagtaccttgctttcatattacgggcaaacaaagattgcacgttttggataatcctccatgcttgttttgcatgtaaagcatcgttaaacttcgctaagtctttgaaacctagaccactttccctttttgaatattgaagcctcttccacgcaatccatggaattcccctttttttagcattcttctcccaccagaaattcattagaagagattcaatctctgaaataatacctaaaggaagtttgaaacatgacatcgcgtacacatgcattgctaaagcaaccgattttagcattatctcctttccggttggcgagaggaactttgcactccaagaggctgttcgttttttgacgcgttcgatgatgtaactgaacatttctttcttttttcgaccaaactgttcgggaaggcccaaatacttaccccacctccttgatttggtatattcaaaagagtttttagacgtaattgagtagagccataaacccgggagccaaaagtgattaatgatttctgaacatttattttatgtcccgagtaatattcataaacgtcaaaaacatcttttagagcttggcagttttttacattagcttgacagaagaagagtgaatcatccgcaaattgtaaatgcgttatcgcagttgcaccgttgccaatacgcactccacgaatatcaccactcaatgctttagttttaatgagatggctaaaggtgtctcc

SEQ ID NO: 17606 - DNA, 1281 bp, Arabidopsis thaliana landsberg
aaagcagaggacatgtattttgcatattaaccactgagatactaagttgcacaatgtagctgactatacccgatactgaacacattattaagagggtccataagctgcggctgttgttgctgatgttgttgatgttgctgttcttgttcttgttgctgaatgtcttccaactgtggaaacgaaagagcagctccggccgtagcagccgcagcattaggtggtgtatttttagattcaatgagccgccacaagtaccaagacgctactgatctatacggacgccatttctcgcaaagctgctccattttggatggacgaggcaaatcctccataccattaagcatctgcacacccttccttacaccaagatcattaactggtaacacatcaggtctatgaagagagtttatcataaacatatggaccgaccatgacccaatcccattcaccattgttaacatcgtgaacaaagatttctcatccatattcactattccagaatccgacaagatcccattttgatatttcctagcaagatcatgaaggtaactcgctttacgcccggaaacaccaatttgacgaagctgttgaggtgttaaaggcaatacattctctggcacgacgccgttttcaccgccgcataaggcaacgaagcgtgtgtagattgaattacctgctttagctgctaattgctgataaagaatgcttcgaatcaacgccaagaacggagtctgaaaagtctcgaacgttggtggtggatgaatgtcgattaaagacgcgagcagaggatcaacacttcggagatggtgaagagctgcttcaagctcgccttcacaagtgagagaccttgcttggattctcggcacggttacagtgcgtgactgtgataatttactcttcgttgccggtttcgtcgtcgtcatctgagaaaggttatgctccggattgaatccgtcggaagcgtcgtcgtcgggtgaaagttttctgatttttcgaggacggagagggatcttggaaggtggagacgatacattgcctaattcagtgacttgtggtgcttcaatggtggttgatgagacgattgagccagaaactccggcggatgaggcggagtcgtcatcgttggtttccggtggaattggattaggggtttcgtgattgggtgattccggttggtttggaggaagagtatgagatgatggttgagaaggtgaatgttcacccatgtgaaattgaagatttcgaattgatagaattagggttttggtcgctcagagcgaa

SEQ ID NO: 17607 - DNA, 1599 bp, Arabidopsis thaliana landsberg
aaacgggttattagatcgtttgattcaaatttaggatataatttatttctatttatttatccatccactgattatgcaacctaaattttaagttcaacgtgatatccacagctatctctcttctatcttttttttttcgttagtgtgagttactttttagactcgcaagagagacaacaatggtggcagcagaagtgtttgacccttttacagccgtgaaaaaaggattccaaatctttcacaatatatgattcccttatgactagacattctaattaagttgaatttgtatgaaagctacttttggattttctatttattagctaacagtaaaaaagcatacaaagctatatactaattatctatctctgtcaaaccccagtatattaattgagtgaataaacgctaaaacggaattcaattgcaggttaaatgaatgatggaatatacagcatgtggcaaagaggtagacacaaaataaagcagtagatatttttgcttcatgccaaatatgttttggacttggtgttctagaagtctaatatgatatatatatatatatatatatatttttatgtacccaagaagtctaatattaatattaacagtaatagcagtagtagcttttctttacaacatattagttgggttgtactcatttaccgtccgtaatcgataaaggatgaaactatgcctaataacgtgatcctccatggaaatgatcaattaaaactatactgtttatatttctatcaagtcataacatagtgtatatgatatagttccaaatgcaatccatctaactagattacttttatgattttaaatatacttgttagagatggttttctgattccaggcagagagtatgatgacaaagttataaaataagacaaaactgtgaactatatctaacacttctacataatgaaaggtaaaaatttattatatattctagttcttacatattatgatacatacattgtcatagtaattattcaaacaacatcgacaatcttcttgttgtccctaaggatagtctattaaatcattccatcgatttcttggacgtgatctcaacatcatcggaggacttgtcctcctcaaagtcttcaatttttaaaccgaccttgtaccggtatccccgagcacaataccaaaagtaaaccagattaaccacacccaaaaccgcaatcagataatagaagtaatccaattttcccgcgttgagattcttgtttagccaatccggacgatcatgcccaccggagaatttatgaacgacagtcacaaggaaactactaaggtagctggaaccggcgaacgatatagagaagagagaattagcgatacttctcatgtgctctggaaactgactgttgaagaactcaatttgtccgatgatattgaatgcttcacatagtcccatgagaattagctgcggcgaaagccaaaacaccgacattggagtcatccccgttggatctccggcattgatggagcgtatgcgtctcatacgctccacaatgcccgcaacgatcatagaaaagatcgcgaaaacgatccctgttcctatactttggaggagtgtgattccgg

SEQ ID NO: 17608 - DNA, 1257 bp, Arabidopsis thaliana landsberg
  unsure (1)..(1257): unsure at all n locations
acgagtacatatagtacaggtgaaatcttagatatgacaattaaaatacaattacattatcttaaacactaaacaaaacaaataatattaataaaataaatataatttaaatttaaattatatagttataatctagataannnnnnnnnnnnnnnnnnnnnnnggaagttttttacagttacttttggatcggctttaacggttaccgggagtagatctcggacggtttcgtcggcgatgtggggcagttctctcacccagattgtgcgccggttatctccatgtcgtggcttcctccacaacgtgatgcaactgctcagttttcacagaacaacaatctctataaaggcaattgcaggaatccgattcatttactccttctcttcgctattcaacgtattcaatttcctcttcgattctataaagtacttgctaaaatgggtgacaatttgagaagggcggttcaagagattaatttgggggtggacgatgtcccatatgcgctcccgccggaggttgtagcgaatgcagcggcagagcaccggttccttctaatgggtcgtctcgtgatgccacggcgacagaacttgcgatcaatcatagcatcgatgcctcgcgtccatggccgaattgttggagggaaccaatttcaattcatcttcccgagtgaagaatcgctggacttggtgattcgaagaggaccgtgggcttttaatgacaggatgctgattcttcgccaatggaacccgcttgacaaccaaccactcatcaacttcattcccttttggattcagatccgaggaatcccgtttcactatctaaatcgcgaagtcatttcacacattgggagatcgcttggaaacctcatggaggtggattatgatgctgaatctgcggcgcgtgtggaatttgtcagagttcgaattgattgggacactcaactccctcttcgcttccaaaggcatttccagtttcaggctggagaaaacactctgctcaggttccggtatgaacggctgtgaggtttctgtgaagtttgtggtttgttaactcacgacaccggcgcctgtgtgactcagaacggaggagaggaacatcactctgatgatgacaatgatgaagacgatcttccccctgcggagcaccacaaccaaggagtcataattcgtgagatcaatgaagatgaggaaaacggagttccagatcagaatgtccacaatgctaatgagggggcagaggatatggatgcccatcatg

SEQ ID NO: 17609 - DNA, 1136 bp, Arabidopsis thaliana landsberg
taattttattatgagggtcaatcaaaacaaatgttttaaaagtattttaaaatggagtgttatttattgttagtaacttagtatacatgaatggcatttgccacgccaagaaaccaaaaaatgcaaaagaattgtgggatagagtttttagtatttaaatgaatttatagacccattgtagctcttctagataatagtattatttttgatgttgtttttgtgttcccaagttcaaaatttgatgagaaaagatgatttatgcctcatagttttcgaaccaaggggagagacatctgcaactttcttgttatttttttttaatagatttataggcaatttaactacaactaccgtaagacattttttattttaattcaattgacgatgtaggaaaatattttcaaacttttgatgttactgaaatatttcatgccttgtatcgtttattaaggaagtgttagaatgatcttttagttaatttatacttttgcacaaaaaaaagaagttaatttataccaaaataaataaattaaactcattatatatgtgatatttcagatgatttcaagtatgattttttttcttcttttcagaaccaaactaaaagactatgataaaagtcaattttacattatcaagaataaaaatttactatattactatttttagaaatggaagatgcaacccaatattttaactggttgttgaaaattaaaccgcgctaattggaatgttggttgaataatgggccgaacacaaaagcccaaattgataaaaaggttaaaggtttttgaaaagcctattcgttctaaaccctaaaccggagcaaagcgttagctgctgtctcttccgtcttcgtcctccgacctctgtctttcttctgatccttcgaaaaagctctcgtgagtcactactcttctctaatgtctgtacatgtcaaggtacataagcttattattacttcctgattatagttgcaatcactttcctttgttgattctatacccttacttttgacattttggcttacctttgcttccgtctcgataagctcagttgtttttgttgacaattcccaattttttagattaggattatcataaagtgtcaaactttatttaatttaaactcttttg

SEQ ID NO: 17610 - DNA, 1818 bp, Arabidopsis thaliana landsberg
ctttcccagctcggctcagcccgtctatcagagtagtgaaatggatgacaccgggctcaactcctacttccctcatatgattcagaaggttaagagcagcgagaggcttgtttcctgttgctagatgatggaggaggatgttgtatgtatacaaatcaggagaaaacccgtctttaaccatttcatctagcaatctataaagccgatctgttttccctaacctaaagtttgcaaacattacaatgttgtaagtcagaacatctggcgtaaacccgtcttctaacatctgctcgtaaacccaatcaatcagcttgtactgtttcacccctagcaaagaatgcaaaatggcattgtaagagtgtttataaggtcggtaattgaaagttttcgacttgatgaactgctcaacaacatctctagcaaggcctgcttccccgcaagtacatatcaatagattaaacgtgcatgctgttgttggataaccgtctttgatcatctcatcaattagcctgcacatggctttatactcaccacattcagcaaatatcttcataagtaaatgataacaattcgcagtgtgcctgaaattctcttgtccaccacaccacacaaagaacttgtaagcgagcttagcacaccttgttttattatcaaagctcagagttcttaagatcccaacaagaacctctctcactaatagccctgagattgtaacattcaattcatctaaagctgatttcgtattgaaaccgggacaatcttgctgtaacgtatcaagaacccgagacgcaccgagtgtagtactctccataaaccttcttctaacagagattttctcaccattttcctcctggtcaaactcacaatccatctccgaagattcccaagttatcttcaagggctcttccgtcccattctcgcttacatcaccaccgatgctaccattgcaaaatttcctcgatgtgaagagaaagcgagaagctttacgaaccgcaacacttgtgctataatgaattacagagttcatatttgagcttaatccaaaatagatttttcttcatcatctctggaacttaaaggaactaagcagacccgagaactctaaattcaaagacgaaaatctcaccaccgcgagcctcggattcgcaaaaccgcaaaaatccatcaactattggcaattaagcaaattaaaatctagatttctacgaattccatctgaaccgaagattaccttgacgaagaagacgagttcaaggggtataatggtaaaataactgaacctggatcccaggttctactcagacgtctctgccgctgctctttgtttttgagaactaccgagaagagaatcgctgaaccgaatccacattttgaagaggatccgacccgacttttatgggccctaaaataaaactggcccatcccaaaccgttaatcaacgtgggaaccactttttgttttgctatatacctataccttcaaaacttttaatttcggttaaactagttgactagagaactcaaaagtggtgtccggtgatcggcgatgttagcaccgggggtgagtgttctgatcccggcggaggagataagtatctccgctggtgatgttatctccttgtcggtgcacaatctaatagcttctgtttctagctaccgtccatggtggtcagaatttctagcattcggttccatcgaccgtccaagctctttctccccctctgtttcgcgcgtaaacttaaccttcaccactttgcggttaactacatacttttaaccgctgcttccatcacactcttcttgatcggtgatccgatgg

SEQ ID NO: 17611 - DNA, 1824 bp, Arabidopsis thaliana landsberg
  unsure (1)..(1824): unsure at all n locations
tatcgaatctagaggatcgtagattttatgtataccaatttatatatatgctactttactacacttaatgtttgtaggcttgtaatgtgcacttaagtgtaggagttgcttgaaacccttagttgcatgaattcaggattctttttttagatggatactagtatgctaggccgagtagctgctttgctaataaggatctcagtagaagtcgagtgatttttctagcactcgcgcgaggtcaggaattgattgtatttatcttgataacgggatctatgatggtctttggacttggatccagggaggatgccttgtccatgagatgggaaaaggaattaaggattaatgtgtggatacctgagtcaagcatttgaacgtactaaacacatgttgtgaaatatggtaaccggtaaacctagtaccttagtgaagccgggcgtcgtcttttctccttactcgttctgagactgggtctcccatgctagctatggtgggtacaagtgcggtcactgcacggtggcagccggggtcagtggagcattgtatgccaaggcggtgaggcctagacacgaacggggaatcgatggggacggttgtcatgtgcagggtcggagtaccctgacatgtcgtgtgtttaggtttaccttgcaaggtttaaaagtcgatttgaatcgtctgcttctcgcagctaatgagactgcttgattccttgtactgcatcgagtaagaagtgaaatgtggactatatgagataatttgttgattgaactaattgattgttaccatgtatgcttagaaggagcaaacctagctaagttaatgatgatagaacttaaaaggctaaaaattgattttagagacagctagtgcttttggcaaaccaaacccgtcagccaaatagttgcatggtctagaggtagaggaatagattcctcacaccaggtaagtctagctgagtattagtatactcagccttgcttgtggcataatttttgcaggtacgcttcaggatatagttgatggtgtgacttggcctaccaccctgccaccgggttggacggtcgagtgggatgctgctccggtaggagaggagcaggaagagtagtgggctaggccttgccctattcctcgctttcgacgatatcgattatccgctgcagtttattttatgaacttatatcagctacttgaaaaactccgatttatgtaataattccagtactttaatttgaggttttcctgttttattgtatttcttctgtgactcaccatcgagtgagttagtggtattcgatcctggatgagtggctttatcggactagatccgagggactgacgggttattcctgtttaagtgtgttgctgaccttaagggtgcgacttgggcacttaagctggaataattcggccggttccgccacaccgccaagtacgaagaagnnnnnnnnnnnnnnnnnnnnnnnnnnnnnttcattgaacagattcatatctagctcagcagaaagaaacttgtcattctttgaaatactaaagtcagctgaattctttcagtggggcccagctcaacagaaagccttcgaagagctgaagcaatacctgattgatctaacaacattaactccacctgcgccaggggctccgttactattgtatgtggcagcttcgcactctgcagtgagtgcggcgcttgtgcaggagacattggaaggaaaatcataaagcaagccccagtatactttgtttccgaagttctaagcttatcaaagaaaaattattcagaattggagaaggtgctgtatgttgcctaatggctttcaagaagct

SEQ ID NO: 17612 - DNA, 2312 bp, Arabidopsis thaliana landsberg
atcgtctttatttttcattttaaactttagtacgttttgggatttgtgaatataaatgagaagacgtggtttaataaaataaaataataaacacaattattaggaacttttttttgtttcatttgattgtctgcaataataacaaatgacattttatgaaattacttttattaatttaaggttgtgaaaatttaacaaatatgtaaataggatttgttaaagtactatattaattagttggctaaaaaaataataatggcatgagtccagctgggtgattctgcttcctggctttgctcacgcctaactggaaccgcacgtgctccgaccacaatagccaaattgctgtttgttatcttatttccatcctttttaatattactaaaaaatgttttagctagcttccctaattatgtggatacatttttttaattcacatcaatgaatttgggaaaatcaaataaacatgtaatttttggaataatttgttcgtcattttctaaaatccaatatgaccgtttttaaactctttagatgctatactaggttaaaaaattatgttaggaaaatgagatcagtttcgaattacgttttgtattaatgcgttacaatatgaaaatgtgcaatatgtcgtcataaaaaacaatgcaaaatctttagtatatccagtttttatactgattcttaattcttacaacgctttttgtttttgtttttaagatacaaatttaaattaaagaaaatacgaaaaaaaagaagaaggaaagatccgaattcattgaacagtggacgggagggaaacaacggggaagggaccacagctcgtgcgttacataaataggacacgtggaagctgacttccagaaataaatcgatcacacgtgtagacacagaccacacgtgtggagacaaatgaatatttgaatttatttatacttaatgaatgaaagttacagccaatccgcttcagactcacacacacacccaaaacaaaaaaaaacaaaataactaaaaagaaagcttcgtctctctctctctctatccctcgtgcgccagtctgacaaagacttagagatagattcagagattcagagctcttcaatggccgccggaggagagttttgaggaggaggaggatcatcgtcgggacgtactccgacgtggaaagagagagagaacaataagaagagagaaagaagaagaagagccatcactgctaagatttactctggtcttagagctcaaggtaactataagcttcctaagcactgcgataacaacgaggttcttaaagctctctgtctcgaagctggttggatcgtcgaagacgatggcaccacttatcgcaaggtaaaactgaaaattccggatttcaatttttagatcggaatctgagcttctctcaattactcataattcaatcgatgaatctgtgcgattgttgtgtttgaattcaatcgaattgttagagactcttgagatcttgcgatttggttttcacttttcactgttcgattgggttgaattttcaatttccccctatttggattgaaatctggtcttcgtagtgattagatctgattatgaattcgatggtttctgctttggatcatctaattctatagatcatgtaagtttgattattgagaaattttggggaaatctcttttgcttcttgagtcttgactaaaacattgactttgacggttgcatcatcatgtggttttgatttagtctagtcttggtcactaaaatggttgattcttgtggaaacaggggtttatttcccagcatcagatgggtcaggaactcctacaaacttcagcacaaattcatcaatccaaccaagtccacaatcatcagcttttccaagtcctgcaccttcgtaccacggaagtccagtctcatcatccttcccgagtccatctcgctatgacggaaacccttcttcataccttcttcttccgttcctacacaacatcgcttcttcgattcctgctaaccttccacctcttagaatatccaacagtgcgcctgtgactcctccgttgtcatctcctacttctcgtggttcgaagcggaaacttacttcagagcaattaccaaatggcgggtctttacacgttttgagacatccgcttttcgctatctctgctccatctagtcctactcgtcgtgctggtcaccaaacgccacctacaataccggaatgtgatgagtccgaggaggattcgatcgaggattcaggaagggggatcaatttccaactaactgttctactttaccaacatttaaccctgtcagcaaacttt

SEQ ID NO: 17613 - DNA, 4862 bp, Arabidopsis thaliana landsberg
  unsure (1)..(4862): unsure at all n locations
ttaattttcgatcggcggcaaccgggtattctgggcaaggccatgctgcagctaccgcgcacgctcagcaattctatgctgtagcgaccgtgcacgctcagcaactccatgctgggaggactgggtatgctctgcaactccatgctgcagctaccgggtacgctcagcaaccnnnnnnnnnnnnnnnnnngtatgctttgcaaccacatgctcaagctgttgaatacacaatgcaaccacatgctcaagctgttggctacatgccgcaataccatgctcacgctgttgtatacagtcaacaaggtgtgacgcaaggttctgtaccaagggctcctgggacaactgattgtaatgctgcaaaccaggcatattctgcaacaggagattggaatgcagtgcatcagtcttattaccctcagacagcagatgcaaccacaacctattatcaaacatcttaaaacgttaaagcaaagtgttgctactctggtatgccaaagaggattctgttaagtctcgtgtatttaaagcattgtttcggttcaggtgagaaacgatttgctgaaaacctatttgcattggtattgcaggatctgagaaacttgtgcgtgatgggtgcggaagcatggactcgaactggtgcactcagtggaaaagaaggtcaaggacataaaactagagtctccagctccgtttactgtaagtttaaaagttctatgttacggtttgatcatattcatttctgagctgcgcatgaggaaattcctcaaaccatcaaaacttctttaagtcccgtttcaggagtgcaatctgaaatgcaattctgattgggatttaaagttaataaaacatattataactctgttatcattacttatgctaaaacatttcttttagtatggtcatgtttaatacttgggatttgctattaagaatactaccttcaaaaaggttcatcttaaacactctctcaaacgaaacctagggaccaagaatatgcttattggctctaagattaagtggcctaaaccctaagccatatctattggtagacaaaaaagaaaagaaaagactcctaagtctcccactatgtatgtttgagcacttgcactgcaattcacatgttctttgttttttctctttctctttcaaaaaaactttttatctatttctttcttctccaataaaaaagattttaaaagacacctatctcactctttccacctactttgttttgtttgctacagaatttacttaaggctctggtcttgccctcttgtttctttttttttgggtcaagggtcccgtatgtttacagctttgttggttgtgtcacagatcatcaaaatattattgacgaaggaaaaaatactgaaattgggaaaaacatgatcagatccaactctctgaattgtctcgaggtctttttaattggaattgaaaaatgcaaattttcctgataaatttggagttaacgttggcttctttcaatagatgtctattatattatctttatccactttttgaaagttatagtccccatctatcatcatttactgatatgatctgtgggatttttttctacaaaatttctgagttgtgtgaaccttacgatttgtgttaaagataaacaaagtatgacctccatggtaataaactactaattatctttgtaaaatgttctcacgtgaaactctctcactatttcctattgctcactttatgtccccatagcaacaacgacttgtactcgtctgaaaatttctcaaatttcatgtaaataataataataaaaaaattattacaattcttcgctaaaagcatcacagatccagttggcaaaaagaattatatatatactattagtgcattgcaaataaaattattaaagaccaactgtttgtcatataaaatattataaaggatttcatagataatatgtatttgatataacaattataatcgataacaatattctgatattgtaagctggaaagattatgtcacagaagttaattgctctaattaaatatgtctgaggttaatctgatattgaccaacacgtcgtttactacaataaatacaaaaaaaaaagagagcgaatttctcagaaaacagcttaacgtttcttggatatttcgtaagtcaatattaatcaaatgaaaacaaacaaaaaaaacctatataagaaggagacgctgtaaaacagagcgagtcaattaaaagaaaagaaaaagcgcgacttagacaagtgggtcccatttactgctctcccagattatcattttcttctgaatcttcttcttcttccgaaattcctcacaaaaaaatgtttgtctctgttgttcgatccaggtacttttgaatccgcagttttttttgttgggaaatcaaaaattatggggaattgttgctccgatgtcgcctccggtgctggtgctacagccggcgttggtggaagtgcttcctccgccgctctcggtgcgactaacgacgcccttgattactatctcaagtccaaaggtttcaacggactcttctctcagatagaggttccttcactatcatctatctctcgtgttttttctctacttccgccaaaaaacgtttaacaatgatatatgtgtgcttcgtttgaaagaagaaaactgcgaaattcgattttccctgtatattctgaggattcatgtttgatactgttttttgttgatgcagctatcgttttcagcttcgaatttgcgagaccgcgacgtgcttccaaggttactttgttattcaaaattgaattagtcttcatagctggtcattttagttaatgacaaactttttgttttttgtttttttgcagagtgatcctatggttgttgtatatcaaaaagaaaaagatgcaacactttcagaagttttccgcagtgaagttgttttgaactctttagctccgaaatggattaagaaatttatagtcgcttatcatttcgagactgtgcagacattggtgtaagtttcttattatcttgtgtgacttgaggaaagagatgaacctttacctgactctttgtgttggtttctttatactcaggtttcgtgtgtatgatgttgacaccaaatttcaaaattcaagagaggaggtaattgtttatttactgcctgcattttcatttgatctgatgttcacttttctcaatatgttaatacttttcagatgcttaagcttgacgaacagcagtttcttggtgaggcaacatgtgcattgtctgaggtatcatttttgacattgacaatatatgtgcacttgtttttgctggttctctgagaggcacatcagaaattttgttttattgcctagcttataagagagagagagagagaatactttatatttaacttttcaaccacgcagataatcacaaaatcaactaggacgagcacattagaactcaagcgcaaagatggctttgctccacaggctcagcctcaccacggaaagcttatcatccatgctgaggagtcccttgcttctaagatttcaacagagatagtatttagatgttcgaatttggaatctaaggatcttttttcaaaaagtgtaagttttgttgtttattctctttaccattttaataaaattctagttctgacatcaatataacactttttttttgttgtggctcaactttaggacccctttttggtggtatcaaagattgtagagcatggaactccaattcccgtgtctaaaactgaagtccggaagaatgatcttaaccctatttggaagccagtctttctaagtgttcaacaagtgggaagtaaggtaaaccaaccaaaggggtttattatatctgagttttgtctgaccaggaagatgtattagtttctcttttgtaatcttgcaggacagcccactggtaatagagtgcttagacttcaatggcaatggcaatcacgatctgatagggttagtcacaaaatctcagttccttgcattcttttttggttgagatatgaaaatgatttgctgaagctgagatgattcttgtatcttattggttttgccagaaaagttcagaaatcactgtcagacttagaaaagcttcatttggctggccaaggaatcaatttagccttacctactggtgttggacataaacatgaagatagggtatagaccttcaacaacaagaggtttttacacaatttaaaatgcgagaattctgataacatttagcattatttcaggtattaaagagccagcttttcgttgacaagtttactgaaaccgtccagcatacattcctagaatacttggcttcgggatttgaattgaacttcatggttgcaattgatttcacaggtaaaaagatctgaaaagtgcagagtttttctagactctctctctctctctttaaactaatccaatttgtcccttcttccatcagcttcaaatggaaatcctcgcctgccagattccttgcattacattgatcctacaggacgattaaatgcctaccagagagtaagaactcgatctattcaagttaatttgcagaagctggtgactgtgtgtgatctttcttctttctattcaggcaatagttgaagttggagaagtgttgcagttctatgactcggacaaacgctttcccgcatggggttttggagctcgtccaatcgacatcccggtctcacattgctttaacctcaacggaagcagtacttattgcgaggtcttgcaacaaatcctactcacattgaactaacttttgtatcaaaatttctcaattaatctttgttatttgattggttctcaggtagacggaattcaaggaatcatgaatgcctacaatggcgctctcttcatgtct

SEQ ID NO: 17614 - DNA, 1891 bp, Arabidopsis thaliana landsberg
tcacatagattattaatatcaggaaattgactatttaccaattctaaatcattcatatgtgtgcaatggagaagttgactatcttaattcttaaactaaaggatccttttcatcagtcgaaatttctaaattatgttggttaaggttccatcacattgtcaattaacataatttctgttaaaccgaaatgaattggtcattgagtcgaatcggattaaggttcaacatgatccatgatctgaccggattcacaaaattctcatataattgtagtataaatttttttttaaaaacagtctcaacggttttatgttttggacatgtataattatgtaagagagcccatgtccagataacaaatacttgagtaaattctgtaataattattgccaaaatatttgaagaagtaaactatgaaattattcttatgtattgggaagtgtatagtacaaagtacaaactacaaagtggttacaaacagatctgtatggttaataacacaaattgacgagtgacgacatttatagaaataacttcacacgtaaagaccaaaacagaacgtaaatgcaaagatatgaggtagtaataaatttgtttgcatgcatggttaatatattaccgaggaaacaatggttcaacatctgaccgcgacgaagatgttgtagcaatgctgtattgagatgatgcggcggtaacactcacgtagtttctcgactctacgttaacgtccactaatgtttcttttttttcttcttcgttttcgctagcatactcatacggctgcatatcttcagaatatgaacgaatcttctccaattccatcgatacttgtctcatacttggtcgtttccttcccttcatattcaaacatttccttgcaatttttgcggctgctgtcacttgattcaacttacaaccatctcttattcgagcatcaataatgtcggagagtctgttctctttcattgcaagagtgaaataagttaccaatgtcctatattcctgagatcgcagaaaagagactgatttttctccagtgattagctccgctagcacgactccaaagctataaacatcacttttgtctgtgaattggctcgactggaaatactctggatccatatatcccaccgtgcctgaaactactgtagtgaggtgggtatgatccacggtcaccgttcttgaagtaccaaaatcggacactttggctcgatgtttctcatctaacattatgtttgtagacttgatgtctctgtgatagattggagatgatgcagccgagtgcaaatatgaaagcgctcctgcaatatctacagcaatacgaagacgcacttcccaagtagtcatcgtataatcatcggaatcatcatgaagatgctcaaaaaggttaccattaggaatgaattcgtagactagaatagggacatctgtctctaggcaacaccccaagagttttacgatgttcctatggttgatttgtgagagaatgacgacttcgttgatgaactcttctagcttgtcttcgtctacgactttggacttctttactgctactattctaccgtctacaagcattcccttgtacactgtaccttgacctccttcgcctagtattctggttaagctaaagttttcggtggctttctccaactctcttgagttgaacactcttgtactgtccacgttgccttcagttgtagtcaattgttgttgcaacaataaacccccattacgcttaaagaatttcttcttttggtttaacctcatttgtcttctaataaatttgtataaccagtatattccaccaatgaataccaatgtgctgaaactagtgctaagccctacaaacccacaaaagacaaatgaaaagcaaaatacattttctatatgc

SEQ ID NO: 17615 - DNA, 757 bp, Arabidopsis thaliana landsberg
ctgctattgcttacttttgtttctttttattttttgtactattttacttagcttaattcgttagccattagtatattgcatgattcgagaactttgtgaattcgatccctaagtgctgcaactgacctttttatataagagtgtcttaggattaatttgacctacataaaactccacgattttctatactcttccggctaagataggtagcttgattgtcccgagagatatggctgtattgttgtaaaagcaactagtggtaatagcagtcctactatatcagcccgacttattcccattctctctagagtgcttaagtatattgggtccaccaagcttcctgtatcaataagaattcttgagacttcaaagttaccgatatccaaggtaatgaccaaatcatcatcataacgtctttcgaggtggcaggtttcttcctcttcgaaggaaattaaagtgtgcgggatgtttacctcttcgctcaagctttctttcaacaaaacgttttgcctatacatcttaatggcactgactgaatcctgacaaagtttggatccttcaagtattacgtgtattttcccttttgaacttctcgactcttcgtcgttaggttacctcggcctcagtagagcttggttttcgcaggtggctcttgcttcatggtattttgtgataaaatccttaatattgaaatttgcgagatctctacttgcacatagctccgttaaatgcctcttaagaacactacaatcctttg

SEQ ID NO: 17616 - DNA, 784 bp, Arabidopsis thaliana landsberg
taaaatttaaaaggacaaaactaatcgggaaacacaagggactttggaagtctttggttcttgcttcaccgttgtttttgttcagaaaggacgatgtaaaaccggtgccgttggccattaggaccaccggtgtgtaagtaggttggttgatactctgaactctgaatactaggatattataacaatgtttagttcgtacgataaaataatggtttagacacaaccgtttatgtttgggtcaaagttacaaaatttgcgtcacgtgagcagtcgactgaaaatcgaagatagtcaggcgtcagtaggtagaccgagccacaactgtagtatattgtattagcaatttagcatacgtaacgtacaaatacttgttgttttagtattttggtgatgttatcgttttgtgatttaaataaaattttatttgtttttattcaatcaaaattctaaatttttttatcaaaatttgatattactagtttaagatttgtaaaaaataatctaaaatcttcataaatctgaaattattggattcatacttttataaaattattttgaaaagtttatattatttaattaaaacaaaataaagtatgattgctaattaattaaaattattgtattattgatttatgactttctaccatttttttgcgttaaattctatcattttcttcacaaaataaaatcatcaaaataaagaaattgattgaaaaagtttcaaaattataaaaaactaatcaacaatattatataaaactctgtgtttaaaataattcattta

SEQ ID NO: 17617 - DNA, 1065 bp, Arabidopsis thaliana landsberg
attatgaatgtttccaaatgaaaaaataattaatgacccttgtgcacaatttcccattataaattcttgctttgttcttctattcaaataatattttaattctcccctcaaaaaagtagtatctcatgattttatatccgcgggaataaacattgtaagaaaatattttgtaaagacattcatcgtgtcctagtacaaaccaatacagagttccaaataaattcatgttataaatcaatttaaatataatataactatgttataagattgatgataatccaatgttatataaatccaacgaattaggaataaagagttttcttggacttttagttgcgtattaaaaaaattaataatgtccaaaatataactgtcagctctatattcttcaacaaagtgtttgtaccattatttcaaataacttggaatttaaaacatgtttccatccaaaagtaagaaaattaatctcttttaaaactttgtaagttatgtcaaaggtgaaaatgaagctaagaaatcttgttgtatactaacagttaaacttctacttttcaaatgttgatcatgttaagaattgcaaatctaattcttcatcaacaacacagaataaaagcaatagataaagtaagcataagttttataattgttcactcgtgaaagctacatccactttcttccactgcagatttcaatccgataaaagaaaatcggaagctacaatttttctcaatttctcgctctaccgctctctatcttcaataataaaaagtggcgagtacaacaaatacatataaagaaaatatttaggaagattaaatatgggccaaaaaacttctcgctctaccgctctctatctttaagatactcttgctaaaaccttttaaaaacatagctcacaaaatagaacatacgttaacataaccaaccataagttcatagaatataacatatcttcacagcttcaaccatacgttcacgtaatcagctataggttcacataaagcaccatgtgtttacattgagatttgtttcctcaactcaacaatttcccacttggaaattaat

SEQ ID NO: 17618 - DNA, 946 bp, Arabidopsis thaliana landsberg
ctgtgatattcatctttgagtacgtgtgattcatcaggatcgaggtggctgcacagtggaagacttctgtaaccacgtccacaggactctggtgaaggatatgaagtatgcactcgtttggggcacaagcacaaggcacaatccacagaattgtggtctttctcaacatcttgaagacgaagatgttgttcagatcgtcaagaaaaaggtacataaaacgaaaatctttccattgacatactctcattcaaatctatgattatgatctctgttccttgatgagactatctaactttgtactgctgattctggaatctttaggagagagacgaaggaggaagaggccggttcaagtcacactcaaacgcccctgctagaattgcagacagagagaaaaaagctcctcttaagcaataagcttttagctgataagtcatctccatacatccatctccaccatcatagtcgtggatggtttcacctgagtaagatttactatgttgtatctgaatccgttttgttgttttctctcacaatataagttttggaacaattttacttttttgagatacaaatggaagtacgagttcctatttaccctttttggtaagctaagtttttgatttttgtttacaagtctgcctttaattcttgatatcttattataaacaatactagcattcatatggaaggttaaacaaacaaggagaaacgaaatcgactctgattccaagttattgagaagtggcctaagtagccaaattacaagctcaaataactcatcaatattcttatatatgtaaacggtacacagaagctgtttctgtatctatagttcgtgtatacgtttcacaggaaccgttcctgaaacaagacaaaagataaaccaacaggctgttgaatatggcttgacaagaatcatcatggcttgctcttttagcttcgc

SEQ ID NO: 17619 - DNA, 1280 bp, Arabidopsis thaliana landsberg
catagagtaattaagaaatgacttagaaactttgtgtccctatccaaagtgatcgactaggaactttttgaaggcgcaccacttccttgaaaaacagcttggccatgttggatgcatcagcggtcttcttgcatgcaatgaaatgtgtcatcttggaaaatctgtcaactaccacaaacagagaatccacaagccgtagtgtacatggcaatcctaacacaaaatccatagctaaatcttgccaaataccatcaagaagaggtaaaagcatacaaagaccaatattttgagattgaccttttgacttcagacatgtataacaccttttgacaatagctccatcgtctcttctcaaatatagccaaaatatctctctcccatattagcaatgtttctacgtaaatgcccactaataccacccccatgagaatcttggatcaacttctctcttagtgatgagcaagaaatgcacaatcgatctcctttgaacaagtagccttctcggacatgaaaatatgcagaaggatgcttctcgttgcacttggcccaaagttccttgaattcaacatcattttcatacaactccttcataaactcaaagcccaaaatatcttgtgttaaagtaagtagcactgacgctctcctactcaatgcatgtgtcaccttattaagtgcgcctgacttatgctcgattataaaaggaaatttttgcagaaaacttatccaacgagcgtgcatttgtttatcaccttttggctgtgaaaaaacttcaaagcttggtggtcagtgaagaaaatatactctctctgaatcaaataatgctcccactgccttagagctctaaatactgtatagaagttttgatcataggtactccatttctgtcaagcttcactcaatttctcactgaagaaagccactagtcgtttttcttggagcaggacaacccgtactcccactacactagcatcacattcaacgtataacgcgttgtgtaatgctagaagtggtgaagtgcaaagcttcttttaaataagtctaaacttttctcttacttgaaaccccaatgaagagttcctttcttcaaacactcagtaataggaggagtaatagtactaaaatgtattataaatctcctatagaaggtagcaagaccatgaaagatgtgtacatgagaggatgatttttggacagaccaatccctaacgcctttgtcactttatcttttccggcaaaaaagcaaaaaaataacatcttattagtgaatgtacacttttcgg

SEQ ID NO: 17620 - DNA, 860 bp, Arabidopsis thaliana landsberg
  unsure (1)..(860): unsure at all n locations
aaacctaacaaagtagaatccaccaagattcatgttatgacaaaagcatactaatttacacacaaacatatgtttcctaatgggcccatttgatcccgaatgatccagagattatctcatccttctttgctctcactcgaaaccctcttcaagctctgcaaatccgagattcatcnnnnnnnnnnnnnnnnnnnnnnnnnnnnnnnnnnnnnnnnacaagaccagaatctcatctcaatcttcatctcttcgtcttcttcgtctctctcttactcttcctctgtttttgaacgtgttccttctcctggaacttatctctggaatcatttgattaaagggtactcgaataagtttctcttctttgagactgtttcgattctaatgcggatgatgagaacaggtttagctagacctgatgagtatacttttcctttggttatgaaagtttgttctaacaatgcacaggttcgtgttggttcaacggttcatgggttagttttgagaattgggtttgataaagacgttgttgtgggtacaagttttgttgatttttatggtaaatgtaaggatttgtttagtgcacgtaaggtgtttggggaaatgcctgagagaaatgctgtttcttggacagctttggttgttgcgtatgtgaaatctggggagttagaggaagcgaagagcatgtttgatcttattcctgagcgtaatttgggatcttggaatgctttggttgatgggttggttaaatctggtgatttggttaatgctaggaagttgtttgatgacatgcctaagagagatataatttcgtttncatctatgattgatggatatgctaaaggtggtgatatggtttctgc

SEQ ID NO: 17621 - DNA, 1654 bp, Arabidopsis thaliana landsberg
tatttttcttttgtgcaccaaacaatttggatattcaatttttgaaattttggctatccgtagatggacaaatacaaaccgatccaaacatagaactcactgcatatttcagatggaatttcaacatccaaatctaaaatttcagtacctaatacttagaaaatgtctaaacctaaatggctaaatttatgtacaaattagaaatcacgtgcccattgcccaccattgcttctttgcggcggcattgctaggctccacgtgtcagtcttgaatattaagcaaaactaaccaccacacagaactaaattgtcccccacatgttcttctatgtaatgtttgataaagcctagtttcagttatcctataaaatttactagtctcaaacaaaagtcaaaagctcaagataagaaaaagccagctctattacatgttactatgatgacattggcttaagaatagtaacttatacatacttaaacaactgaatgttttatgtggttattttcttaaatctcattatcaatatagtaaaataattggtagtcctcaggtagcaagtgcaacaagctttttaacttctgtttagtttggtatttataattaagttttcatatgcttaacaatagcgtctgtagtccaacggttaggataattgccttccaagcaatagacccgggttcgactcccggcagacgcaattttttttttttccttcctttttgacagtgaaaacaaattttctcctgctttgtggattctagggtcacaaaactgatttttttcatcatttttatataacttgtatatgaagtatccatagtttctacattaacgttccaaacgttatgttcaagtctattaaacacacaattattaacatacaacatctctcacatcaaatatttatcactagataaggggagcacaggaaaagaatggcatgtttctctgctccaaaccaaaaacgccatctccaattccgtcatgatccagaccttgcttgatacgccccaaacgccttgcatacaaaacttgctcagaaacaacaggcaatcttattctctgatattcctcaagacccaaacttacattctcaggtccacagttctctaagcatttgcctagcacttccgcatcaagtatcgacatgtttgtgcttcttagaccatgaggggtcgtgggatgagccgcgtctccaaccaacacgatgtttccccaaaagattcgttctaaagggtcagagtcgtaaataacattaaggaaaggatcctttgtttcactcatgagtctcgctagttcggggatccaaatggtttctgcttcttgatgcatcttattgatcatttcttgactcacttttagagtaacagagttgctctgatatcgtaattccataacaacaacaaaatagaaatcaagaaaactacacttgtagacgcatcctaatcaaaaagagagaggaattagtcttcttactttcaggtcaggctctggttgattgacataccaaatccagttgagtttcttgttaaaaagctcgtaaaacacgctatgagtctgttcaccgagatcaaaatacaagcattttccaagatccggatacactttcttaatcccactaactgtttccgagttctcattccctgagaaatca

SEQ ID NO: 17622 - DNA, 2445 bp, Arabidopsis thaliana landsberg
caagtcatattgcaggtgctggtggtgctgctcactaaccaggtatgtctttaacatgaactcatcttgtcccctcccacaagattgttactgtaaaataatggattttcttggaaattaggtatggttgcttcactcactcctttgcctgtgattggtgtccctgtccgtgctacccgtttggatggagttgattcacttctttccatcgttcaggtacactttcattgcatcataattaacttcagctattgattttttgcaccatttgaaacgatttaggtctgcgattcttaagcctttccatttattctttttctttttgttaccaaagatgcctagaggtgttcctgttgcgacagttgcaataaacaatgcgaccaacgcagccttgcttgcagttcggatgttgggaatctctgatacggatcttgtctcaaggttctctttcttatcttttcttttgttacatatgagtcagatagaagaagaattagggaaccttaatataaatgagattggtggattttgatttggttgatcaggatgaggcagtaccaggaagacatgagagatgagaacctgaataaaggagagaaactggagacagaaggttgggaatcatatttgaaccagtgagagtgttactggtcagagcactcattgggaaattggggagtgaaccatcacgattgattttgctgctacgaagatcataatagagtgatctgagagttagcctcaattcttgagttagtttgttgttgtaattgtcattgccatccgctttaagtttaaagcatgattcattgggagtcaatgtaattgagcttgtttttccaaaagatgtccatgaaaactgtaagttttaacactaaagagtcctttaacatgtggattttgaaataacactgtttacccaaagatttgagattttgtattttttcaaatccaaatccattacaaattgttgaacccgttaggtctctaaagatggcagaagtagaggttggaaaccatttcgaagagcagcttcccaaactctaggaggattaatgattgaattgtcgtcgagaccgcactcgtgttccttccacccttcaagcgcgtgtactatcccaccaactctccatgcgctcatcactctcctccccagccaattctatagacatacatgtgttaagtacaaattataacctatcttcatcaaatacaaacacttgacaccataaatatatgttctgtttgtgcatgtttgaaatttacgtgtagagcatggttaaaatgttttaagtgtattaggtaaagattagaaaaaatatagtaaacctaaaccgtaacgcaaagaaactataaagactattttactggaattgttgtatacatacctcacaagaatcaatgttttgggcagagagagggataatcatagccggattggtgtggtaaaagcagtcttttcgtaaagtatttatgaggaaattgagagaaaggaagaaatggagttccatcttttgccatcttctgctcttttgtgcttagcccatctgccaccaaccaaatctacatcgtaccgttacatattaatttgtatgtaaacttgaatatgttactatcaatttaatgtcgtttacgcataccattggatagtaattggttgtgagcacaagattttccttacacttatcggccaagaattcggcgagcatggaatgctcttccttgcgcaacaccattacctatttattttaatttattgagcatgaaaaccgattataatttctctgaaatatgaatttatcattaaaatgttttaatatgtatatctttcgcaagctcaaaccaaatcataaaatgatatgccaaaattgttttggacttaaaaagtaggccacgtgactgtagatagttagtggcgtaacgtttatatatggaaactccattgactctatttacgttcgatcctattttcacgcgcaaattggctttgtatattgacactagctagagaagaattaacatatatttatattttcttttttataaaaacggtccatccaaattgaatccttttgtttcactctctccatttgtagaaaaagaaggtaccttgatggcattttggcaaagagaaaagacaatggcacgagcaacttttgtgatttggcctctaaagagaacctctttggtcccaacaggaatgctatgaagcaccacctcagctgcaagactgcctccgtccactatccttatctttagctttggatgcctccttacgtacatttctccatacccatttaattcttcaccctgaggatattaataattatattagggtttattatataaagcatttttctcgtcaaaacttgcaaaaacataagaataaccaattaatgtattaattgcatgcctggttcaatagtcccaaactcattactttca

SEQ ID NO: 17623 - DNA, 960 bp, Arabidopsis thaliana landsberg
acacttgtaatgcattatcagaacgctcaaagctcccataatgttgtttgacactaatgccccgattacacaattgaaagtacatatagccattcccaacgtgaaactgtttttgtccaaaatagctgacttcaacagtcaacattggtgtgccagtgtcaccagagagaagaagacgatcatcaattctaccatttcgaacgcacatattgaaagattacaaacccaactcgaatctgaaccgaaccgaaccaaactagatccgaaataaattaaaaagtcggttcgtatttacaaatattgaaagatccgaaatccgattgggccgattttggtaaacgcccataaaggcccggtaaaatcttatcttcccctaactcataacgatattgattttgaattttgaaaagaagcggaagcaagagcgagcgagagagagagagagacagagagtgatttctgcggagatggaggattcaggagcgattctatgtcagatctccattttcaaggacatgcttgatcaggtttcactattcttcatcttcttcactggattggtatctctcgtctttagcttaatctgagctgtgatcgaatgaaacaggtcaatcgggaaatcgaagcaaacattcaggtgacgcgagagatcgaatcacagatcggagcgtgttatgagattgaatcttctctgtctctcaaggaagctgagcttactagatcgttccttgcttctcaattcgagatcagcggtttgatctccgttacaggtgtttaaattttccgaaggatttgttcaatattcacattagtaattttgatcagtatggttttatttccgtaaaagttgattcaagaaaatgtttgaagaaattggaggatgagatttgttggttatgtaaggaggcgcagtgagctaattcctaggctccccgagaggcggtaaacatcaataattgc

SEQ ID NO: 17624 - DNA, 1450 bp, Arabidopsis thaliana landsberg
agaaatatttaggacaagggccatgaagcattttcgacctagatcaggattttctcctacgatgaaattgaattttagagtcttctatatgctttcttaatctatgaatctgaagcaccagattgcaagtcgagtataccaaatggctcaaagagttgactctaatattatttaccgaagataatgaataagaaaattaagcaatcttggattaagcttaaagagagaatcattacctcatggctcatgttcatactatgataaatcaagaagatcattacaatctaaagtaacacaaatgtcaagttgctacaagaactgaagctagatatctgcataagaaaaattaacaagttgaagagtaagaacgttatacaattaaatcaagcattattcgaaaagagttagttgcgggaaaactaacacgatcaacttctccaacaacagaaaagctaccaaatgtgtttctgggaaggaaattagagaagaagatagcgttgccgagaaagggaaaggcaaaatacaaaacggctatgttttaattacaggtttaaagaagaaacagaagctatgggccgttttattaaaaacccaaacttgaaacgatgtggcataatcctcaacctttatcttcaatgttgaatactgtgtcgaaaagaatcagccaacgtgccgccacattcacaaaatctctgaaacgagaaggatatgtttgtgttcttcgaccttcttcgcatgatttgaaaagacgagttggttgtgtgattgcttctatcaggggtctaggttaattaagctttgtttccgtgaagctaattgtataatcccaatactacgcaatcaagtcaaagctacaagatattgtttcaggtttcggtcctttctcgctttaaattttttaggtttctttaaattggtcttgtctacaagtttgagtaaaaataaattggatttgattttgccaaattgtacgagtgaaactaagctggatgatgaaatggagagagagaattgatgagtgatccaggtttggtcttctctctttataattttactcggtttctctaaatgtctacaaattttagtttaaaaatttttgattttgcaaccatccatgagtcttgtctcaatcataattccccaaaaaaatctacttatgctgagaatagtgctaatgttgttttgtctttgtgacaaggtcgaactggtgcagcacaggtcgaaggaggagttcacgggctggtattttatggattctagtgatgttaattaggagtctcatgttggatatattgagcaagtcagttgagattttgttttaagatgatttttttatttttacaggtaattctttgtctgaaagaatttgtaaatgtaatgatgtttggtgcagtaggaatggacgaccgaaacaacattatcatctcaagaaatatgcactcatatgtgg

SEQ ID NO: 17625 - DNA, 1312 bp, Arabidopsis thaliana landsberg
tttgttagggttttctaaaagagttctctgaaaaaaaaatgaatgatcttgttttcaataatttgtgtcttctccttcatcctcatcgcccttgtttccatcctcgactttactttcaccatcttcgatttcttcaatttccaaaaccaatacgagatggaatgctcagctccatgtccttggaccttgatcatctccattgtatcaaaaccgactattacttatgtaacttatcacatctttatctcttttcaaatgaatagagaaaacaacaatagcaactgtaaagactacaccatgcagcagaatcatttaaactaaagaaacacatagacatatacacaaggatatatatatatatatatatatatatatataaagcagtggcaccaacctacatgactactattgaagcatgcttatgtacgctttagattcagaatattggaagattagccaaaaaaaaagaaaaagcaagagtaataagaaagcagctttagctaccgttccagaagaaagctaggcttaaaatgacttaatgcatccagtttttaatgaatgatccacaaaggttcatgatgtaataagataatatacctgaaaagacaacataccacataattattatccgaggcaacaacagtctgcattatgtcttcattttcctattttcctttacttgaaagtatatatctgcagagcataagcgtaattctattaaattattcacagttataagccaactgaataaatacaaagcaaaaaacaaaaactaagaattctggccaaagaatattctcatgaactcccaataccaagtaaacctgagagcatctgggtaccttttttgttcacctgaacaagacactacgggaaatgtcagatccgcaaaaccaagttcggaaaaaacaaacaggtagagtcaaaccagtattcatcaatcttaaatccaatattcaacattggttttacaattgttttacctgaatttttatcttatgttgaattgaaagattaaaccaccaaatacaacatgtaatcacgatatacaagcaagaatggcttgattcatacctaatttggagacttcggcaacgattactctccaaatcagatttgctattctccgattgggtttctcttccgccgatggtcttcaccgtctttcgttttgatgaatccggcgtctagaagcctcagataacacaattacacacaatcacggcgtcaactaatcggaaatcaagagttcaccgccggtttcattatcgcgagagagagagccagagaaagaaagagattaaatctttcg

SEQ ID NO: 17626 - DNA, 1459 bp, Arabidopsis thaliana landsberg
cgcaaatctctcgcaacgaatcactagattgtgcaccggacatgtctgcagaagattcggacttggctttctgttgaaccaggcgttgcagaccggagagaagtgatttcatgctcgatctcactcgaaattgcgttgaacacaggggattgccttctcgacttccaaataagaaattgatttgactcctcaaaccctaactcctctttttccgtcaaatactcgagcactcctccttgaaattctgtgggcttgaaacaggcttgggcccaaactgttttaatattctgaaacacttaacaaacacataagtgcttctttgccaagagaattttcaatcaaacacgtgattaaatttcaaacacattcagagcaacattgaacattttatagcctgaactagtttagtgacctaaacagctaattgacacatgagggtaaaagctttccaacactgatttcaaagtttacctcttcctagtactcgaaaatgtgctttgtgccaatcaggtgttcacgacttccgcatgaaactgtcataaccaatcagatcgttgatgaatcagctcattattcagtggctagtctttcacactgtcatgcctttagctctcatgaatcagatcaacgtgtaacaggcagttggaatttcctttgaagatagcttgaccaaacaggagcgtgatgatatgagttcttccgaattgctccctcatatgttatatcagcaatatcacttgacttctcaattgcttgatattcgaacttagtgatcttgatacacatttttgtgtgtgtgtgtgtgtatcaaatccattcagttggttgatcttctcagctctttgacctcctgttaaacgacaacgttttacgtctgatttgaaccggtatgacaggcagctattttcaacatgactttgctaagtgctgatcctctatgcatctttggatttccatgacctattcttgcttcatgtccctgttctagatcagcacaactcacaaccaattatagttcagacattccaatgaacattcgtagagtacaaaatttgtttgatataagaggttaacaaacacttcagctaattgagctttagtacccacatgttcaatagctatcagtttctccttaaccaattcatgaatatagctatgttgatgatctatgtgtttagtacgagacttcctaacaggttctttgaaacaatgtatagcactatgattattgcaatgcagtactggaaaatcagagatcataccacactcctctgtgagctgtttcagtcgtacaagttgagaactcgaactctccaaagaacttagctctgcttcagcagttgatagaagctgactgttctgcttcatgctcttccaagacgccatgttgtttccaaccaaatagcatcctccaagtgatccccgtatgtcctccaaagatcatctgagttcgtcgaaa

SEQ ID NO: 17627 - DNA, 1211 bp, Arabidopsis thaliana landsberg
aaatgatttatacatgaaaaaaaatataattgatatttgaatcaaaagtgaatctaactatacaaatataattacataaaatgaatataactttattaactacataataatatacacgaaataacataaattagcaataaaaatagttaaacataattatttttaaacaaatttcaaacaacccacgcgggtactcacctagttcatataaagtatgtctccaaataccctgtggcttaacacaatccattgattatctcattgtgtacataaagatgattaaactacatatgtatcttgtatgcatgcatagcaaattacaacatacattaatatttcatactagagaactttgatcttttaagcaaattgctggttagcaaaatatatgttatactagagagtttgatcttttaagcaaattgttggtcaggatattataaatgtattctcaaattaagatacaagcccacatcgttttgcccattcaaagagagaactatgagacgacccaccatgagtccaagctcgttcggagctaaccctcacctcttcagctttagtctttatctttcgtccttctttatcctcttccgctacaatcttcttcaccaaagacgccacttcttcccggctgatcactttcttcgacggtaactctgacgtacgaatagccataccaatctcctccgtcagcaacgtggcattcatccattgctccgcataaagaggccaagcgatgatcggaactcctttagttaaactctccaacaccgagctccaaccacaatgtgacaaaaacccaccgattgatctatggcttaagatctcaacttgcggtgcccattgcgttaccacaagccatacaccacgtgtgcggtccaagaaaccttctggtagaccgtcacttacttgatcatcatcttttgagcttgctccaaggtaagaaggaggcttacgtagaacccataagaaactttgacaacttaactctaacccccaagctagttccatcgtttgctcaaacgacaatgttccaccactccctaaacacacatatacaacagatctttcctcttgtttgtctagccactcgaatgtactgtttggtttttcaataagcacattagtcctaacaataggtccaataggataaaccggtacttttataacccggttcaaatctatgtcctctcttagcgcagctagaa

SEQ ID NO: 17628 - DNA, 468 bp, Arabidopsis thaliana landsberg
agcttgaattgactgaagatcatccaagtggtcgctgttctttaggctttcctgatttcgtggaaaaaacacttactctcttagacaggccttgttcagtcatcaagaaagtccatctgaattgtgatcatctgcatggagaatctaggttttacagttggattcgcacagttctggagcgaggcgtgttggattttcacttggagtcctcgcgtatgtatcgtgtagaaactgagttcttcactagcaacacactggttgagctcacaatatccggtgcgctttatcccgagggtgaacttcctcctgggggtttgtttttcccagcgctcaaaagactctctatagtcttagttgcgtttgcagattgtgacatgtacgatgattttgtccttggctgccctgttcttgaggagttaatcctttattatgctgatgatgaccaacccccgggttggaatgggaaag

SEQ ID NO: 17629 - DNA, 2004 bp, Arabidopsis thaliana landsberg
gaaaaaacaagagtcacagaaaaaggaaagaaagaaatgatacaaaaaaaaaaaaaactcgaatatgggccgaaattaacagcccaatttacacgtgtgagggttgtaggcaatccggtttatggattagtttcggtttagttaaaaaattttatctaataattgaaactatataaaaccatttgtaattcagttaagtttgatgcaaattccgttttggtaggggtatatgtttcaatttcgttttggttatccgaatttagaagaagaagaagaaagaaaaaaaatggttaacaaacaaattcggttcagttttggttgatttggttgcggtttttttcgctcaacctagtttgactggcacgtgggattattttgatctgacctctccaacaagacagaaaatatgggcctcgcttaaaaagcccattttacacgtgggagcggcacgtgtggttcttagcttatatcacgtcaccacgagtctaaacgcaaattagaacttctttaccctttcgagaaaaaagaaaagaaaaaagaacttgttttcctctccagcaagacacataaatcgtaatccattttctctcaacctttggaatctcaaatctctgatttagaattccggcgacaatggtgagagatattgaagatgagattagagacgagaagaatcctcgtcctcttgatgaagatgatatcgctctcctcaagacttatgtaagccttccccttttagaaccctaagttttattggggttttcgatttttactcttctgattcatcggagaattcggatctacactagattttagttactcgaatgtgagggtttcgtctctttgcaaaccaatttgatgtttcctcctgagctagatatgttcttgatgagcttgatttttctacttggttcagtttttttttgctaattactacttatatgagtgaatctgcctcactgtttgaatttattccaagtggaaatattcatagtcatgctttgttgtatctgttatctctccatatgttgtgttgctgaccttgttaaatctcattctctgcaggggttagggccttactctgcacctatcaagaaagtggagaaagaaattaaggatctcgccaagaagatcaacgatctatgtggtatgtgcacactctttgttgctcaattgtttgggtttacttcgattagctagtgactaaaagggttattggttgcttttatggttcaggtatcaaggagtctgatactggtttagctcctcccagtcaatgggatcttgtatctgataagcaaatgatgcaagaagagcaacctctgcaggtaagcatattctttctttgataattctctgaatcgtcttttatttcatggtaactataagagattaaagggttgacgttttctctatccaggttgcgagatgcacaaagattataagtccaaacactgaagacgccaaatacgtcataaatgtcaaacaaattgctaaggtacattaaatcccttagctgcataaccaattatgtgttttcgaaccatttgatgtttggttatactgattagttgtggttcttaattccagtttgttgttggacttggcgataaagtttctcccactgatattgaggaaggcatgcgtgttgggtatgtcctgttcctcactgtatctttctatgttttgtttgcttcagttcaattccttttgtcgttgtaaatttttcatatggatacaaatttatgagaactttctgtctctgatttatacttgcagagttgatcggaataaatatcagattcagattcctctacctcccaaaatcgatcctagcgtgaccatgatgactgtcgaagagaaacctgatgtaacttacaatgatgttggtggatgcaaggagcagattgagaagatgcgagaggtatgttgaaattttgttgatatcccctctccttatcttacaatgtcttacttaagttagtgtgatgtaagatgtttgtt

SEQ ID NO: 17630 - DNA, 532 bp, Arabidopsis thaliana landsberg
ttcgcaccttttcaacaaatctgaatctcttttacattccattgattttttttttcccgatagaagagcttccagccggaatgaccttcaggacattgaacctcaccgtctttgacaatggcctgaatcgttaacttgataagtttagaaacttgcgtgataaataaagatggtatcaaagttcaggcagtattatacaatagcatgaattcctttgaacgaaaaaccaagtatatagatattagtgctcctaacctgcattgcccaatggtaacacgatctccttctttgacacggaagcacggggaaacatgagcaggaatgtttgagtgtcttttctcatatctggtaggattaagcatttagctggagggtttcaaataagctgagagaatttgaacacaataacaaaaccgatccttttaccttcgatacttcttcacaaaatgaagatagtccctacgaacaatgatcgtcctctgcatctttgcacttggacaagttccagacaagatgcgacccctgattggaa

SEQ ID NO: 17631 - DNA, 1397 bp, Arabidopsis thaliana landsberg
atatatcaatctccattataccaaagttaaaactatatattaatattattttagttgatattagtaaaggttaatataaatacaaattaatatttttagttaataaatactatattagcaaaaatctgggataaataatttgatatcttgtcaacattttgatacttcgataaataatgtattaatgtgttatttctttttgtcattatctacaaaatgtctaatgtaactaaaatctatttgataaaatgatgtgtaattttaatcataatgttttacaaaatgtctaatttaattagatatgtttaaaattaaatataaattttattaaaataatattaaaatataaattttatgtggatgagataatcattggggctcactaatggaggtaaaattgtagtatgagtttctctaaataaaacattcaaaaaatatagtctaatataattgagatatcatgtgggtatctcaccaatagagatgatctaagcgttgtctaacaaaacattataaccacctaatattaaacaaatgtcaaacttcgacattacaacatttagaatattcccaacatttttatgcattaaattttatatgtatatttaatccgggtcaaatggcacccctttctccttagtggatctgccacttaacatcattcattttcaataggtttgtgaaggcaagacttgtccccttaacggcaaataagattgaaaacgactatctcttgtcacacacttcgttatgtcacgagctatacggttactttgactttgaggcatcactaccttgaacttatacaccactaaaacttcgaactaggttgtgtatatggccaaagtatgtccgagaacgggcgcagggttattcagagtttcaatagatcatgtcagcttcgaaagaatccacaaaatataacacagtagagttgaccaaacgtcacaggctccaacacaagcctcttcaatcccttgaagctgatcttgatatgctcctccttcgaggaatcaatagtgccttgtggcgttatcacaatctctggtctcccaaacaatgcttctgtatgcttctcaattatcccaaccgattctctagatcttattgtagcgtacctttgaagggtttctccatcaaaggacataacgtatgtctttaaccgggattgcttcatatcactgctaaaaccgccactggcattgatccctcctacaaacgaaccaacgtcttggtttgaggaaacagcctgataagtctcttctgcttcttcacagaagtttctctctacatctcggcctgcttgctcaatgctagtctcaccttcatctgacccacctgggagaatcctcatcgtcttctcaagctgaaacctttgatcgatcctcttcaggaaa

SEQ ID NO: 17632 - DNA, 1712 bp, Arabidopsis thaliana landsberg
  unsure (1)..(1712): unsure at all n locations
ttgtaggttgtatgatgatggttggtttgagtaatgtgatttgttgaatagagggagtagtgtattggtttgttgagggttctactatgtacttcttgttggagttatgttgagctttttttgacaaaagagtaagaaccacaatagagatttagccaatccaaaacagagattaaataggcaaaacttttgtcatttcacaatggttcttaatgccgagacatcaccataaaagcaatgtaatattacacatggtcaaacacatagctcgtacgttctaataaaaaaaatacatagtcgaatgaagtctttataagatggaacacaaaaactaaacccatctaatagcttctaatccttcaactacttctactcctactaagcattcatcattgagacatcacaactccttgagacggctccacttgactgccttgagcaacttgagatataactccttcaaaggcctaagacacaaaacaagtgtcagttaccacaatacattactattttacaacaaaacaccatatcactaacctgtgcaagtgacttcttcttcttgtgaaacctggagttgtgacccgcgtcaccacaaatgccacaatgcatcacccttttcatatcttttggtgccagctttgtgggagactcgttcttccctttcttcctcttcttgtccttcttactctcctttccttttttcctcccaggctgcggtggtggtggtgggacatggacattgggatgctctgttgatggccaaaaagctggccctcgctgtggaaatatcccgtttgtgtagttcttcttccacataggtgtccgaaaccagtgacacacgtaatcttcaacttcaagcttcttatctagcatgactccataagcatgctcacaaggaatgccacaaatttgccatttctgacaagtgcatgtcctctcagtcaaacagatcctctgataatctacacctctttcagcttcatacatatcattggtgcttcttctaattttcatctccgaagctttctcaaactctttcgcaagaaacttactaacataaggggtgcatctccctttgtgctcatgagattcaactgatctcattgcaatcctaaccattgcaagtcttctaatagtctcaagcatcggcacaaaggctttatccctagctttaacgattgagttgttgaatgactcagtcgagttattctctacatcttcacaatagtttccttgcttgtaaaacgccctacaccaagttcttggttttgacttgacaacatcacgccagacagcaacattatagttgtaaagcctcgtcaaacccgcttcataagccttctcattgtagctccatgccaaatcccaaacatactttttcatctctttatctttcccatggtttttcttcagatttccatagatgtgtctgacacacattctatgttcaacctttggcagctctagctcaacagctctgatcaaaccctacaaaatttaaaagcataggttattacaagaagatacaatacatgattaaataaaatcgaaagcaaaccatgaaatcataccttttgacgatcagataccatgataaaaccatcaccatctagcagtcccaaatcatccttcaactttctcacaaaccaaacccaattatctatgttttctacttgtacacacccncatgctatggggtatatagcattatc

SEQ ID NO: 17633 - DNA, 1943 bp, Arabidopsis thaliana landsberg
agaaaggtccttagaaaatgttgcaaaaaaagaatcgtaaaagaaacgtagaaataaaattaggtctctcggtttttatacccaattacagaaaatagaagataaatccggttaaggaaaccaaaaccgctcgttaggaagccggaccgataggtcggtctatctctggtcgctggatcgatgcacggaccgatctagtctagagcatttttttttttactaactttcatttgtgtttctttttctttttgtttattaacatggaagaagttgattgatccatatttggagcatccatttgacgagagtgttcttacactggaacaaaaagtgaagttggatgaacttcacaataaacatccgacattggtaaaagtaatttagcgattatccgattgaacctcgtatcgcatcagacaggatgtgaaggaagagaacttacatttttggaagaacaagaagcacactgcacttgaataggtaatatattggattccaccaagcgaactataaggtacatggttttcaattcttgaaatacatgattttgaggatattcaaatgccatgcattgaagatgtaaattctagtttgcatactcccatgatcattgatgaatgttacgatttgatatgagagtctcaacaactagatactttaggagcagaaaaacttgcttgggattaccatgaaatatgctttcatattgaatatcattttgctttgaatgctcatgatctcgagtttaagttttcaatgcctgatatatctagatctcttcttgacgaatctaacccatgaattatgctcgatattgataaaattttgaatgagagtgaagatcttgaagttgattatatggatggaaatatcatgtcgtttgagattaatggggagaagttgattattatgttaaaacctcgttgaaacctgaaattgactttatttttccattgcatgcatttgatactcatgagcgttcaaccatcaaagaatatttcaaaagtatatgctacatttgtagtcatttttactgatgtgaatttgatcactttaccatggataattgtgtattacttggcacatatcatttcttgcactaacaggagaaggacaaaaggtctactgactcaaccttttgattcttatgattaataatttgtgttgagcgggatcgagtcgaacgagccctccgtcttcttcacggcgtttcctgtcctaccagttcagaatcttcggaccacgcgaagaaaaaagaagataaagagagacgcttggcggaagagaaacgccttgcgaatgcaggattgatttcgccgcgggtagcctctcccgatgcgactcaagtccgggatgttgctcccaaagttgtaggcccggttgacccgacgccttctgaagttcaagaggtcaatcctactgctgttgggcctttgcccgaggcgattgttgcgctgcctgcgagcgacaaggcggcgggtaagcgtgttcggacggatgattcatcgtccaagaagaaaagcaagaagaaggaggcctcgagtgccaaggcgggaaaagagctccccatctttgaggaccgggtagcctctgcaaacctcctcagggtgtgtgtcggtcctttgcttcctcctccggatactcttctggaatctcggaagtatggtgaaacggcatctcactttctgcgggtatgagcttcgttgcttataacttattctggtgttgtcattgtaaatctaacttctcttttccagcgtgtcgcttcgatgaaccggatggtacattcgtatgattcggctatgcgagagcaacatggaggtgctggtaaattagccgaagcggagtctcggattcaggccatcgagcgagagaagaacgaggcgctctccgaagctgctgctgcgaagcttgaaagggaagaggtcgagaggatggcctac

SEQ ID NO: 17634 - DNA, 1734 bp, Arabidopsis thaliana landsberg
taacaggaggtcaaagagctgagaagatcaaccaattgaatggacttgatacacacattaaaaaaaaacaaaaacaaaaaaaaacaataaaaaaatgtgtgtgtgtcaaggtcactaagttttaatataagcaattgagaaaaaaagtgatattgctgatataacaaaagaaggagaatttcgaaaaacacctatcacacactcttgtgttagttaaagtatcttcaaaggaaattccagctgcctgttatatgtcgtcctgatcgtctaggactgaagacatgacagtgtgaaagactagccactaatcactgagctgattcctcaacgatctgattggttgtgacagtttcttgctgagttctgaacaattgatgggaacaatgcactgaactgggtcaaaagtgaaaggtatattgaagatcttaaatatggttggtactcgcttgtatcaattgactatttgggtcactattcgagtgcatgatgaaagttgtgattgccgaattatcactcaaattattatggttattgattaattgaatgtgtatttgcaagtgagcactaatgaattgttgagtgtttcagattgtcaagtttgctgagtctaaggtcgtctgggccgtttctaagcccatgaggtgcaagtccaacaggcaggaatcgattggagggaaaaagctagggtttttaggatcaaatctgaaccgctcaagaaagtgaaaagtcgtttgcgtgctctagagaattcattctgatctctgaagaaaaaaaaatcatttccattctctgcttgaaaatgaaatcgtttttcaagacttttgtgcaatcaagaatcgagtcttcgggatccgaatcttcatccacaacatcagaaagctacaacccaaatctgctggacgatcttgtgagtacgcctcacaatcagttggtgttgtatgcagattttggcgggtcagatctgtgacgtacttcatcaccggaccgctccactccacatgttcggcttcctgttgagcttgtggatataagtgatgatgataaggacaatttggcttccatcgttccagtcaaaagccaacaggtttccatgccgatgtctgccaaagttccaagggtactaacagtggcatcgcgcctgacaaagcgcaaacgagacaccccaagtgagaagtttctgtcacaaaaacaacagaaaggaaagggagttgttgtttcaagtcttggaaggagcgatctatttcatgagttcaaattcagttctcctctcgccgaacaaaggtacttgtatttctctcattgacaaatgatcaaggaaatgaatttggatcttctggttgatcaatggatcaatggatcatggatatgatttctgaggcgggtcttctcaacacagtaacgggagtccaaggttttgaggaagaagtggtctatgaattctgagccaatctaccctcagttcgggtggagggagactcagtcaaggtgttagtaaggggtttcgagtgtgaattctcacccgcaaagatcaatgctctgttttatatgcaacatgttggagccagaactcaatgcattcagactgcggggttggttgatgagtaggtggctcggtatttgacagatggtcgagtccaaaatctgcagaacattccgatgaacaagttttcagaaaactgaaagagtctttttaagatatcgtgtcggaattggtctccccaaaccaataagggt

SEQ ID NO: 17635 - DNA, 2565 bp, Arabidopsis thaliana landsberg
tgctcggatggagagagaacaggtgactacgcattttgtggctccaaaatccgtagtcctctccatcaaagtgaggaggtttgccaagtggaatggagagcaaatgagcatttgtactttgcggaatacgagagtagtcaaaagaaaagttcgaattaaccgtctttcttttgtcgtagtcgttgtcgtcgttgtccttttgggaagaagtggattcatcgctgtcgtcgtagtagacgatctccttgatgcgccttgtcttcttcttcttcccatctttgcgtttgtggcccgagcctgagtcagtaggcttgtcatccttgggctcgttgacgaaggactccttttccttatcattgatcatgattcccttccccttaggatccatctcttcgggcggttagtccttacgtgaagagaacagctctgataccaattgagagcacctagagggggggtgaataggtgatcctgtaaaaattaacaactaatagccacaaaacttgattataaagatgttagtgcaatagaaccaagtggctatagagcgagctcttgcaaatcacaataatcacaaagaaagacaacccaagagacacagtggtttatcccgtggttcggccaagtataacacttgcctacctccacattgtggcgtcccaatggacgagggttgcactcaacccctttcaagtgatccaatgatcaacttgaataccacggtattcttccttatatcttttctcgtttgcgaggaatctccacaagttagagcctctcacccttacaagattgatcacaaagaaggcatggagtaaggttggggagcacacacactccgcagcacacgcacgcacacaagccaagacttgagctcaaaatgaaacacagagagttccaactagaacggagctcaaatcactaacacgatcgatcaagtgcgtagagacggagtgtgggagtattagattgcttagtgaatgcttggtgtcatcctccatgcgcctaggggtcccttttatagccccaaggcagctaggagccgttgagtgcattccaggaagcaattcttgccttctgtcgactggcgaccggacagtccggtgcatccacggacactgtccggtgcggatttctttcctattttgcgcagccgatcgttggcgatttggagccattcggcgaccgaacattgttcggtgcacaccggacagtccggtgcccccttcagaccgttggcccggcgcacgcgtcagcgcaaattgcgcgtcgaccgttggctcggccgaccgttggctcaccggacagtccggtgcacaccggacagtcggtgaattttagtcgtacgccgccgacgaattcccgagagcggccttttcaccagagccagcctggccgcggacactgtccgtgcaccaccggacagtccggtgccccagaccgaaacagccccttggctgtacacagccacctttttctttttctttttcttcctgtttccaatacttagacaagtatattagtacacaaaaccaatgtactaagacttagaaacatacctttgctcttgatttgcactttgttcatccattgcatgaattcacattttaagcacttgagttggcactcaatcaccaaaatacttagaaatgcccaagggcacatttccctttcagtcgtcctcatcctcgccgccaccgtccgagtcctcctcatccgaggagtactccgactcatccgagccctcgagcccggagcgctcgacggcccggatgtacgtccagacctccaccgcgagcccctgggagtcgtctgagtcgtcagacgactcacgcagggggatgggagccggagacccctcagactcagaggagaactcctcctctgagtactccgagtcaccaaaatcctccgatggaggagtcaggctcagcttgcgcttgttgttcttgcccatggcggaagcagacagaggggaggaaaagaaggcagtaaggagcagcaaagagatgtgaagaaaccagagaagcaaaggggttatttatagaagggaaaggcaaccgctcacttctaaccgcggtcactgaacagtcgcaaggcattcaataagcacttccacccatctgaagacacgtcaggccggacgccgtttcatgcaacactacacccattgggactccagtcaacagcgcaaaggatatgattacactagccgtcacatcacattactactcagaagcagccggctaaaacactcagcgtaccaagccgtcccttgcccacacccattgggggggggacgcccaggaattatcagtatatttttcaaaatggtcacatccgtgcaggcacgcagtgatacctcaagacaaaaatgagataccagtaaggatcagaggaaagccaaatatagccagcaaagtacaagacgtggccgacagaaacgacgcaaggactagacagagaacgtccatcaaacgtccgatcaagtcgcagaagcaaataaattgcatcacctagcaagatatggatggattgcaaactcggctgctaaagacaaaatat

SEQ ID NO: 17636 - DNA, 865 bp, Arabidopsis thaliana landsberg
aagttatttgaaaatttacctcagcaacaacagtttcgtcctccactgggttcattgagcaggttgagtatatcatcttcccaccaactttcaacagagataaacctggacaagaccaaacagacatatttacgataggcggatcattctacaagcaatttcatggaaattagttgagacatataagaaagaaaaaaagtacctctcatagcaagaataatctgaaggctatgaagtccattgcccataccagagttcctgtacataaaccaaaaggaataagaaattcaagaaccaatgaaaaacaatataatgcattcacaacattgccaataggtaaaacatgccaaaggtgaaaataccatttgcgccagatatctggagccttgcgcagtgtaccatcaccactgcacggaacatcgcatagaacacggtcaaaggcaagttgattaataggcatattttcacttattcctttctcagaagctcgggatttgttcaaacggcaaccaggaaactgttgcccttcatgatttgtcactatcaagttggatgtgcacattctctttgtttggtgaatgagaaggttagatcttttaaaatcaacatcattagccaccacctggttatttagggaagaacaatcaaattatctatctacctaaaatcagatttagaaaatagtagatataaaatagaaacacaaaccaatccattaggaagagatcctggttctgatgcttcatgtataatctcaagcagctgaaatgttttggaacccggtgcagcacacactacaaagataatagattagtcttcattgacctcttactttcccaaaaagcggatatagtcatggtcgtta

SEQ ID NO: 17637 - DNA, 2660 bp, Arabidopsis thaliana landsberg
ttataccttgcttacccactattttatattaactagtttacctacctttttggttactgattggatttattatttagttggatttttatcacgctgaaagaagaacagattgaaaaaaaaaattacttaaagacaaacagttgagtaccttttattgttattaaaattttactattaattagtttgtagcctactagttcgacgattaggtattgtatgtagtatcatcagcatgttaggagcttggcgaagaattgaagagggtctcaaatctccacatctttttcaaaattttcccaaccaaaacaatctctagaccaacgatttccgaaggactgaacccattagtgatcattaggtaacacaaccgatgcggcaaagacatcctacgtacctcaagttaatttgtagttaaacatgaaaaatccaaagtgaatggtattctcacaaaataaatgattgcttttcacaaaaaaattaaaattaactcacatcagcatattaccaatatggatataacatatcatttacaggtattttggccaaaaactacattttagaagtcaaaaaacaagaattttactttgttacaatactaattgtcaatctacatttacaaacatagtgagaacttgcatataaaaataatcagcggagaatttctaatagtcaatacatcaaagttggcgatgagaatagaaaccaaagttttaggtcgcataaactgatctgtcgaggccgatccattttgttttatttgattacaaacgcatgtgaacaatgaaaacaatattgaatatgaatggccattataccatttgaacgacatctcacgcctaacgtacttgagcaactaataccacaaacttgagtctttgtcaaagactgttttgcatggctttcctttaaaaaaaattgaaacataaatagcttagccgaactcttaaaaataaacgaatttactataaacgcatcttcttgtttttgcagcatatatatcatttactacttttacaatatagcttccattcctctaaaaggtcctttaatatcatgtttctgttataaactcaaaaagaaagtgagattgtgacttgtgtacttagagctttagattgtttctatgacagtttccaaaagtttaggcactgccagcatgcaatccattggttatgctacaaatattaaattttgttatctatcactctcagtcatatgttttaaggcctctcacaatttgctatatataatatggatttccaaatctttattgccacacatacactcatacaagatggataatctagtgttatgtgaagcaaacaatgttcctctaacgcccataacgttcttgaagagagcttcggagtgttatcccaaccgaacttcgataatctacgggcaaactcgcttcacttggcctcagacttatgaccgttgctgtcgtctagctgcttctctcctctctcttaacatcacccgaaacgacgttgtaagaatttttattttgccttctgatacttatattggactttttattatatgcctttccgagttactcgtgctcacgtgtcataatcagcatatgaaccacatgacttctctttttctttcgttttagctttacatctactgatgactatcatattgcttgtatcatccttacttttctttaggatggtacttatatttaacgttaacgcgtatgatgaatctttgtttaggtctcgattttggccccaaacgtacctgccatgtacgagatgcactttagcgttcccatgaccggagccgtacttaatcctattaacacccgtcttgacgctaaaaccatagccatcattctccgccacgcccagccaaagatcttattcgtggactacacgtttgctcctttgatccaagaagtcctccgtctcttaccatttgacgcttcaaaacttcacccgctaatcatatccatcattgagattgattccactacgaagcgttcctccatggagttagactacgagggtctcatccgtaaaggagatcttacgctctcttcgtcagcaagtttgttccgtgtccacaatgagcatgacccgatctctttgaattacacttctggcaccacgtccgaaccaaaaggtgtggtgattagtcaccgaggagcctacttgaccgctttgagctcgattcttggctggtaaatgggcatgtgcccggtctacctctggacccttccaatgtttcatggaaatgggtgggcgcacacatggtccgtcgctgcacgtgggggcaccaatgtatgcatcagaaatgtgacggctgtagaaatatataagaacataggattgcatggcgtgacgcacatgtcttgtgttccaactgtatttagaattctcctcgaaggaagtcgaaccaaccagtcacacaagtccttgcctgttcgggtactaactggtggttcatccccgccggctgcacttcttgagaaggttgaacggttggggtttcaggtgatgcatgtatatggacttactgaggcttccggtgcagctctctattgtgagtggcaggacgagtggaacaggtactaaacacaattatgagtttacacaatttttactacaattctatttatacttaacgattaatataaaaatcctcaacag

SEQ ID NO: 17638 - DNA, 1905 bp, Arabidopsis thaliana landsberg
aaacaaaatcagatttgagtaataaacatatgatacacactcatgcaaacaaagccaaaagaaattgaaaactcaatgagaaacgaaagcattatattgcacataattataaagatggatttgtattaataagcatggttaaccctccgacagatgcgcctgatctctcccttggcgcctgtcaacggagagatatttcccatcttcaccatcgatatagcaaactgctcaaagaaggcctcttgattctcagcgtatagctccaccagctccttggactgtttgttcttcgtgaacagaatctcatcagagctcaatagacctttgtacattatcaggttcttgaagtagtggttgtcaaacttgaacggtgtcgcgaagtcgaggaagaatagggtctggtcacctccggatctcggacatcgttgacgcaatagtgttgcatagtattggctaagagtcagatcaggctttccgttgccggattgattgtataacctctgccggaaacttgtgcacctcgagtttccaatggtgtgacttcctataaatcatatgtatccgcttcttaaaagtgtaataagttattgaaaatgtttcgtgtaataaagatggatagatatgtataccagagagggagacaagatcgacgagatcaaggccttgacgcttgaacttagtgaggatggtttggaaagtgttgtttggagcaggaatgtcgttgttggaaccactcaagcttgctcctctcgcgtctcttcttcctagaggtacttaacagctcggtccacccgtctgttatttcatttgtcaaattattgataataatcaactaattttgtgtgtagtgaattgtgatgagtacttacaataacagttgagtctctagcggctagagccaagatatcagcgcaagaaactgtttcaggacactcttgttctaaggcatgtttgatttcctcgatgagttcgaaaccacgggctgagtttctgttagggtttgatcgtttctcgctgattatggttccactgctgtccaatagtatggaagcatcacatccctgcagcacaaatatatatcacaaggagaaaaatatattaagattggaaaatttccgtatgtttttaaacgttacgaaattttgctaagcttgagaccttgacgaaacagtcgtggaaatggagtctgagcaaggaggcaggcatgcgaggatcatgttcgaatgctttagcgacaatggactgaacaatctcttgagctttaggacacgattggtcataaaactgaggaaagagatagccgccacttccataggctttggaacacaaacaaaaaggagaaaatgcaatgagcgagagagctgcaataaggatgttcaatgacttggccattttttggggggattctttctcttgatgactcgttgtatataactcggttacttgtacttggtgattgtgtgtgatgccaagggttgcatttatagagtagactttgtggacaattgagaaagacgttggagttggtatctaattttagctatatattggattagatggatacattgatatttgaattggtatgaatacaagatttgttagaattcttttcgtatatttctcatgtatgatcactttatgcacctcatatcaatagattattcgcagttgttgtgtgggatttttgttccatgcattagcaacacttaaagcacaattttgcttttaatagtcaacgcggagaagatttctatggggatttatgttttattaaattgagagatcagcctgaagatgattaagctacgcaaaacaattacatccatagggttttacttggttgaccgttgaacaaatagtcaaaaaaaaatgctaattattctgcaagcaaactaattaacattg

SEQ ID NO: 17639 - DNA, 1332 bp, Arabidopsis thaliana landsberg
  unsure (1)..(1332): unsure at all n locations
ttgtccgtagatttaataaacttggaggaagaggataaagaagactcacttcattaccacatgaagatgatcgggctacnnnnnnnnnnnnnnnnnnnnnngtcgtggcaaagcaatacacattcttaagaacctacacatctgtgaggattttcattcgtccatcaaactcatctccaaagtttagaagagaaagtttagaccggaattattttcaccatttctatgatggctcatgcttttgcattgattattggtgaaagtaaaccgaaagacggaagactctttccctgtggatacacatgctctattttatttttattttggctcaacattgataaaaattgattttgtttttagttagtagtttttttttcttgtcgtattttagttagtagtttagaaactatcattcaagaaatcaaaatttgctttaaattgataaaattgacaataaagataaatggtgaactaagtctcaaaagtcaaaactatcattcaagaaaatatcaaaaaaattctttagattgataagaaacagcgtaggagaatgagaaaagtggatggaacaaatacttcaagtttacttaactgtttgaaccaaaatttctgtttaaaaagaaaaacaacatcgttttggaattttaacagaaactgttgacgactttactttgtttaattagtctgtcacttgacttaacaataccctaaatttggtaaagtcaaagaaacttcataattaataataaaattaattaaaattggtaatttaattcacccaaaacaaaattgacattttttttcaaactgatgttttttgtcgtcaaacttttcattaaaatccaaagaggattacaaggtgataaagagcccaattacacaaaagataaactcaattagcccaaaattacaagaagaaacaagagaacataggtttaaaagggacacgtgtgaagatatgtgtattgatgcatgctggaagtggaaaggcacagccaccaccatctccaccgagctgaaccaccgatcaatccttcgactttcaccattgaaaagctttttctgaccaaggattttaccgatcttcagcttcaaactccaatcaccttgctttgctaccttttgctaaactctccgattgtaaaaaacagagattagcaagtcatcagatgtatgacacacgggaagccgtagcgggcgagagggcaaatcagtcgcaaaacgctcgtctgatatattcagcaccaagcgaaaaaattctctcaacacgatttgcacacttgaggtgatacgttcattcaacgctgatttacggcaggattaggatatgta

SEQ ID NO: 17640 - DNA, 1359 bp, Arabidopsis thaliana landsberg
agagaaagtgctggtcaacattatgttttacctcatatggtaccagagcacacttgtagtccatcacgtatccacaatcatcttcgatgcatctgagcacatgatgtgcctcgtcgttgcaaacactgcagattcctcttggcgatgtgtaaaataagggatgaggatgacttttgtggacaaatggctcagtaactgaagcatatcgcaaatccaacgaagcgtacattgcttcgtatctaaaaccattggaaagcaatccacatgccgtacatcttattaaataatcccaatatttatagctatgtcggtcattgcttaccacatgtcgtttccatagaggcagataggcgcaactctcgtggagaatgaaactacaactcatgcagctatagaagtagtggtgatagataggataaacgcatgcctcacaaatcctatcctcaataaagataccagacttgtcaagccttaggttatgctctttatggctgacatgttgtattgtgttttcatcgataaccttgaacgattgaatatcttcctcttcttcagcttcgtctttcatttctttgccgtcccatacatcttttctagtagcgcacttggtatgaaacactgaggtgggacacctcttacaaaaataacctccacaactccaatccattttcttacgacaaattccacataccgaattcactgcaccaataagagaagtgcgagaaacgcgatggtcatgacggttgatgtttatgacccatggaaatccagagcaatcattgtggcttgtgaaatcacagggaagacatacatatgggctccggtctccttttagcccgcaagaggtacaagaaaaagagatggattttggcataagggtgagttgatggccatggatgtttgggtcgtgaggattttgttttggtggataaaaaatacattggagatctaagctaaagttacaagcggaacaatgataaaagacttcagaattagcaagttttttctccacacaaacgacatttcttatcggtattaagcaggtggttcaaccttgacgagtcttagagggtgtaagggatgggaaaaatgggttacctcggccggatgcttttggcagtttacatgaagcttcaaatcgcattcatgacacttgtatgaatatccatcactatcctttccacaagtggcacaagagaagcaacttttcaccatctctagcttgagtttatggtcatggtgctgaggaacatcaatgacctccgacggtgggtacttagcgcaaccgaaatagaaatatgaagaaccaaatcttccttttctcagaggtactaacacacacttgctacatatatagat

SEQ ID NO: 17641 - DNA, 1022 bp, Arabidopsis thaliana landsberg
accacatatccctgacatggcagtttcttatggactatacattaactttacgagcaaagatgaatgaacagagagtaagaaaagacaatgaactacaattacaaagacatcaaaatctataagatcattcagagaatttggaaaaaccataaagaaatgacgaatgtaaagtcatctactgaagcatataaagtactttttatgaaacacaagcatatcgaagccaatcttgaggccatattaaagtgaaaaaaaagcaaggcacccgcacagaacatgaaatgaatgtaggccacagagacgactgaatcttcgcaaactcacaaaccaatttattatccaacttagtgtgatccaaaccaaaggtatgaatacacaatccagctacagaactagcatgaaactgcactatgtgataccacattacagatcttcgtaagacttaaccataactctttatctagctagcaacaagtaattcacatattctcatgaatttgatcaatccctagagtttcactaaccaatatcatcagtcaaaaaggaaaactgacctgaacaccaccgtctaaagcagcacaaggctgaagaataggaccaggattcgaccgttcaacagcaacttgaaccggtacaccaaaacctttccttggtccagtttcacgaaatctcgtctgattctcttcccgacgtttatctccatcaccagaaacagttccagtgttgttatctccaccatcaccatcttcatctctcacagctccatgaccaccaccaccatcgttatgaccaaacccaagtatacccgttaacttcttcaaaaaacccattaaccccagatatcaaattcgatctaaagccctcaaatttaacagcttttctctcaaatgaatgatcttccaaaattagggttttcgaatatccctttcctctcccgatttttgctactttctccgatcgcttcttaatccaacaatattcatttcctactgttaaaacccagaaatctctgtctttaatct

SEQ ID NO: 17642 - DNA, 1605 bp, Arabidopsis thaliana landsberg
cctagatatatgaaataatgaatcatgtatagaccattttgatatccctataatacatggtagacatgtagttatgaactagagacgtaacaaggtaaaggctctgggaccgggcgcaggagtgtgtatgtggaaaactataaagaaagtgaatgaccgcagcacatacgtcatctctctcttaaggttcgcccgaagcttcgttgatatttcttaattaatcagtattatctttaaataattagtcgttaacttagttgggttgagtttgaccacaacctaattaacaaaatggattctgtttcgtttttttttcttttagccaaacactaatctctcgttgtcttcccaaatgcttctatttaatcaaatatttatattgtgctcaagatacatcgaggcttcatacggattagaatttgtctatctgcatgttttgttttgttttttcattttttggcatagttttgtgggggcaatttacttgttgaaccctagtttacatgtattctcttgaatttctcacaattttctcaaatttcgatttcatagaaagttagaaacaaacactcacaattcacaaattcccactggcaaaagatgaaaaagcccaaaaaataaaattacgtatcgccatcaaatagggcctattggtttaaatgtggttttattgtatatcagatattaaaacaaaacaattgtcatcaaagcaccagtggtctagtggtagaatagtaccctgccacggtacagacccgggttcgattcccggctggtgcatgagctataaagaaattggctttagcattggttgggtccaatgcattctactgaatatcagttgatattgccccattctgagctctctccttttttttttggaagttattttgcgaaatataccgtgtcttctccaaggttgtccacagtccagagagtagatgtttcgtctgataacatggtaacaatgttctaaactctccacgttcttattgttatgcatgttctattgttcttgctagctcagtttggaaaggttggaacttttgttggttctctccaacaatgggtctttgcttaaaggttgaatcgtgttagatgtctttcaaaggtcgaatattttcgttaacagtcttacagagtctcaaaaactaatctctcaatgcttcgtctctcatttcaactccgactccaagtttgggaaattttgtctcatggagaagtccggttgggagaagttgtctcaaaactctaatgggatgacggatgtgagggtgtcttggagaagaagctactgaggaactgccttggtgttgtcgtatcaaaatcattgatcccaaaatcaaactattaacccaattggaatgaacttattaaacatctccatctcctagtaaaataaaacaaaacgtagcaaacatcattgtatacaaaagaaaaatgaaatttattagtctcctttgttccttgaagaacaaacaatgggaatagcaaacaacgaaactcacgacacataaccaacacaaatgtacccgtacctcctttcttgctcaatggcacctcaaaattataaaagaataaataatcaaaagtgaatcaaatgaa

SEQ ID NO: 17643 - DNA, 1186 bp, Arabidopsis thaliana landsberg
ggtctagaactagtaaaaagatgttggttaagatatcagaaaaacccctcaaccgtgagcatccagaaaaatcaagttgtcaagtaattcaaggttgactccagtgaaagagtctccagatttgtgcatcgtgcaatgttcaaatgctcaagattatggagattctgaaatgaagaaggaagctccaccaaacttgggatatctgagagaaatagcttcgtcaaagagggagacagcatggtcatgagcggtgtaagcggctgaaccaaaaacaaaaacaaaatagagatgttaacaaaatcactcaatcactcaaaaaattattcacgtagattatagatagtaaccacaagcattacacagatagttttctcaataaacttttttcacaacgtttaagaaatcaaacccaacgtgacattaacttcttataatacgtgagtttagaaaaaggttggagaaaacattagaataagaacatacctgcactcttttccacaatttctcactcttcatgtcatacaagccaagataatatagattctctaaatgcaactcagtgggaaattcttctatggctgtttcgcttagatagagctctgagatagttgttgagatatctggaaaactcctcaactttgagcatccattgagattgaggcaataaagagattcgaggttgattccaatgggaagattctccaaattttcgcaacgttccatctgcaattcctctaattgattaagattctgaattgtggaagaaagctccactaaacttgtgcaattgctaacatcaagtttcttgaggttagtggccaaagaaagatctggaatttctttcaggttttctgatccccgcaaatccatattcctgagccctgtaagtgactgaagtatacgtaagttacatatcacttgaaagggtaaacattttacctttaaaagaagcattctaatctcgatattagttataactttactaaaaacttacatgaactccatcccacaacttttcgagtttgctctcacacatttgaagcttaacaaggttttctggacgaaagttagatggcatacatctcaacgggtattttctcccaactcagtaatctgagcttaggggggaaattgatcgaaacctttccgcataagctcccaagtcaacattctttctttctgttta

SEQ ID NO: 17644 - DNA, 1407 bp, Arabidopsis thaliana landsberg
agataaaatgtttggagaaaaagaagattgtttggtgaaaaggaagattgttttggagaaaagaaatatttttttggagaaaaggaagattgttcaaaaaaaggaagattgttttagagaataatagagagaattgtattgtttgttgtaataaagattatgtactatatatataaacacaaagtgtaacgaacaatgaatacaagtggtgtaatataggaatatagttttgtgatgtacaattattcaaaccaatgcacaaaaaaacaaacaaactaagtggtggctttgaaaacttgtggtgtcttgtacaagtgatgttggcactagttgtgtcttctagatcctgcaaaattatttagaatcaacataattagacagttagcatagtaatagaaataattagaccaaacataaccgaaactgaaacttagaacacaacttaaacttaaacttaggacacaattaataaactcatttcattcatgtgacattggatacaaaagcatcaacacaactgcaattaaagcatataatacaactgaaatttaaacatataacacaactgaaacaaaagcatagaagacaactgaaacaaaagcattaaacatacactaaaaaaaagaacataaactcaaatatacaacttcaattagaaacttaaacttaggacaacatatcagttattaacttgtgcttaagagccaactcgatgtcagatagaagctcagttttggttagtagcctatctagtaacttctcttcacttagcttctctttaacatgagtagcttcttgttaccattaagtagcttctctttgaaagctaaatctttctccttaattagaccaaatattttgcatctctgtcatagtcttgttttcatcaccttccaaattagttttggctttgggtttcactttgcctttggctgcctttaccccaaggggcgaggttgatcctcttcaaggccatgttgcacataggatggggaagagtgttcatcacatttttgtcgcttctctttaccgtatgtagcatattggacgcaccacttctgatcaaacctaacctctccccaattgtgctcaagggtgaactttgtattgtaatcattgtagaagatctagtgagccaagttcaccacatcattatcgttctgcccactggttttctctttggttacagccacatagcttcctacaaacttgcaacaaccctcattgatcttttcccatctctttttacagcattaaaggtctctcttttccatctctgttagcttgggacttgcgaaaaagtaggttgctatgtggtgctaggatgttgttgttttttcctcattggatacagcacgatctttggaggtgttgagccaagcactacatgaggaccacatcttctgt

SEQ ID NO: 17645 - DNA, 365 bp, Arabidopsis thaliana landsberg
gcagttcgaaggtcgactaccttatcctgttggaacatatctcacggctcggaacgaaacactttttaggcagttccaatccgattgaggcagatgagtggaggagccttttggtgcggaacttccgttctactcgttgcccggaggactacaagaaggacatagcgatccacttcttggagggcgatgcgcataactggtggcttgcggttgataaacgcaagggtgagcgtgtcgagaccttcaaggactttgaggacgagttcaacaggaagtactttccgtccaaggcatgggaccggctagagagtaacttcctggatcttgtccagggtcgctgtaccgtccgtgagtacgaggaggag

SEQ ID NO: 17646 - DNA, 1997 bp, Arabidopsis thaliana landsberg
aaccgttgtagatgctctacaactgactttttggactccaagacttataagtactcattctaaaaccttaaaatggtgtgctttcactgtgtctccaagagcctccaaagttttaaagcagccacgacttataaatactcattctaaatactcattctaaaaaactctaaactgatttgtttttatttaaattaggttaaccgaatcctattttattttattttgttggttcggattgccattttaaccaattactaaaataccagttcaacgagtcgacgaagataatgtaggaatctaaactcaggtatttttataattattattttttatataatgttaaattattccaaaataaaataaacgggtatacaaattactgcggaacactcgaggtttattttacagttttgtgttttcttttgataccaacaaaaaaaaaatgtgtcgtacttgtggttcaagaaagacaattattctaaaagaacccatgagtatcaggggcggatctacagtgtattgaggtgggggacgtgccccacactaatctttgaggagtatttaattgttcagcttattacattaatattggttagcttatttggaagaagtgtcctactctttgtttcagaaagtgtgttcaatactcttacactggtattttatttcatgcttatttttttcccgtatttattattatttaaaagaagtttcactaatatggtgccccatacagttttcctccctagatccgccactgatgagtattatgtgaactcatgtaaagggtacatgttttttttaaaattaattttccaaaagacaaagaaaggagagatgcacttcaagcaaaagcatcaagaatctcatggacaatgggacgagctttacacatggctagcaacggtgtcgtaggacgcatcaagaccacagttttgtcttcactattgtcaacatattcttctccaattctctgccattcgaaacactgaatcatcgatccaagagccaagctcactacccgatgagctaggccatacccgggacaggctcgtcgtcccatcccaaacgacaacaacttttgatttagcttttcatttttgaacctctctggcttgaacatttctgggtcttcccatatagacgggtctctatgcatggaccatatgttcaccaataacatcgaaccacgtggaacatcatatcctgccaacatgcaatcctctgacgtactatgtggaacatttgttggagctgccgggtgaagacgtaaggtctccaacacaatccattggagataaggcagatttttagtatcagcttcatccattaaccggtcaaaaccgattttcgtatcgatttcggtcctagctttctttaatacttctggatggttcaacacattcagcatcgcccattctaaagtccatgctattgtttcagatccagcaattatcattacctgtaaattcaaaatcaaaatcaataattcgccaacataaagtttgattattgttcttacatatagactatctatatggattccttaatacttacaattataattcctttaagagtgacatctgtatagtaatcaggctgagtttcttggagagaaagcaagtgatctatcatagtggtacccatttctttatccgcacgtttctcatccacaagactctgcaaaaacttatcgatccgaaccgctaagttcttgacgcgtttctcaaaattagtgaaccaacgcatgattggtaaatagtcagctgcattcccggcgccagcgctggtcacaatctcgtccatcagatgtctcacttgctgcgcaacttcgtcttgctctgtgccctcaccataaaatcgtttcccggctaccattctaaaaacgttattgatagtcaactcaaaaagcaaatgtctcatcttcaccttcgcaaacccctgactttataataacataaaaaatgaattattctcaaatttacattttcatacct

SEQ ID NO: 17647 - DNA, 497 bp, Arabidopsis thaliana landsberg
tagtgtccactgacgtgaccactgtcgtccgtatccaagattagctctatgaactacctcctcagcacttcggtccaccaataacaattaaccgctctccacaagctctaaaagcaagtccccatccgtttaccgagccagctctttcaggcaatcttccaacagttaaccacttcttattctccttatcgtacttcctcacttccatatcggcgtgatcagcagcgtataattggttattcacaaccgcaacaagaggcggtcttccgctgctggtgacatatcagcttgatcagcacggcttcttggaggcgacaagtcagggatttgagtccatttcttggtctccaaatcatattcttcaccgcaggtcaagcctttagaatcagctccaccgattcctccaattacatagaacttcccgtccataaaaactcccgaacacatcttcctcggtttgttcatccttggaagagttatccaagtttgaagctcag

SEQ ID NO: 17648 - DNA, 663 bp, Arabidopsis thaliana landsberg
gtttataattgaaaatcaattaaaataatattaattctcaaaatttaaaccatgattatatttagcttttatttttactttgtaaatattttttgaagattaattgataaagcaaaaagaatggaataagaacatgtttagtctttggcctaaaaaaaagggacatgtttagtccatatcctagcaaaggatataaacataatgagatttgttgggaatttacaaaaaaaaatgaaagaatatttggtgaaatatggatatctggtaatcctaagcattcttaatccgctgtactcattagaatgtcaagaaaaaaaacttcatggagagacctcttcgagataaggctccaataaatataattgatgttttatttttgaaatttgttgtaatattactatttcagaaatatagtggtgcatgcaaagagatttaaaaaagttgatttgacaaccatatcacaaaattgcgcttatttttccggtcaactgttttgagagaattctacggttaaatgtgtttgatctagagcaattttaggattagtaaacttctaaaaaatgattgtcagaactgtgtaaatgagggttaaacaagagaaaatatcacgtggtgatttgtagcgtcaataccgactgcctcacaaggatgaaagccacaagc

SEQ ID NO: 17649 - DNA, 1002 bp, Arabidopsis thaliana landsberg
gttctcggtcttctaccaactccaaggtatttggtacgcatcaatttaccaatcacagctgtagaagcctgtttgttgaagtctcctcttgcgtcaacactgcatgtgtgctgttgtgttgcgtatttgatctcaaaacgctcactatcctccagctttgttgcgtagacacgccatgggcatatgtggctcacacacaccgcaaggacagtattatggcaggacttggcgtagatgaagtggaactttcgcctaattgcatgtatggcaagtttcgtcgcacagtcttccttattttttaacaatccaccaataaagatgttgtcgccttcgtagtcggcgtcctttagcgctcaatgcagataatctgcagtgttatcacacaatcagataacttattagttacatgcgacatccgatgcccaatattagaagctaacaattgttaacaatgacatatcaacatatacaatgcaaatatcacgctaacatgatgtttagcttctacattattagttagcttctacattattttaccttcttcccttggatcgtcaaaatacggcggtgcgtctctgtcatacaacactgtcggtactggtgtttctttcaaatagatgtttgccattctccggctaacatgtttatttaacgccatcacttgctctggagtcgctatgatgtccccccttaaatgattgtcaaccctgctcacccttggagtatcaattggtgccatacaaagtggtccgtccgggtctgagtagtagtgtgccacctcgtcttgacctgaacataaggcggagaggactggtaccagttagtgtctgttaaagttatgcaacaatttttataatatctgataatcgcactgttactgaatagcatacctatcctggcaagacaattgttactagataaatcatcctccttcatcagctcatcagtagagaagctcacacttttcgtagctgtcttaaaagttgagtcggatgaagacaa

SEQ ID NO: 17650 - DNA, 792 bp, Arabidopsis thaliana landsberg
tagagcttttgaagtatacaactggtcagaatgaagttgtaaagaaagttgtgttgaaaaatgctactaaaaataaccagatgacatctccaccaattcaaaaagatattgtccattgcttttcagaagaggtaactagatctattattgaagaaatggataatgatgtctttggcttgcttgtagatgaatcggctgatgcttcagacaaagagcaaatggcagtagtattttcgcttcgttgataagtatggggtagttaaagaaagatttattggtgttattcatgtgcaagagacatcttctttatctttaaaaagtgctattgattctttgtttgctaaatatggattgagtttgaaaaagctgagagggcagggatacgatggagctagcaacatgaaaggaaagttcaatggactgagatcattgattttgaaagaaagtagctctgcatattatgtgcattgcttcgctcatcaactacaattggttgtcatggcagttgcaaaaaaacatgttgaagttggagagttttttgatatgatttctgttttgctaaatgttgttggagcttcttgcaaaagaaaagatagatccgggaaatccatcggcaaaaagtggaagaaaagattagcaatggtgaaattaagacaggaactgggttgaaccaagaacttttccttcaaagacctggaaatactcgttggggtacacaatataagactttgttgcgtcttgaggcgttcttttcatctatagttatagttctcgagtatatccaggatgacg

SEQ ID NO: 17651 - DNA, 944 bp, Arabidopsis thaliana landsberg
taaatatatattatatatatataaatagtgtgtgtgtgtgtgtaaaaatctgaaaacaagtaatgttatgcatgtaatcaatatgctttcaatactttggatccatatttcttcatcaatttggtctaatttctgaaaattaatagccaaagtacttataatttatcttgccaaaaatgaatgcaggttgtatcacattgtgttgtccatgtatcacatttggccaagtcgctgagattgtagatcgaggatccacatgtaagtaacttataatacaataaatcatagaaaaagtttttgccaaatttggcgggagcaagcgagcgctaatgataaataattgttgattcgaaaaaattcagcgtgttgtgcggctggagcattatacatgttgatagacttaataacaagttgtgggcgtatgtacgcgtgtttctatagtggaaagatgagagctcaatacaatattaaaggagatggttgtactgattgccttaaacatttttgctgtaacctctgtgctctgacccaacaataccgtgaactcaagcaccgcggtttcgatatgagccttggtaatttatttcttcatgatacatcttaccttttttcattttttctgattgatttgttagtgtaatcgaaaaattaattaacactcgttacaaattaattttcgtattttaggatgggcagggaacgcagagaaacaacaaaatcaaggaggagtggcgatgggtgctccagccttccaaggcggcatgacccgctaagattgatttctctatgtgatcatcatttgccttatgtgtaataaaaacgagggttaatcctctgtcgtgtgtgtatgtgctggggaatcttctgtttgtttggaaagtttgacatgagtatttctttaatggatatccccatggaatggatcacaacttgtacgagtgtta

SEQ ID NO: 17652 - DNA, 1158 bp, Arabidopsis thaliana landsberg
agaagatgaagatgaaggaatcgttgtgagaatcgattctccgagtaaaatcgttttcaggaacgatctatgagaattgagatgtttgtaacataagaaaacaaaaatgttagcttactcttacagttttactcattcaaatgtaaaagcaaaataatagtaataggcaaaaaagaaagaaagaataagctagtgtatgttgataaaagttgtgaaaatcatttaaagttattagaatgtatatgcaattctgcttatattttcgagttgtttttttcactcaaccgatcaattgttatcttttccctatctatcactcgtaatgtaataaatttgtttttttttctgggtaaaagtttaaaactatatctgccaatttgaaaacaaaattcgtataatattcgtttattcatatttatataatcagtgttttaaaaagcagtttaggcggacctaggcgcaagacgctgatgcgacgcctaaaatcgtgtaattcgcctaaaatcgtttatacctttaattttcaattaaatttatatttatataaatagttataaagattcatataatgtttgatatagttaaataaatattttttctaatttttgtttatgatttaatatatgtatttttttataaatatttatatataaaattatatttataatatttatattataaacggtttaaacgtctaaaatcgtttagatcctgatcaccaccatgtctagcgttttcttaacattgatcataatatttctccactttctttatttctttggctacggtcaattttcttctttaataagtgggctaataatttttctgtatgttgtcaaaaagaaaacgttggaccccgactccactaataaggtcaaaacttcaaaattcgcataaaatctgtaactatccaactaagcttatattgccacggttcgttaaatacttcactcaagacaaacattcgaatgttttcattacgatttcaataataattagctgatgtggaagtttcaaattgtaaacatatctaattaagtctcacatatgttggaggttagttgacatgtgaaagatcatccagttaattctaaagtaaaaagtatggctaatccaccaatatgataaagaaccgaatttaactctcatcacaaaaac

SEQ ID NO: 17653 - DNA, 661 bp, Arabidopsis thaliana landsberg
cacagagagttcccacaaacattatcagtcacagataatatacatatgttttcaaaatgtcatcaagggctacatatagaatgtacctcttcgggagcaagatcaaagactttgcctccaatggtgaatgaaacagtaggcattttaaaaagttgtgagcagtcaacagcactactctccatttggactaggcatgcgctcgcttatctaagaatttacgattttggtgtcagaacaaaaacaatatcattacttacttccacaagatataaacttgttattgtctttctacctcattaatgtagttcactatcctctcttgagtcatgtgctggctcaattggctctgtatccacacaaccgccattttacatgcaggacaacccgcgtctggaataccactagatgatcttgggttttccttgtccgacaccgattcaatctccatactaaacatgatacaacgccgcacaataagagaacaccaatgttcataatatacagatagttatttggttagaaaatcattggaaatttacctgacgccatgggtgccatcgtaagcgcaaagaccaatttgtgagcaaatcttctttggttgagtctggaagaagccaaagagttgcatattccgcagaaaaaaaagcatatatgattcatt

SEQ ID NO: 17654 - DNA, 629 bp, Arabidopsis thaliana landsberg
acagatttacaaacacttcatcaaaagctgtaacgtgagtgaagatttcgagatgcgagtggtatgcacgcgcgacgtgaacgtgataagtggattaccggcgaatacgtctcgagagagattagatctgttggacgatgatcggagagtgactgggtttagtataaccggtggtgaacataggctgaggaattataaatcggttacgacggttcatagatttgcgaaagaagaagaagaagaaaggatctggaccgttgttttggaatcttatgttgttgatgtaccggaaggtaattcggaggaagatacgagattgtttgctgatacggttattagattgaatcttcagaaacttgcttcgatcactgaagctatgaatcggaacaacaacaacaacaactcttctcaggttaggtaatgatgaaatttgggggaaagaaaaatgtttctaaattgggggagttttaaattttattttgatttgtaaaacgttttttttttctcttgaaattgaatttccttgtttgattttatgggtatgttttattttttaaaaaaaattagactcctggataattggaatgggtcgagatagggttaatttaataacatacttgttatatcat

SEQ ID NO: 17655 - DNA, 2733 bp, Arabidopsis thaliana landsberg
tccactgatgtccgtgtcggggttcggtaaggctaagtatcatttttcaaagtcacaagatctgatgataatgactatttctaaaattcccgaactattcgtggaagtgttctcgacacaccatgatctcgtttgtggcatgttgctagctagcttctgtctccgagtttctacggatctatcctcaaagccctttgtttatgttatctttcttatcaatgttgtaaacctttgctcaaaaactttgtatcttgtttcccctttggagattgaatgaatgaaaacatgttttgcacacacaaaaaaaagagttcttataatttaaaaacaaaaataatcatatcatgtttataaaatataaaatcagattatgtttaataaaatataaaatcctttacaccaaacaataataataaagtaattaaactttgtaaatccaactaaatgtctaataccgtaacatatatactagaagatcaccaatgacggagataaattaataaaacaacctgaattcacacaactaatatcgggtgtctcactcaccattcgattcattttttaaggcggcattgtgaagtcttcatcaaaatctaaaacatcaaataagtttaagaacttaaattttttttacaaatgatttaattaagtctaaaataccatattttattccaaaatcaagaaaatgtttaaaaccctcacccgtccggtttaactagttcactgagtcacgtgttaatgatgagtttttgtgagtttttacggttttgaacttgtcaggttttaacactaaacctaaaccaaaaaatgttcgggtcacggttcaaccagtcagaccgggcggtctgggtcgggcgtgaagatacttgtttttagagttcttttgttatttctagagtctcttatagtctttttcaggtctttacacgtttggaatgcatttggagattatggaacattctggatcaaaacagagaacttatgctgcagaaagaagtgcgaagactaaaaatcgcgtaggtgtcgaacaacaccacccctggtgtcgagcgataccaatacctaacggcaattcaagacgcaacttattgaagttttgaagattttcaaattcggcccagaacttttccttatttctaaagaaggcccatcacgtgttaggtcacatatatatattgttttaaaggtcattgtttagacctaaggttggagaggctaatctccttatctcttttgttcttgggagcaaaaccatgtggagactctttttagagaagatctttcttactctttcttttgatatatggactattgatttcttattcaaattaatgatttcttattcagactatgatttgtgtttctatgttcatgtctgagtaattcacttgttaggtttagggtttctcattagggatttagatgatttagtagattgcccccttggtaggttatctgtagagttctttatcttgattgttcttaatgctagttatagagtagctaactagaacttgatattagataataggtatgtccaccataggtacttgctatttgatccatcatagatgagcctaggcatttaagaaagaacatgtaggctcatagaagggctctggtttagatactaggtaaactaatcattctcattaacaatgcatactttagcataggatttctcggcttctctggttatcttagctttaagtatagagagtttcgcggaacgccaccggttactctataatcatagtctgagttcgagaacggtgcaataacaatcctaatattagctagatctacaatttatctatctcccgagacaattccttagacccgacgctttaatcacttgaatctacaactcatttacttgcttatttgtcttcaatattcaattactttatttagcttatcaaacaacatcataagtctattgtgtgaacatcgagaacttagtggaatacgacccttaagtgctaacgatgatctcttatttgagggagtaagcttaaggcaatttgagctatatcaaatttggcgctgttgccgaagttctcttttagttcaccattagactaggtgtccttttaagtctaaatactactttcctaccacctattcacgtgtttctttgtctattggtctcttctgtttcaggttccttcagattgagaatcacgtttccatggcagattttcacgatagtgtcgaccgacacaactatggtgtcgatcgacaccctctgcagaaccagacggctacaataggcgattttaacagaactgatctcttctacacaaaccgatcagcattcaagctacctccttttgaaagagatgactttgctatacaccctgcctattatgatcttgtatctaaaggaaagtttagaggagctcccgatgaatcaccattggatcatttggaagtctttgaggacattgtttcctctattaaagcagaaggtgtactagctgattacctactttgcaaactcttcccccactctctcgcgagcagaggaacatcatggttgcgtcaattggaaccaggttccttaaccaattggactgatacaaagaatgcattcatgaatcatttcttcgatgagtccgtgacagaggcaattcgtttgcaaatttctttgttcacccaagctccagcagaatcccttagagcatcttggctccaattcaagtcttatcagcgtgaatgtccccaacaata

SEQ ID NO: 17656 - DNA, 657 bp, Arabidopsis thaliana landsberg
atttattacctttggaacataatgtgaactagcgagggcttcacggatcaagaatcccattcttgagtcgctttcttgatcttcaaactcgtcttcctcgttatcttcttctcttcccatgttatttggcatcgtttgagttctttgcaaactgatcttgacactactataactactgctacttcctgttttgttgcttctagaactttcagtaatccctttgtctcgagcaattgtttcctttttctgcaagaaatgctcaccaggcctcgtcggttctagaaccctaatcttctcagagaactgccttgtcagcttattgatcatcttctttgcctcgcggtccatctctcgtttttctatctgaggcggcaaagaaggtgcccggatcaaaccacgttttgtggaagcttcttgaatcttccccggagccgaacgagatccagatttaggaagaaccacatgttccttcttctgcaaggaagacccaacttgtctctgttcttgaaccctaatcttttcagagaaccgccccgtcagcttcgtctgagatccgccttctctactatctatagaagatgccctgattaaagatcgccctgtggaagcttctagaacctttccaatatctgaatctcccattttttcaggagaagt

SEQ ID NO: 17657 - DNA, 930 bp, Arabidopsis thaliana landsberg
tccaaaaaatcaattataagcaatcaaaaatcattccaaaggtaaataaataacaagcacttttttaaattactcaaaaattcataaaaaactagaaaacaattcacctcttgtttataaacctttgtctccctaaaaaaccattcacttgtgatccatgatttatccatactctttatgtaggatttgaaacgactttcaactcgaatataatatcatataagcacaaaaaacatagttgcatactatagtcatgtccatacataaacaaaccatgaaataaacatacaagcaatattaaaaagaaataaatcaccacgcaatttagcgatcaatgtttacttgttttaattaatttttagtcactaacatctacaggtacgttcaggctataagatttgatagttatccttgctctatagcgacccaccgctagtccccgacgacatctatagcgaccaaccataagttgttaaatttctaaacttttagcgaccaaccgaccgttgctacaaaaggatttagcgactgactgtcggtccctaacctttagcaaccaacagttggtacctaataagggtcgctaaagatcaaccgtcatgtagtgacgataacagcgaaaatcgagaagaagctacggtgttcagggcaatccagtatggtctagtttaatcgatcgagcctacaagcaacaggagacctaagagatgctagaacattcaacagagggacatgaatcgacctgagacaggctgaccacgttgagagatcttcacggtgggattctgactgatttggggggaatggtcgattgggcggctctggtggacaatctgaggcacgggctggtgcgttggatgcgtaaatacctagcggagttcaccggggcggcaatttataggttcgatcgcggtggtgcgtaatttgaga

SEQ ID NO: 17658 - DNA, 618 bp, Arabidopsis thaliana landsberg
aatttgcaatgacagcgtcaacgacctcttgagtggtactgtttccaccaagatcttcagtccgacaattcccttcagcgataacacgcttcacagcggtttcaagcctgtcagcaaaagaagggaactgaaggtgtctaagcatcatggctgatgacagcaacaaagccacagggtttgcattcttttgctcttccgttgtatccttccccacgtttcccgctgatgcaccttgctcaaagaccgcatactccgccccaacatttcctacagaaaatttcatagcataagcaagagaatctacttctctatagtgcttgtacattagatcaaggtaaaatgaattttattattacctccaggcatgactccagtacctccagcaataccagcagcagtgtttgccactagattaccatagagattaggcgtcacctgcaaagcagatacaagtaaataaaccaaaatagaaggaagctagcccaagcatcaacaagtgctgaaaaacatttaccatgacatcgaattgctctggtctagccacaagttgcatacaacaattatcaacaatgatttcattgtaagcaatgcttggatacttcttagcaacctcttgac

SEQ ID NO: 17659 - DNA, 2082 bp, Arabidopsis thaliana landsberg
agatgataaaatgtgaataagatagagtatagattattatagttcgattcgtgtgaatcacttcgactatcatgtctttttcatttggtttggtaattggtatcacttctctaaaatcattttcttgttggtactttttatatgggatatatcccatatatatataggaaaaaactgttagttacctttttatagttttcaagaaaaatttatgaggaatctatcattacataaaaattataaaatgaaatgatagatttgatgaaatgtaggaggggactcttgagagtcaatgcagtaaataagattctgcaaacaaccaatcaatgagtatatcatacatgaaattaaacattgagaaatcgtgcaaaatccaccttcaatgatttggtatagctatggttcatgaacccgagaaatatcagtaaggtccaataaaaaaaaaaaaaaacagagagcccataactgatattatatcgaaaacaagagcaccattatgttttttttgttggaatgcatatgtagtagagatgcatgatcgacgacaaaaaaaaaaagaaaaaaaaaaaaaaaagtagagatgcatgatcaattgatcattacacaaaataaccttatagataatgttccacatgaatagatggtttagaaaaaaggaatttcagacacaaggcagaacatgtaaacccaaaactagagtactcatgtctgagttctcaagccttcacaaaacagagaagtagcaaaatatgaactatttattgaatccaaagtctgaaaactataataaaataccataacatgacatagtttcagctctaaagagcattacaataccaaatacaaactattttcaacacaccaacagcgaaaaggaaacaaacaaactgcatatctaacgattagattcacgcacaaacatcctttctaatcagaaaaaggagtaagaactgcgttaatgagacgttcttatttagataaatattttaagatcaaaccttttttcagacaaagaacataacgttctcgatgcctgcgtgaaccttgaagatctctttgtcctccattgtgacagaagaggatgaagaggcaaccgaggcagaagacgaagacgctccacgcgactgcttagaattcttcttcattaagcttgcctcgtagtacacccttcctctagaagcagccttgtcagcataagaaaccggaggaaccagagcgaccggtttggtgcagcgagtaaacgtgaagcacaagtcaaagatgagtttctgaatctgattcgagttgaacccgatttcgtccgaaagaacataataatgagttggtttgcttgtacctatcgctccatgttgactacagaggtagaaatcatactcaaacgggtgaatgatcgtggtatcaacgaccgtacctgaaggcacattgcccttagcccttccatctttgctagttgtggcggggaagaaacgggtttgatgacgtttctgtgccacaattacagttatctgcggattatagccaaccttgacaaaaacgtccttaacattctgtaactccacattgagaaccatatcgaactgaccatcgctgacaccatcacggaatatcacaatcttgttaggtcgtttctcgggggcctgagaatgagcttcgataagctcccagcaagtttcaccaaacccttgtatctcttctttacggtgactctgagctttgactctagctgcgtagcggttagcttcaggccagttaagagtgcctacaacagcaacaatggatggactcatattgtcgtgagcagcgggatgattgacatcagcaccaatgaacatgaccttatcttcttttttgaagaaagagaaaatattatccaccaactccacgttcgttccaccaacctttgcgtttatcttgagggcgagatttgccaagtactgatcagaaacggtatctcctttaatggcagatatggacaagaaacactgagtcactagaccaaggttggtctcggctatccatttcagagtcttgtatccatcgagcttcccagtcatagcacacagaacaagagttggacaagcc

SEQ ID NO: 17660 - DNA, 1511 bp, Arabidopsis thaliana landsberg
aagtcttttttagttgtattttaacgtggagagtctattcagcgaattaacgatcgagagaagcatatagtatggaatgatatccgatggagataaaattttaagtattggccaatcataaatcgatacttcaatccgtatacctcaagaaaacgtccaaagagaaagtctcgatctcgatttctatttcttttaaagtacgccataccttctcatacttgttttggtactagggcaatattctccctcttacttggatataaatcatctcaccaccgtatgtaaaaagagaaaaataaaatcactaattatatgaactgaaattgaaacaacagtcttgttttaaaaatcaaagtgttcatggtatcatagctattacaaatgtacatgtccctttaattagtggtctttaatttgtatatcaaacactaaattactgcatttgactatttgtttgtcaattctacagcaagttggagttttgttataatcatagtaatttgtagattcatgatattagctgcagattcataaagatatttcctctatttttaatttaaattaacaaacaacttcctagcattggagaaagacaattagttagatgatttggtaaaaacattttctcaatacacgtaaagtggctagtgcacaatacacgtggttaccacggacagatactgttttcttgctttttttttcttaaggatttgatatcagtttatcaccgtatattcatgaccaatttaacataacatgttctagttttcaaagaagattaagaactcaaagatttaagaataactctctttatagtttaggaaaataactcaaaacctaaacaatctctaagtcttaatctctctaaaactcatatggtcaaccacaccttgggactcatatatatagagaataattagacctaatcatattaggattaacattagataactcctaatttaaatatctagataactcctaaagatttaacataatcctttgtaatatttaataacttatttattaagttatttcaagcttactccaacaatctcccctttaagcttgaaatcttcttttgacactccttgtactccaataagctctctcatctctaagaacttaatcttcccaagagcctttgttagtatatcagctttttgtcttactccgggaacgtgttctacttcaatttgtccattttcaacgcactcccgaatgaaatggtatctccggtggatgtgtttacttctcccgtggaacaccgggttctttgtgagagctatagcagacttgttatcaactcgaattgttaccttctcacactcagtaccaatgacttcagccagaagttcttggagccaaatagcctgtttagctgcctcagtggctgccataaattcagcttcacaagaagatagcgtaaccacttgttgcttctgtgaacaccatgtgatgggacaatcattaagatagaaaatatgacctccggtgcttttaccatcatgtaa

SEQ ID NO: 17661 - DNA, 1331 bp, Arabidopsis thaliana landsberg
aattttcttttctttcagtttaattttcttatttgtttggttgtcggtccaggttgaaagataccacgaactctcctaaaaaaccggagtatacttttcaactgcaatagcaggagcagattgatgtatgttttcatgttcttgatcacaagtaatttcatttgtttgactccaacttcaaatctttttttcgtagggtattatttattataactaagttgctaaaacctttttcaggattgtgaagcatgaacccgagtattggaaatatgtagaggaaggtaacttgttatggttaagcttattatagttttgcctaattctattagttcttatgatcctgatgcaaacttgatgattttcttgtttggttctttcgtttggtcttaatttatctcaggagcctgttcaaatcaattatgcacttactttcttactgaaatttagaatgttcattagatctcaaagaaacttgttgaactcagtttgcttcttgttccattaggataaacctgagagagacactactttgccaaccgagatatgccagaaacttgaagaccatttgagctagtgagatcaattagaggaccagattcatccaatcattgataagtgccagtaccaacctgataaacgagatacagcatcatctatgtcagcccacaaagcacgatgagcccttgatcagcctcttccacatccagtttcacgaacccggaaaatctgcatcccaaaacaaaatatcggtgcattcatgcatacatccatacatgcattcatgcatacatccatacatgcattcatgcatacatccatacatgcattcatgcatacatccatacatccatacatgcattcatgcatacatccatacatgcatacattttatacattcatacatgcatacacatgcatatatatttgctttcttgatttattgattaggtcattgcttgctactttagtacatttgttaataacttgttcttgtttgtttcttgtgcttatctcagtttgtaacgtgcttgcttgtttcttgcactgattgcttacatgtttaacttgttcactttattccttctttgtttcattgattatttgatcgttgcttgacttgtttgtttgtttccttcttggttccttgatttactttacttcattgggcagccttcttcttggatactcgcttacttagttgtttcaatcaatttctttacacactcgtttgcttgtttcctgatcctctggtttttctttttcttttttacattcgtcgtcactatttcttacatgaacttctctacttgtttcgttgttgcttacgattt

SEQ ID NO: 17662 - DNA, 1587 bp, Arabidopsis thaliana landsberg
atttaaattaccattaggtggttacccattttaaaattaccagaagggggcttaactgcgtatagtatacattttttatgatgtaattttaattataaataaaccagtttacaatttgggatttcttttttaggatttcataacacaccattgttgaaaaatggagatctaaattgacattatatatgaaagacaataaataagatacaacgttttatataaacaatatggattatatacaatagttaaaaaatccttagatgtctgttaaacacagcgttttggtgagttaactcgtatggtataagtttaaagcattccagtaactatattggtatcaaaatctacattcatattaattcaaataattttttacgtttaccaaaataaatccatataaacatgcgattgatcttgggcaagagaggtgttaaaatagtatcttggtatgactattagttgaaatttgactaatgcattcaagaatgtatatttattgtaagaaatgctcacgtatcttatttgataaagaatgctcacgtaccttaataaatacgtgtgcatagagtttgtgtgtatatatagatggttatgatcagggaagaagaacacaacacaactcacctcaaacagacaatttaattccaaaagataaaaacaatcaaaagatgaatgccacaaagtttgttgtgcttctcgtgattggcattttgtgtgccattgtcaccgcaaggcaggtcgaagaagtgtccaaagagaccaaattaggcacctctcttccaaaatctactaccaaaggcattggagctcagctttctgctgctggtcttacttacagcgccagcagtgtctctagctctgctactggtttcaacaatcccaaaggtccagacgcttatgcatccgaaaatggcttcacaagtaccagcggacaagtcattgccaagggtcgcaagacaagagtttcttctgcaagtgcttctaccgctaaaggtgaggctgcagctgcagtgactcgcaaagctgctgctgcacgtgcaaacggtaaggtagcttcggcatcaagggtgaagggttcctctgagaagaagaagggcaaaggaaaaaaggattgagcgtgaggtgatctcatgcatgcgtattcctcaaacctatatattaataatatcctaaaaactacaaactcacaatctctatcttgttcataaataaaaccagagattgtcacctctatatattattgtgaaatgctactcattctcatgtaatggcttttttaaaaataaaataaatgcaataaatcttatactaatcttcctcagtaatgttaaatatatatatagaacacttaatattcttgtcaagaacatgatgactctcagtaacaagtaacaacagaggttttgttgtctggtattggtaataagattcttcccaagtaattaagcaagtaagaaagaagaattttcatcaagaggttgaagatttcttgattttagttgttctgaaaatgtttagcattccggtgaacattaacatctattggatgagacttgaatatctactagtagtactcacgcaaaatgg

SEQ ID NO: 17663 - DNA, 3511 bp, Arabidopsis thaliana landsberg
  unsure (1)..(3511): unsure at all n locations
aaaaaaaacctaatattttcagggatttcccaattcatttttttttctttttctcattacaaccgttttcgatgggttttcttcttctccttagtaaccgctgaaattaaccgcaacattccctatttctttaaattcaatcgatcgttcttcttcctttcaccagtatttccgttctctttccgattcgaaatcagtcatgccgcctaagacgcgtgaaggaggtcaagggaaaaaaaaggagatagaagcgccggcgccggcgaagacatagaaagttaaggcgtcggcggagaaaccgaaggttcaggcgccggcgaagaaagataaagagaaagtgccggttgaggagcagtcgccggcacaaacgactgcgacggcgatggcaaccaatgcggctccaacgacagcggctccaacgacaacggctccaacgacggctccaacgacggagagcctgatgcttgatgattctacgttttatgatgctctgaagcatattcctgctgaagaaattcaagagaatatgcaaactgatgaggtagaagatgaaaatgaaaaagaagaaacaagtgaataagaagaatcagggagtagtagccgaaccttgggctccgattccgattcagaggagacggagacaaacaaagaactcgcgtgtgctaatcccgtggaagaggcggagagacaagatgacggcctagccgttatcgaggaggaggaggagaggactccgcgagcgacgaggacgtcaatgtgaaaaagtccgtggaggatgagggagacgaggacgagagagacgaggatgtgatagtggaaaaaaccgtggatgagaggaccatannnnnnnnnnnnnnnnnngtggtaagtattccatttcgtaataccgatctaattgggtaataatgcaattgtgaactttggacagtactagtaacattgggaaatgctatgttgacatttaggtaatattggcggatgtgggtaatactttagagtaatactacaattgtgatttatcgatagttagtactactaactttgagaaatagtacatagtaaaataggagtatttgtgtaatactggtaattacggggaatacttttgagaaatacagagtaatactatggcagtactatttaccattgagtgatatatgaatagtaggatttgtgtaatactggtaattacgggaatacttttaggaaatacagagtaataatgtggcagtactatttacaattgagtgatatatgaatagtacgatttgtgtaatactggtaattttggggaatactttttggaaatacagagtaataatgtggcaatactatttacaattgagtgatatatgaatgaatgtttgtttctttcaggatatggaggaagcgatggcaatgcagccacttggtatgtacttcccggcgttggagtataccaagaagatgaagttagcaacgaggtgttatatctcggaggtgttgaagaccttcactgacttggaacatcctctaacgaatgttgaaaagaattattttatggagcatccgagtttcaagcacatctaccacctgccttccggatatacccacaagttaatgcggatgtggatgctttttcttcgaacggcatctattgagaagaagaaggaggtttggttcgttgttaatggagttcccatccgctatggtattagggagcatgctttgatctctggtttcaactgcaaggcctatccagctaattatcagagtgctggtaatatgaacttcgccaacaggtacttcaaaaccggggtaattagacgtgaagacgtgaaaaccaagctaatggagatggaaccggctagatcaaaggatacgttgcggaaggcggtcctctattttctaacaagcatcattgtcgtgcctactaagaccggagaaagggctagtccaattgatgatttctgtgttagggctgcaagtgatcttacgttttgtaagacatttccatgggggcgatattcatttgagtacatgttaaaatcgatctcacacacattggatcattttaacggtgtcgtcccgaacactcagtcaccatggcctgttcccggattctgtgtgccgcttgaggtaagtcttttgttttatccttgttacattttcgtaattgaagctaacaattaaatttcatgtgtttttttgtaatttttagcatttgaggccattccatcacttagggaaagattcatacaagaaaaagagggtgcacatgccggttgtccaaggatgtgcaaggtgaatttcaagaggaccgagatgaaagggtttacccttgagcaaatcaaccatgtactcagaacaactggggttagtatttcctattattccttgagcggatatgatgagatttcgttctaataatacgaacgaccattatttccatagatcattgagagtataattagagagaaggatgaagaagtacctcttttcgctaaaatcaagggagtagaggctgattttgataagcacgatgttgtagttgatagttggatgaggcgtcttggtcaagggcgtgaaattagattttaagaggtgtacaacgaatatgtgcaggcccgaatggaagccccaaatgaagaggaagttcccacagctgttggaccgggacacccgacgttagttgatgtaatggagaacctccaagccaacaatgacaagctgaatgaagctttggtggcgcttatggaaatggaggaaaaacaagcaacgttcaaagcatttatgaatgagatgaaagctaaggtaaatctgggtgatatcggatatactgtaccataattggtaatatcgcgtaataccagggtataactaaattacaatgcagatgtctccgacccaccagatgtggaggatgaaacaaccaaggacaagccggctgctcctgttgtgcccaaacgagtgacccgttcaacccgtgcaacctctagtttagtgtgaaaactattcgtgtaacttctccggatttttattttgatttcttgtactttgactttgttttcagattccacaagtactcgtaatattatgtttggattaattaatgtattaggatgttttatgaataatattaaattttactgaaatacgagaaatacctcgtgctactacgactaagagatatactggaaatacaacatgatactacgactaagagatatactggaaatacaacatgctactacgactaagagatatactggaaatacaacatgctactactactaagagaaatactcgaaatatcaaacagaataaccatagtattaccaaacaaagagaagtcttacaatcgaagggaaagtcttacaaagcatacgaaaagtcttacaaagcataggaaaagtcttacaatcaaattaacaataagattaagtaacaataggataacccattacttctttggaacaataggagaacgaaataccacattgctcaagttcacaatctctgcacggtgggc

SEQ ID NO: 17664 - DNA, 662 bp, Arabidopsis thaliana landsberg
ttatcgttgctatactgagaagttagcgcggcgaaatctgcagaatcgattttcctcccaagtcaaatcggagttgtaagattcccgcgtctttgaatctctaagtcttagtcctgtatgctccgcggctgatccaaacctcaactacaagccggtcatcgggattctgacccaccctggcgaaggtcgatgggacgctcgtcttcactctctgaaaaactacgcctacgcgacgaacatatcgtacatcgcagcttcgtatgtgaagttagctgagactggtggagctcgtgtgattcctcttatctacaacgagcctgaagaaatcttgtttcaggtttactctgatgattttgctcttatggattccgttcactatgtagccttctttaatcactaatcttacaactatttattctacttgaacttggctacacctgatttgtttacatcacataaacaggcaatttgaaataagttcaaggttgatgttaccatgttattgttttggctattgcttgccaaaattagttcatgttatcttagtgaatttcatttttgagttgcagaagctagaattggtaaatggtgtgatattcacaggtggttggggctaaaacagggttatattacgatgttgtgggagaaaatctttcaatgta

SEQ ID NO: 17665 - DNA, 1780 bp, Arabidopsis thaliana landsberg
ttcagagtggagctacatagaaagctgatttgaatctctatagtctgctactacaggtcaggtagacacaggatcagaagagaatcagagaactcgacatgtagcaagagatcgaccaagaagacaagttatactaccatcaagactaaaggattatgagatggatgaggaagtgttagatgagatagcaggctatgcttacctcataacataagatggaggaaatcctgagcctgctagctttcaagaagcacttcaagattctgatagtggtaaatggttagaagttgctgatgaggaaatacaatcacttttcaagaacaagacatgggtatagtagaaagaaacaagtcacagaaaccaatcgaatgtaagtgggtattcaagaggaaagcaaacattgcaggagtagaaaagccgaggtttaaagctagactagtagcaaaaggctactcatagaaagagggaatagattttcaagaaattttttcacctgtggtaaaatatgtctccatacgtctactgttgtctattgttgtacacttggatatggagcttcaacaaatggattttaagacggcattcttacatgggtacttagatgaaatgattatcatggatcagccagagggatatgttcatgagaaatatccagagagggtgtgtttgctgaagagatatttgaatgggttgatacagcctccgagagtggaataacaggtttaatgaattcatgcacaagattgtttatgagagaagcaagtatgatagttgtgtgtactttaagggtttacagaatggagagtatatatatctacttctgtacgtagatgatatactgatagcttctaaggataagaagcatgtatgtgagttaaaggtcttattaaactcggagtttgaaatgaaggacttaggcgatgcaaagaagatactgggaatggagatcataagagacaaagaagctggtacactcactatatcacaagagggttatctgctaaaggtttgaagagattttggaatggatcaagctaagtcagttaacactcctatgggaattcatttcaagttaagatctgctacagatgaagaagtacaaaagcagtcagaagttatgagaacgatcccctatcaaagtacagttgggagtctcattattctatgataggcacaagaccagatctagctcattctgttgggttggtatgcatgtttatgagcaaacctctaaaagatactcatgtgtattgtgggtactatggatcgaaagctttgctataagaatgagggggggcttgctctagaaggttattgtgattcatattatgcagcagacaaagagaaaagaaggtctacttcaggagtagtattcacgtttggtgggaacacaataagctggagatctagtctgtagaaggtagtagcttgatcgagtactaaagctgaatacatggcattgactgatgcgactaaggaagcagtgtggttaaaaggtctcgtgaatgagttaggcttcacacagagatcagtaaacattcattgtgactcacaaagtgcgattactttagcaaagaatgcaatttaccacgagagaaccaaacacattgatgttaagtatcatttcatcagagagttggtgagtaatggtgaaatacaagtactgaagattgttactcaaagtgtctcacaactaaggtggagcttgtgttccggataacagctgagtgggtttactcagggagaagaagctgagtgaagtttattacagggagaagag

SEQ ID NO: 17666 - DNA, 2365 bp, Arabidopsis thaliana landsberg
acacctcccaaatcattgaaaatagctccggtgatctcatcatatatgcctctgtgctccgtattgagcatttgaaaccactcgtcatgcttttctttcaagttggaatctatgttatatctcagctcatcaacaactaaacggttggagttatcaatactttctctagaaggctgcaggaaatcctgaatatttttgagtgttgcaccgttaaataacataatcttctcaatttcttgcagagtgtagttccttatttcagccactgtaagttttagttctgcacgtggtcatcaaaaatgaaattgataagcattgttagattttgaaaaaaacgaaataatgaagacgatttactattaagtgcaatgattcagatttaaaaaaaaaaatagaatacctggattcttatattcttctcttttcttgttctcaatatcctccgccaaaaggtgttatgtttctgaccatacatacttcaatcttgctagagagtctgatagaagcaacatagcaaaaaaaattctcaagtaatcttcaaaacagaactcactggcttcaagtagaccatctatataaacttgatcatcatccaaaattcctcttgcaaaacatgcttctttgaatgatggatataagacaccattaaatgttttgatgtcttcacaactcataggacctctgactatgttaagaagcacttgaagatagtattcaacttccattttcctacacacgtagttaatacgacccaaagaaaatcctctaattctcttaacccactgcttattctttccatcccaagtaaaataggcagggatttgagaatatagaagttctctagcacgtttaccattttttccaacatcattattcttattcaaagtcaaccaagccatgaacattgaatcttcattgcttatacgttcgaggacatcttcaatatcagcatctggtttggcataaacaggttgcttcccttcatcatggaaagatagtctttgaactgctgtagatcgatcctgaagtggaaatttgtaaatcctccaaacagcttccgacgcggatacgtacctaaacataataaaattaagtttaaatatcgcatattaacaatgccaatctatgaaatgggtgacggtttaaacaattacctgcagtcaaaccaatctttgatctcatccttttttttctcagtagaatttggaggttctccagaggtcgcattctctgttgttttgtcctggttgactggctctacaataaatacaacacgatatgctcctttgttgatatacttaaataagtatttgatagaaccactctggttacaccattccacgttgatatgagcttgatatcgaagtgacagcttcttattataagggacaacataaccattatcacatttaaaaccacccttctcaatatagtcttctgtcatcctccttcgatagatgggataaccatccttaccaactttggtaatatcctgatgtttctttgggtattgtttagaacatttaccttcaaccatacatggggaattcatatttgcagcaccacatggaccatgaatcattgaattcttgattacttcataaagctcgggttctttatctttatctgggatctctgcagaaataatcttatcgatatcatcagctgttggaagcttacttttagcatccatgaataacaggatatgagcatggggtaatcctcttttctgaaattcaacggtatgcatagctggtttgaaacaaaatgaaaaacaattagactaattcatgaattacttaaaacgtttattaagtataaagtgaagtagaataaatcttacaggcaactgtctttcccagcattttcccatctgtcaaatctttcattagagaatcaagcttgattttgaatatccttgcaacaatatcgggtctatcatcaacagaaagacctcttgcttggcaatgtctagttatctcaggccactttggattacatgtaaaggttatgaaaaggtcagggaaaccgtaatgcttgcagatggccattgcatcatagtagttctggaccatatagcgtggtcctccagtgaaggaagatggaattaaaacctggttaccttcttcattcatagaggtagttccagcttcagaggcctttttcaaactgttgtagttctcacatcgtagctttgattgtttaaacttgatataagaaaggcggttagattcaatagttgtataagcatcacagagaaattgttgaaataacctctttgagcgtgtcaaggttttacactcatttggtctctcttgtatcctgaaagcaaaccattgacgcatacttatacactttttctttt

SEQ ID NO: 17667 - DNA, 671 bp, Arabidopsis thaliana landsberg
  unsure (1)..(671): unsure at all n locations
tttcccagagttttatttctgttcataaaaatgtgatttttacaatgacgctactagttatgcttgattctgctcttaccttacattcttgttctttatttggttttgagatctgctttagctcattttctctgtgaattgtggcttttgtagctattgagatctgattgcgttttgtttgagttcctcttcaaagttgatatcttttgttcagaaggggtttccttttgcttgattgctgtttttcaggtttagctcagtctagaattggttagcttgggaaaggtcgatgaagaacgggatggctgagtgcagcgtatgtcgttcaaggttggtttctcccagtagcaaagctatttcaagggcttatgacaactacaactacaagattagagtatcctcaaaacaacgagctctcaatgtctttttggtagtcggtgactgcatgctagttggtctacaggtaactttttcttacaacggcttggttaatacactagccatttcagtactactactaccatgcatcatatctctatntcagtactactactaccatgcaatcatgcaccatatctctctgttcaatcattcacaatcgtaggaggttgttgtttttcttccaattttgtcatttttctgctaaaaggttacgttttcgtttatcccct

SEQ ID NO: 17668 - DNA, 1581 bp, Arabidopsis thaliana landsberg
  unsure (1)..(1581): unsure at all n locations
tcctgtagcacgaattgaaacaataagacttcttattgaccttgccacttcacacggatgggaaatacatcacttagatgttaaaacatcgtttttacatggtgaactgaaggaaacagtctatgtgtgtcaaatagagggctttgaacaggaaggaaaagaagagaaagtttataagctcaacaaagctctatatggccttagacaagcaccaagagcgtggaacaacaaattaaatcacattcttttggaacttggctattcaaaatgttcaaaagagccatccgtgtatcgaaagaaggttagtgatcatgttatgatagtagctgtgtatgttgatgatctattcctcacagggacaagtttagagctcatcattagattcaagaaagaaatgtcttcaaagagtgagatgagtgatcttggtctatagtcatactatcttggaatagaagtagtacaacacggtgaaggagtaactttgaaccagagtcgttatgcgcttaagattctggaagaagctaggatgaaagactgcaatccagttcatacacctatcgatattagttttcaaccatcaaagtctaaatctgaaaaagaagttgatactaaactttacagaaggaatgtaggttgcctcatgtatcttcttcatacaagaccagatatgtcatattgtgtaggagttttaagtaggtacatgcaaagtcctagagaatctcatgatgtggcaatgaagcaatgcttacgatatctgaaaggggcgactacacttggcttaaactacaatcgatgtactgaaattaagttaaatggctttagtgacagcagtcacagtgttgatgcagactatggaagaatgttagagttcctgtgttttcaaacctctcccacgggttcggcttttgtgttttgcttgagggcaatcaaaagctaagtatgggagagttgatatatccctacttttactgatttctaacatagttttagaatagtttttagagtctttccagtccttttcgtatgttttgagccattacatgtgtaattatacatttgagagctatggagcataataaagaattttggaaactttttcagcagtgaagactatcagagacatttttcaagcgatggacatccacgtnttttgtcgatcgaacacccttatttggcaaagagaatttctacgtttcaccaagtctttaagaagtctctgaagttttccttatttgcaaaatagaccctgcatatttttagtaacctatatacataattttatggtcattgtttagacctatgaaagttttgtaagagatatacttttggagagaagaatcttatccctgcaaagaagattatgaactccttctactcttcttcatattataattcaatgaaatttattcagattatgatttgtgttcctttgatcatgtccgagtaatcaccttgttgggtttagggagtctcactagagatttagattgattagtagatcgataaccccttaagataatttttagagtatttcatctataattgttcttacttctggtttcagattaatcacctagaact

SEQ ID NO: 17669 - DNA, 1256 bp, Arabidopsis thaliana landsberg
cgagtgcatttcgttgagtaaaaccgcagccagagaattcaaataagcacctctgtgactataaacaacacctttggggcttgaagtggtacctgatgtgtaattaacagatatagcatcacactcatctgttggtcgtataacctcgaagtccgatttccccatcgctacaacatcttcgtattccatcatttcctcagatctcttcttccttgaaacagattgagtaagaggctctgggatcaagaccaaaatcgggaccttgtcacctttatttgagaggatttcacaagctccttcagctatttggagaaactgatgatctgcaaaaatcacttttgtccctgaatgtctaagcaagacagcaacaagtgatgaatcatgacgaatgttgagtgtacagagcaaagctccagccataggaacaccaaaatgcaattcaaccatagctggaacgtttggagccaacactgaaaccttgagaatcagaaaacgcaacaaactaagtttcgatctatgaacagaaaagatctccaaatagcatggaatcaactaattaaactagctaagaagggaaaaagggagaaatcgatgaaagagaagttctgaccacatctccggtagagattccgagctgggagagagcggaggcgattctgacgcagcggtcacgagtctggcgccacgtgtacttgacggagccataaacgatggagactctgtcagcgtagacgacagcagatctatcgaggaagctgatcggagtgagaggaacgtagttggccggagatttgatagttccctccattttcatagattttatcgccggaaaagtagtacagtagtagttttgctcgctcgtgcatcgaggaggtatataatataagttaactactctgtaatctagcctgagtttgttgtcgtattatcatatatcttttctatttgaattttgcaatcagactagtgggcgactactggtagtgacctgtcccgaccacatattatttttgctcaaacatgtcataataataattttatgttttttttttttttgcacacattcatttgggatttagttcaatggacctggaagagttggtctatgatccagaagcagtcatcgagcttccagtgtcagacatgtagtgataattgtaattgattctggtcaccaaatcagccagatgagggaagtgtcccacattcatcttcgaagtcaatacctgcaagttccgatagtacatatttactaa

SEQ ID NO: 17670 - DNA, 709 bp, Arabidopsis thaliana landsberg
tgatgtagatgcgcataatgagcatgaactaattgatgagttgcccaatgtcatctattttgtctgaaaaaatattaagcagtgagaaaaaattatgataagtatacttgaataaaagtgaatgcgaaaataaatttgaaattaaataacattaaatgatacaaaggtatcatttaagtgatgatattaatgtgggttatgagcatgaaccattgatggattctttcagattcaccttttttttttcagagttgaagtggttatctatcaactgcaaaaatgatgtagccataaagatgataaactacaacatgtatatatagatccaatgaagatgatgacatgatgttgatgtgcataatgagcatgaactaattgatgaattgcccaatgtcatctaaatgtctgaaaaaatattaagcagtgagaaaaagttatgataagtaaacttgaataaaagtgaatgcgaaaataaatttgaaattaaatgacattaacatcatgaaaaattattacgaactccatgtttgaagctatgtaataatcattgaaatagcttctcgaaacctgaatggagagattgaaagtcacatccggaaaatgaatccttgttcccccatgtaagtctatgaaggtgagtcttgaagttatatggcaaaaaagttgatcatggcggacgaacctttgtacttgtgtaattctgaaaaca

SEQ ID NO: 17671 - DNA, 943 bp, Arabidopsis thaliana landsberg
taattatcatagcaattgttaagaaaaatataaatcatggagtttgcatgtattagttaaattaatattattcgctaatttgtaatccatttaacttggtttgtctaagttatacatgtccgttaattatgtaactaatttcaattttgtgattttttatatcactttttggattattttatataaaataacacttatatatattaaatatattttgtacttgaatatatatacttgaaatttttattaataatatgaaaataaatagttaaaagcttatcaaatttgtttaacaaaaattatttcgattttaacgaccggggacatggggcctaatcgccaacggaacacaccccctcccacaagaacaggcagaaaacatcccgaagccacagctcttccctcaaaaacaagaatgcgtgtaaatttacttttacttctattttttctaaagaaaatatttattaaaatttgacataataaattacattgtatttactaaatttttaaaacaaattaagacaagtaaaatggtcatacattcaagaaaaaacattaattcaattgttcgactaaagaattgccatgaataattatactcataagcatcttaccttaacgttttagtatattttaaaatctctcaacaagcgatatttccgagacattaccaagccttcgtcttccaacgccggtgtagctatggctcgccggcgtcggatagtgtcttttctttgctgccttgttcctctcttcggaaatcaaaactggtttcgtcttaagctttttgcccatctcctcagtttctttccatccttcatctctttgttgcgtcctgtcgtgttaagatttggtggcttctctttttaaagatctcgggttaaccggttcgatgtgctctgccttctactggaagaactagcagctactttgctgccggttt

SEQ ID NO: 17672 - DNA, 589 bp, Arabidopsis thaliana landsberg
gcgcttacaaagtgccatttgatattgatcaggaagtttctaaatataaattaaggacgatctatgattacagggtagtaaaggaaaatgggcgcgatgtaatcggactattccatacaatcacgacattgtaagcagcataccatatcacatgaataacagcatcagtggataccgatctcttatttacaggtttgatttaaaattacttatcaattttaactcaaatcagctcttaggttagagttaaacctgaatcttatttttaagagctggttttatacaactacaagtaggattgggcaaaattttataagctgatagatcgaaagtttagtaaagtttaatatttaaaatttccttgttcaaaaaagcacatacaaggaacaaatataatagtactacataaatatcaaatttattcaaactattatatatttatatataattatttttcaaacgacaaccgaaaacaagagaattttttcaaactgaaccaaacccgaatggaactacaaatggtttttttttttttttggatatagtttctgtaaaaacataaaacctaatggatcataccgaaaccaaa

SEQ ID NO: 17673 - DNA, 2019 bp, Arabidopsis thaliana landsberg
  unsure (1)..(2019): unsure at all n locations
gcctacggcagctgaggtttcaccaacttcagctgattgtctctataccaaaaaaaaaacaaagtcaaatatatgtactaaccgattgattagctttatgtataagtagacaagtgtttacatggttctttatcttgtcaattacttcttgtaactcattgaccttctgctggagctggtcctgtttctgttgcatttcagccatacatttgctttttacttggaagcaagctagtttggtcttgttcatatttcttcccatcacccttagtctaccaggattgtcaggccctaagagttggctaagtgaatcttgtgcttcattcgtcccatttgattgaggaccactgctaacaatctcagctgcctttttctgcaaaccatcacacacaatcacaaaccagtccacacaatcactggctaacctattgcctatcacattcatttcaaaaccatcacaaaccagtccaatttatgttccatcactaacctatccaatttaacaaaccatcactaaattaacaatcatcacaaaccaaattgtcacaacttccaaactataacatactcacaattttttcagccgcatttgtattcactggtgttccatctttcttggtccgtgacttaacccaaacctttagcctcatcacttcagttgggtctgcactaccagttttctgaaaaacacaacatgccaatattagtagcaagctaagtgttttaaaatttcaaaacaataaaaaacataacctaacaggcacataagattaccatatcttctgcaagtctaaccatccctctacgactacaagtgtgaggaatctggttgcgccttctctccttgtagctatcacttataacctaacaataattgttaattagtaactttctacatagtaaatatacttagtttaatcttctccctcaacataccttaaattcagggctagttttgctcttcacaaattttttccactcaaatggagaaacatttttaggtctcagattcatcctttgctggtttgtctttgcttctctaaacttagttacttgccttgatttccaggatctccacaaacatcccatttgcttaagcactgcaaccttttgatactcctcatctagttcaaaccttgccttcaatcaattacagaaaaagtgattattgttgtaataaggaaagatagtcaaatattacaaaaaaaataaaaagtgaagtgttacctggacagatttccagagaagtgtcctgatttcttcacctatttttgtccagcgatcaattgtgatagggacgtgttcacggaccaatgcgcctgcatatgatgctaacttaactgagcctttaccaataggctctcccatcatggtgtactccactctcactctggcatttggatccttagcaatatctttcatcctagttggtccacgctgcctcttggtcttaggttgaacagcatcttcatctccagataattcaagctcgccttcaggttcttctgctgcttgcacttcagcttcgttttctgtctctccattaatgtcttcagcttcgttttctgtctctccattgatgtcttcatcagcttctttttctgtctctccattgatgtcttcagcttctttttctgtctctccatcgatgtcttcaacttcctcaatgttttcggctggaacaacagtttgttctacagctgttggctcaattgtacccacatactccacctcatcattgcatttcttagcagcagcttttttaggttgtcttccacgctttttcttctgttgtcccattgtaaatcacctgagaaaaaatgataaaattaaatcagcactcaaagcagacacacaattaacactaaaagctacgcaatcgactcttagtaagcttttgttcacaaaatgatgagtttgttgttattgttaaatcgcttgaaattcgaattgaaaatgtagatctatgctatgtatcgntttgtgctgttgaattggtcccatttttatctttattag

SEQ ID NO: 17674 - DNA, 1245 bp, Arabidopsis thaliana landsberg
cgctgaaatgtattcacttctagtgttggatctaccactgttgtttttccggtgcgatctatcgcgtaaaacttgccttgaaatggaactatcccttcaaaaaatgaatcgggtgttatctcgagctcagtccaacggttatcgactgacctatacattgcgagaccattgaatgagagcttccctagaatcatatattcgtttttctctctgtttagacccataaatccgatacgttcttcacattttgaaatgcattcaaataattcaaaccattcgctgtaacaagccacatgttcttgcgctagctcaaagatttgacaattgagcaaatcaatagatagacttggatacaagcatccatacgcagaggagtttcttcttaagaacaaactatgtagaacaacttctccattctctttagcttgtagtttaaacatcctggcaggagaaaattatcatctatgtatcatcaagattcaagaatcaatacaagaaacagattttattaccaatattggggacggtcacgattaggacacttgagaaggtagacacggctgctcaagatatggcaatcatcaccacaaccgccgggatcaaggggaagaggacatctaagtgatgtcatgtgtctgaatttgaggagactagaggatcgccaaaaggaacaaactgaccgaaagtggatcagatcaaagggattgtcgattttaagggagatcaagtggagaatctccggtggcaactccgaccattttaccattttattctctgagtgattatagacttggtctgataataatgtagagctaaaagcctaaaactaaacgtgttgactttctctgttgctctcttgattgaggaaatgcgttgactttattacttgacgtgtactacaagctgtaacaatccctgcttgtgttcgattcagttttctgaaagtttaacaaatttgaggagaaattcgaatgagtgtatgattatagagatcattttttttttgtttttgctttcaaattgcctaacggttttttcaaaatccgaaaataaccaacacttgattggtgtattttaaataatctatatggatttttttttttaatatggattttcgaaactataattcacctaggatttgtatttttgtattgtagtttcagaatttctacattaatcataaactgacaagatcctagacaagaaaacgagatcttatagatgtgcggaagcgaaacgttgtgt

SEQ ID NO: 17675 - DNA, 1520 bp, Arabidopsis thaliana landsberg
atgttgtttccattgtatgaatatattcaaaacctatgaatttgtcactatctctgcttcaactaacacaaacctttgtactctccgctccttcacctgcaaaaacaacatctctcacattctctctaaactctcttcactgttactcgacaatggctactacttctaactcggtacttttcctaagttctgactcactgattcatcatcatcatcatcaacctctccatctatcttcctccagatctcactctgtttctctcccacccaacaagcgatccaattctctcacgcttcgttattcaacaaatggcgatagcacctcaaccgaaaaggaaacaccaatcgaactcagtaagatttttctctcgatttctaatgtttccgacattcgtcattctcttactcaatctgtttctcttaatccccagaattcccagcatttccaacggtaatggacattaaccaaatcagagagatattgcctcacaggtataaaatattcataagacttcaactttcggtgatttgatgagttttcgttgaaacccatgtttgaagttttgatctttctggaatttgacattatggttcttggattttaggtttccgtttctgctggtagatagagtgatagagtatacgcctggtgtttcagctgtagctattaagaatgtcaccatcaatgacaatttcttccctggccatttccctgaacgaccaatcatgcctggtgttctcatgattgaggtaataataatcgtttaaagttgcaaacttttgtcttcaagaagatcaaagatcttgtaattgaaatgttagctgttgtatacctttcaaaatgctttaatgttggctactgttttaatggaagatggatgttaactatgataagatgttaatgatctgctagtttgatggtggttttggattctgaatcctgatagattagcgcgagatcttcacctggttggtaattgaattttccttttgtggtctgatagagtgatgagtatattatagttgagggacttcaacttcgctttgctaaaaactcagagtctgcgtagtagaaatatacaactttaagcttgaaagaggttaatgatctcgctaatttggtagaggttttggattctgaatcccgatagaggagctgtgatgctctataaaatagatcaccgcccatatggttgagtataatgtcttgaagatcatttcactgaaaattcagagtttctgcattgcaggcaatggcgcaagtgggaggtatagtaatgctgcagccggaagtaggagataaacaagataacttcttctttgctggtattgataaagtgagatttcgcaaaccagttattgcaggagacacgctggtcatgaggatgactcttctcaagttccagaaacggttcgggcttgctaaaatggaaggtaaagcttatgtgggtggtgctctggtaagtgaaggcgagttcatgatggtttctgctggtagtgtttgatctcacaccattaat

SEQ ID NO: 17676 - DNA, 689 bp, Arabidopsis thaliana landsberg
tcggccagttgatggattgttggcgcgtgcctttgacacttttcacatcgttttgaaaatttttcgcaatccttgttcatcgtcggccagaagaatttgtggcattgtattttaatggctaaagcccttcccccagaatggtttctacacgagccgccgtgaatttccttcatgatcttgcaagtcgcttctccttccacgcaggtcatcaagggtccggataatcgccacttgtaaagtttttcatctactaagacgaaacgcgcagcctgagctttgagtttacgagccttccatttgtccgagggcaacttcccttcggatatatagcttatgatcggttccatccattctgagctgcattcgtctgagtcatcttgatccgcgctgatttgtatcgggaggacgtgctcttcttcgccgagctcaatacttggcttttcaatgaattccactgggatgactcttctcaggctcgggtcggaggttgaggctagagcagctagggcatcggcagatgtattttctcctcatggaatccttgttaactcgaattcgtcaaaattcttttctagcttttgaacatgaaccaggtaggcttccatttttttgtcccgagctgtatattctccgttgaattgattcgcgacgagctgggaatcgcaaaaagcgcagatttttcctatctt

SEQ ID NO: 17677 - DNA, 740 bp, Arabidopsis thaliana landsberg
ttaatgataatctttgagtttgcagtaaggtgagagtttaataaatgtttgtaaatcctagattttgaatgattttaacaaatgctagattcaataagataagatttaaaataaatttaagaatatcatgattaaaaaattgaattaaaagattcatgagcttgattcggtaatgccatataaaaagatgtcatcacaatatacatggtgatttgttggaagatttcggaaccaatgggtcggaagaagccgagtagttctcgaggtggagatgatgagcaaccacctgctgcgtcatctctcgttggtgctgaatccaagaagaaagctgtccaaagtgatgaagaagataagtactccataaatactgaggaagagaaagttgttatcactgggaagaagaagagtaataagaaggttacgcagaagcatgatgacgacgatgattttactgaggctgttcccgagaatggttttgtagggaagaagaagaagtccaaaggtaagaacagaggtggctctgttagctttgccctgctttctggtaaggaggaaacggatgataatgaatctaatggggacaaagatgatgagccagttataagttttacaggtaagaagaatgcgtctaacaagggtaaaaaaggctttgcggtttcagcttttgatgcccttggtggtgataaggatgacgaggaaagtgatggagatgaggaacaagtttcacctatcactttttt

SEQ ID NO: 17678 - DNA, 899 bp, Arabidopsis thaliana landsberg
ccatagcatgtaatttctctttctcttatttcagctctacaagagcaatttcccccaaaaatgtaaatgtaaaagctgagcatgcaccattgagtgcaaagagacatgaaaaaacagggagaagctcgaaagacgtccctaaggggatgcagagaacgatgaagctacaaaaagtcgttcctaagggagcgcagtgtaagttttctgctcaaaagtcgttcataagggaatgcagagcttacagcaaaaagtcaacgctgattccgccgaaatataaggcgaagcgcgaaaagtcaacgcgataccaccgaaatagaaggcgaagaagttcaaaagacgttcctaagggaatgcagaacttacagcgaaaagtcagcgctgatacactaaaaaataagcggtgaagccgaaaaataaacggcaaagagactttggttattcctaaggcaatggaggctatgattatggcttcgaatatatattcggacattcatttgcacgatacattacatcatgacatttgcattcataaacattcatttaaacatacataggatcattatcatcatatcatacataaaaggcagatgcttcggtaatgaggataacgcctcggagaaaaactgaaagaagcagatttcatgcttcgttgtgtacgaaaagaagggaaggtgtttttcgtcttcggctcaaaaagaaaatttcgtccacagcaaagcagttcatacacagatgtaaaggtaaaagatatattacaaggtacgcacaaatttacataagtttctttacaattatattacaaatttctctctagaatcttatgcagcacagtctttcggaacatctatgtaagcttcagctcgtcattctttagcttcatcatcctgtacatattaaaa

SEQ ID NO: 17679 - DNA, 747 bp, Arabidopsis thaliana landsberg
tttatgcttttttacgaatacacatactctacactgtgtatgtgtaccatacagatgaggataaaactctgcattctcattttgcttgatggcacgtggaacaattctgctgcaatgctcaagcgtttaaaggctcaggctgatcatatattacatggactgcatatcttccccctttctataaagaactacacgaacatatgcttaaactctgttctcgtctgtaggatcatgcacaagtcagtatggggagacgaagatcttccttgtatatctcttgcaaccggtgcatccgcaatgcacaaactccggtaaaaatagtctttatttctcatgttcctggtccagtctctgtctgccaaaatagtgcccttccttcctcatttgatctctgacgtacaggccacaaccatcatgggaccggacctgcacggctgcagcagcaattggactcctatctgagcttagccttctcccacagttaagcagctacgagttagacaaacaagctgatgcagtcgaggaagctttggtcatactactggactcactaacaggtcgccgcttaagaatgggcaggtcaataactcgtaaaggcagaaacaccatcagcatgtgctaacaacagaaccagttgggattctattgtcacaactcacaactatgtaataaacgcaacatcaatgaggatcaacggaagcaaagaggtagctgagatttgataacatcagaaacaaagatcgggtc

SEQ ID NO: 17680 - DNA, 1033 bp, Arabidopsis thaliana landsberg
agaacataacaagggtttagcaactcgtctttctcaagaaccttgacaacaaaaagaaccgaaccgaaataaaccgaacaaaatgtacagaacggaaatctggtaaatagaccgaaccaaatgtactaaaccagaaccaaagaaaaaaaaacgaatcgaaaatttaaaaataatcgaatatatactaaattcgtaaccgaaataaccaaaaccaaatttgtactaaaccgaaataaccaaaaccaaatttgtaaaaaaaccgaaatattttgagtaaccaaaaatatccgaaatacaattatattttcaaaaacatacgaaataattaaaaacacttgaaaatatatataaaatagtaaaaatactttaaaataaccgaaaaatatcttaaaataatctaaatatccaaagcaaaataacataatgaatattaaatattaaaaccgaaagaaccaaaatcaaaccaaaattttcaaaataaccaaatggatactaaactttagaaaaaaaaaccaataaccgaattaatacgaaccgaacccgaatagataaccaaacatccaggactaacatttgtatttgtctaaatcatatttctgacattttatttatcatgtagagaagattctttctttgatttgtgttacacataatacaaaaccccttaaagacaacaaattgcagggaaaatgagctgccacagaatctcaaactacaaccatgaaaaatgcaataataatttccgattacatatgcaatggagttccaatatcacaaagatttgataagtttgaaaccaaagttcaatcttggtttaaagcttctttctgaagaacaatacaccaattcgacttgtcgaaaaatctatcaactatcattgcattgcctactccagatgccaacctgttaaagattacagtattagcaaacacgactaaagaatacacggagagcaaatctctcgataaaactcacgtacctttcaagttcgccttcgctaaagacatggtagtatctgttgtacacaacagct

SEQ ID NO: 17681 - DNA, 1377 bp, Arabidopsis thaliana landsberg
  unsure (1)..(1377): unsure at all n locations
aagattgcctgtcaaaaacacaatcattttcaatgagaaagccctcaattgacatgaaattaaaattctccagcatgcttactgagctagcactcaaagtcttatatttgactctcaagattgccttttaaaaatatgcagatgaaaaccaaaattattctacgttggcattttttagatcttgttgactacatgaatatgagaaacttctttgtcaaactgtattggcagtcaatagggatataacagacttgtttttcaaattgcattgaaaagcagatgaattaatctaatgatttggatactnnnnnnnnnnnnnnnnnnnnnnnnnnnccaggtaccgggaaaactcagacgattcttagcatacttggtgctattatgcatgctactcccgcaagagtccagtctaagtatgatttcttacatgctatcctttgacactcacttgactatgtgcagctccgagttaagattataactatgctttgcattctgaaattccatttttatttataataggggtacagatcatgaagtaaagcgtggtattcagatgactatccaggaaaagtatgattttgctcccattaagatcttttaaatatttcgatactcagttctctcgcatacccagatgtgtgttcataatgattggaaaatgttattattatctatatcatatggtgttttatttgaaatcttgcaacttaagagtaattggaataatattacattgcatcaatagtttggtctgaaatatcacataccatacatccctcttgttgaacatatttcactatgtcttgtctgcagatacaatcactggggaagagcctctccttggattttgggtgtcaaccctcgagatgctattatgcctgaagatggtgacgatgggttctttccaacctcaggaaatgaattggtaagtcggaagattttattctgagacaaatggtaaccccacatttatttcttttatcatatagtaaccccacttttctgattctcttttgatgttcagaaaccggaggtggttaatgcgagtcggaagtacagattacgtgtacttgtctgtgctccatcaaactctgcacttgatgagattgtgttgcggcttctgagttcgggtatgtggttaatccaattcattatttcattatttgaaaattggtaatggtcttatatgttatggtttctgcactctcaggtcttcgtgacgaaaacgcccagacatatacacccaaaatagtacgaattggtctcaaggctcatcactctgttgcgtcagtatcgctggatcaccttgtatgtatctagtttcctttacagtttgattgcctttcgtcctggcttaattttggttgcttgatt

SEQ ID NO: 17682 - DNA, 931 bp, Arabidopsis thaliana landsberg
  unsure (1)..(931): unsure at all n locations
cctggaggggcataccattcttagtttggtgaagagttcccttgagggccgttgcaatcatctccatatcagagttagtaacagtccctgtgatctctcgggagtagagtacattggctatagaacgctggaagtacctgatgacagggctgcgtatctgattgctctttgacctggaagcattcaacggtacagagctgnnnnnnnnnnnnnnnnnnnnnnnnnnctcttctctgtcatacttgggcttagatcccgttccactggggaagccaaacaatccttccaagcgcttgattgataacctatactcatgaccatacacagagaatcgcaagaatcccaatccttcacaatctaactcatcagaggtcataccttggtagagctctacttgcagcgtggagaggaattgtactgtctcatcttcatacgctgcatacggataagccatcagagtgtccagatgacaactctggtacaggtgctgaacatcttccaacaatccgagttgtgcaagtgaggtcgagcaaggatacctcgtgctacataactcattcagcttgaaaagcctaccatattcctcagcaggcaatacatcgggcttgtgcagaagtttggtagatctgcgagtctgttcaggcatgtactcgtcttccagatcttcgtctataagctcatacctctctgtcatcgctctcttccatcgggctatctcagctttccttctgaagctttcatattctctatgttctctctcttgccttgaagatgacgactctgtctcatccatgttgtagtcaggatcaacagaagagctgccactgtaattgctcatgattctcctgtagaaatttagaactcaaagctcaaacgtcaataggttagtctctaaggatagcaatgaaaccaaaattgttatcaataggca

SEQ ID NO: 17683 - DNA, 909 bp, Arabidopsis thaliana landsberg
ttggaatattcatatacaatttcatacatattattttgaaaatttataatattatatactacaataattaataacatattagatatttttatgtgtatgatgtgatttaatttttaatacaagctgaaaaatcctagaattgacgggtttagatcgatattaatacaagatggtatattataggaaactctaaaattaacaactaaaatacaagtgtataatcttaaactctaaacaatataaacaatatcaacaaaacatatacaacttagagtgtactatatattgaaaatcaaataaaataatattacatatttataaatcatctttaaaaaacaatttatttaactaaaatataaacttactcgcgatataccgcgggttaatatctagttctttttaataaagagggagtattaatgtctttaatctatgtaaaaaacctaaaattgttttaagaaaatagaaaatgacgaaaattaaagattattaaacttaggtcatttattctttgagaaagccccaaatagtttgaaatcaacgtttttttcaagctccttaggtttggaaaaaataaaattaaaccttaatatttaattagaatggaaaaagaaaggtggaccttaaaaattaaacctaattttaaatattttttttttaaaataatttaaaaggggggggttaaaattttattttaccttaaaaccaaaaaccttttaaacccgggattaacctttaatggtggaggtatggtaaaaaatggtggttagaacctcaattaaatttaaatgggggttgggcggaaaaaaaagttggcctttaaaaaaattaccttttacaaaaaaaaaaacccggggccataataataaaaaccgggggctttttttttttcccttttccccaaaaaaa

SEQ ID NO: 17684 - DNA, 2920 bp, Arabidopsis thaliana landsberg
gtttgtcatgcgaaagtatctgcttttattcgttatgcaatttttgagatgaagcgtggtggtcaggttaaggtggctagggaggtttacgaacgagcagtggacaaacttgcaaacgatgaagaagctgagattctctttgtatcgtttgctgaattcgaagaacgatgcaaggaagtagagcgggctaggtttatctacaagtttgctcttgatcatattcgtaaaggaagagctgaggagttgtacaagaagtttgtggcgtttgagaaacagtatggagataaggaaggtattgaggatgctattgttgggaagaagaggtttgagtatgaagatgaagtgagtaaaaaccctttgaactatgactcatggttcgattatgttaggctggaagagagtgttgggaagaaagataggataagagaaatctatgagagggctattgctaatgttccacctgcccaagagaaacgattctggcaaagatacatttatctttggtgagttttttctttctcaatttggtttaatgatttttggcaattacgcattatcgatttagaattggaatgttggcttcttatattgatcatggttttgataagaatgctaaaatgtttgagattggttgtcttaggcagatgttagttctatcatatatgtcaagcttttagcacatccaagtcattaaatatatgagacagattcttacatttcatggaaagctattgcttttgtattttattagcttatggttctgcggttttctcaaatactaatactgatgtgactaaattgtgtaggattaattatgctttttttgcagagatggtaactgaagatgtggagagcacacgagatgtttacaggtaattctgaaactctttccattcatcttcttttcactcgcggcggattagactaactgttttcatttgtcttaccaaactttacagagcatgcctcaagcttatcccccactccaaattttcttttgccaaaatatggttgctcgctgcacaacatgaaatcaggcaattgaatctcacgggtgctcggcagatactaggaaatgcgattgggaaagctccaaaagataaggtaagcctaaaaatcgtttaaactattatctcattccattcctttaaggacacaaatagttttacttactgtggtgaactttttcctgcaaatagatattcaagaaatacattgagatcgagcttcagttgggaaacatggataggtgtagaaagttatatgaacggtatcttgagtggtctcctgagaattgctatgcttggagcaagtatgctgaactagagaggtctcttgttgaaacagaacgagctagagctatttttgaacttgcaatatcccagccagctcttgacatgcctgagctgctatggaaggtaagtttttcagtcgaatacattcatagaatcgagattcctcagacttttgaaaccgattggataattgaaattctatattgtttgtggcaggcatacattgattttgagatatcagaaggggaattagagaggacaagggctttatatgagcgactcttggatcgtactaagcattacaaggtgtgggttagctttgcaaagtttgaagcttctgctgcggaagtagaggaaggcgagtatgaagatgaagaccaagaagaagatgttattgaacacaagaaagactgcatcaaacgtgccagaggtaactttaaaactacacattatatcagttttgatgattccttgcggacatgttttaactgtttattctctgtatatttcttctactcagcaattttcgatagagccaacacatattacaaagactccacaccagagctgaaggaagaacgagctacgctcttggaggattggctgaacatggagagtagctttggtaacctcggggatgttagtattgttcaatcgaagcttccaaagaagctcaagaaaagaaaggcgatcactagagaagacggctctacagagtaggcattacatacatataatatctcgactattatcttttgaatgttaaagctcaatgtgaaaaaaaaaaattggcaggtatgaagaatactttgattatctgttccctgaagaatcagggacgacgaatctcaagattcttgaagctgcttataaatggaagaagcttaaaggtgaggaatgcgtctgatagtggttaacatcataatgtactaggtaggtgatgatgtctcttgcggtgttattaatattataaccaaatttatttatcaaactatactaggaacatatatctgatctatgtatgcttatttatgactcaatttaaacatattatctcttctctcctgaatattgataatattaacactgcatgttatgtataacacacatttattgaagaaaaaatgataactagtaaaaaatataaaagcagagagtataaacagactagtacttcattcaaacataagaaccataagacagtgttaatgaggatactataaaccgtgtagaaacaacaactatgacgacaacataagaccataaattaaggagattataagcatatatagctttttctctcaattattctatcaaagcaaagattaaaagcttaagcgttagcgattggcttgacataaaccccaatttggttgagagaaacttcagtcttcccataaaacccaacaatcttgtgatctttctcctcaagcttgaatgatgttccctcgtaagtgtattctggactgtgacttaacacttgatatgttgtacggtttgtattgaacttaagcatcgtcatataaccggtaaaaaatgaagacatggcagatgcggatgcattaggtactgctaacctcttaccatagtgtccttcaacggatgtgatgtattccttgttaaaa

SEQ ID NO: 17685 - DNA, 1453 bp, Arabidopsis thaliana landsberg
gggtagtggctgtttctatcgagattggatgtacaagagattcaatgaagtgacgatgaatttgtcaaccgaatacgtcgcaggagttgaggaattcatgacattcgctaatagtcggcctatagtacagagtagtcgaggtaaatttcattgtccttgtagtgtatgcaagaatgaaaaacacatcatctcaggtagaagagttagtagtcatttgtttagtcaaggatttatgcctgatttttatgtttggtataagcatggagaagaaatgaatatggatatcggaactagttacacagataggacgtattttagtgagaatcatgaagaactgggtaatgaatatttttcattttgttatttaattgtatttttcctcatctaaccaaatcaaatttgactcgaaattaaaccaaaattccaacccctaattatgattaagagagaaaattggcaaatttagtgaaactaataattattttttatatgttctaataccaaaattttccttttttttttttttcatatgttctttctaatgttatattttccatatttatttctattttataaatatcttaatttcttaatgatattatttatattttctactaacaaaattttaaagtttttgtttttccacgtgttattttttttaagttttcattttttcttctttaaatattgctttttccttttcataaatatcttaatattaaaaattattagaacttcaaaaattaaactaatgaaattcataaaaattaattagcaatatacctaaccgtgattggtttctactaacaaaattttacattctttgtttttccatatgtttgttttttaaaaaagtttacatttctttttgttctatatattgttttattttcttttcaaaagtatttttaaattaaaattattagaatttaaaaatgtaaactaacgtaatagctaaaatgtcatcaaatgacatatccaaccgcaattggtcgtttaaattcttatgtgtacgcctctagaagcttacatccttaactttgaattagtatatactctctctgttcttttttatttgagtttctaggaaaacaatttgtttcaaaaagattgaattttttaggttttctatgcaatatttattagttattattgatgaattgtaaacgttaataaaaaagatcgaatatcataggtttaaagttataggaaattgtaaaacacaacaaaataatatatttaaaatcaactttaatatgtgtgttttttctaaacaatcaaataaaaaaggaacaaagggagtatttgaaaattttaacatatatatgggcaatttaacacttttttgtaattggaatttaccccatccttttagtcattgatgattatcttaggaagggaatgagatcactattttagaattaacaaattttcttgatgtggatttgttttt

SEQ ID NO: 17686 - DNA, 1208 bp, Arabidopsis thaliana landsberg
  unsure (1)..(1208): unsure at all n locations
gctttggctgcagtgatgtaacatagcaggttcttcgccgttaactcagtgggtgacatgttcaaatacgttgcaggctctaactcgccattgagcagtcgtttagccagcagtgcagtgttctgcagacaaaaccaaatgaaattacaataaaatacttggaagaaacgctgaagtgatttttacaacaaactgagaaccttcacacaggctcacaaatatagacaaactgagaacctccagtaataaaccattcctaaggtattcaaattttaccatgtctcatgaaattcatatatcaactgtcttaaaaacggagcatacaggcacaaactgtatgatcaaagaatcaagagtagaaaattaggggaaaaagtaatgtaatggcatgaatgcagattctataaccttgagattgaaaaccagtgtcctcatcttttggttatatttctgaaaatccgatgcaagagaagcatgtgaagcattctcaagagcacacacttgaggaacagcagcatctggccagagaaatttctcatcctgtcaatcagtttaaacaaaagagttattccaccaattactgaattctaaatagcaggtaatttggtcaattttggtaggaagaaatgtgaaaggtgactgtatgaaaagggagaatatttagcgtgataaaaatgattgaaacgtttagctaagacctttccattttccggctttgtgtctttctcatcctgttcaagatgagatcctctgaacccacctttgttcgtcgccagcctgtttgttctcagggatataacatatgtgctggactgcctccagaagcttccccaaacaccttgtcacgatgagcatcacctgttagtgaatcaaacttctctaagatagcataatgctctgatgaaatacccgcaccacttccagagtttcagcctttaaagaggcgtcttcctcccttctaacatccacnnnnnnnnnnnnnnnnnnnnnnnnnnnnnnnnnnnnnnncaacacattttcctggtcaacaagcatatcctcagattcaaggtccgggagatcacccaataccttcatggtctttttgacaagaacatcaatttcacgttgttttgagtcttcatagtctttgtcagtcagcttccacagcttcttttcaacggtatcatagacctttcgtacaataaatccagggttatttttgcgtt

SEQ ID NO: 17687 - DNA, 1755 bp, Arabidopsis thaliana landsberg
tcagtttttttttttttttttttttcaaaactgaaccacagaaactaaaccgaaatcaagtgctgtgtggtttggttgctcccatttatgatattttggtctgaaaataactgaaaagacaaacggtgaaaaccatatctctctttggtaagctatgagagcaattcttttttcatccacttatgtgaaaatttttttttatctaattaacgttgtgctctgcctcctttgtattatttgatcctgttattgaatgttcccatactagtttcgatttgctacttgttcttttatttccacctctaatacttgttcaagagatactagttcattcacaagtttgattagacttggtggatgtatatatgttttgtctcttttctacttttattcctagactaagtggcttatgttttactcttctatatactttgaattgcagctttcaagaacagaggctaagaagatcagaaccaaagtatatttaggaggatcttgaacagaaatgaacagaagcaagacatcaaacaccaaaaaattgacctcttcataaccatatctatcaagcacatgagatatgagatccaaataacaaaacgactgggaaaaccaaagaaataaagtgacatgaatgttcaagattcaacaattatgttgatatgtggtcagagacgacttcttagcgttgttgatcttactattttcgcagacaaaagtagtccagagagagactttatccccatccttcttgtagttatcaaacaaagaatccatgatccctacacgttgccttggtgtgctcagtgatctcatcttttcccttgcagactctgtcacactcatgtaaggctggaaaccattggatcttttaaaccagctctcgtcttccaatatactctgctccaaacggctgaaagatctccttgggaaagaaaatggagactcttgtccatcaccagagtcttgtctctgcaaagttctaagctttacttttgtagggacaagcatttcacttggaacgagaaatgagttgatggattttgcagacttggattcaccccaatgttccagccgacagcttctcatccccatatccttagcgtacagtgactccacaagcatatgaggacttcttctctcctgcaaaaacaactccttgagacctcaaaccaaaactaaccagatatattaagatcttgagagagactttacccgttgagaccgggagtatttcaacatacgatcgcgcttgatcacaccttcttgcttcctcaaccatatggcttttatatcttcgttcgtgagagcactactgtcccaaccattgcacttcacctttgagttacacagcgaatggttcgatacctgaagctcctctttgatctcagatttggtattggaccaatgctttctctctgtttgtctctggatgatgcttgatgttgaagctttgttggagtgtgaagacttcaataaagcagaaacatttcgcctaacagctcggccacgcacaattgcttgaagccttacaagtgccttaagcgcccgcaacgctttcctggccagagaagccctgaatgcactctgaatcttgatagcagccacattgggagcgagcttcttgacaaaatgttgtgatgtgaaggcgttttccgccatccggacaacctcagcagctgccttggcggctgcaaccgctgcctcagctgctgcagccgtggcaatggctacattcattgcatgttttctctgatc

SEQ ID NO: 17688 - DNA, 1808 bp, Arabidopsis thaliana landsberg
aaaggcccatgatactctcaaagggtccaccacgtcattctcagttcgttaactgagaaaacatattcttcacgtgccgctaactacgacctggagcctcgcgaatctcgcgacgcatgaacgccaacgagttcgccggctagctctagacttgccttattctacaaagtcaaacctccttctcaaccataaagtaaatttccactgtagtgtcaagttacatagacacaaaatccatggcttcagtgaattctcgaagtggtttctgcaactcaaactcaacactctacagcaaacgaacaccaatcccactcccgccaaatccatcactcgacgtcactactttcatttcttcacaagctcatcgtggccgtatcgccttcatcgacgcttccacaggtcaaaacctcaccttcaccgagctatggcgtgccgtggaatccgtcgccgattgtctctccgagatagggattcgcaaaggccacgtcgtcctcctcctctccccaaactcaattttattccccgtcgtttgtctctccgtcatgtcactaggcgcaatcatcaccaccacgaatccactcaacacttcaaacgagatcgctaaacagattaaggattcaaatccagtcctcgccttcaccacatcgcagcttcacccgaaaatctccgcatccgcaaagaagctcccgatcgtgcttatggacgaggaacgagttgactcagtgggtgatgtgagaagattggtggagatgatgaagaaggaaccgagtgggaaccgagtcaaggagcgagttgaccaggatgatacggcgactttgctttactcttcaggaaccacgggaatgagcaaaggagtgatctcgtctcaccgtaacttaatcgcgatggttcaaaccatcgtgaatcgatttggatctgatgatggagagcaacgattcatctgcactgttcctatgtttcacatctacggtttagctgcgttcgctactggattactcgcttacggatctacgatcatcgttctctctaaattcgagatgcacgagatgatgtcagcgattggcaagtatcaagccacgtctttgcctctcgtgcctccgattcttgtggcgatggttaacggtgcagatcagattaaggctaagtatgatttgagctctatgcatactgttttatgcggcggagctccgttgagtaaggaagtgactgaaggattcgcggagaagtatccgacggttaagattttacaaggttatgggttgactgagtcaacgggtataggagcttctacggatactgttgaggaaagtcggagatacggtaccgctggaaaattgtcggcaagtatggaagggaggattgttgatccggttactggtcagattcttggaccgaaacaaaccggtgagctttggctcaagggtccttccataatgaaaggtacattgatttgagaatcgtttttgattacagaaatcatcaatgtaggattttttcttaccatggcaattttggttgttcttggcaggttatttcagcaatgaggaagctacgagttcgactcttgattctgaaggatggttaagaactggagatctttgctatatcgatgaagatggattcatattcgtggttgatcggttaaaggaactgatcaagtacaagggttatcaggtgatatatagaacacaaattttgagcatggtcgatgttgatgctatagatttatagtccttttgaagcattagaaaatgctgatgagtcaaaaatcgtccaatgcgaactgatgatagagtctgcctgtagta

SEQ ID NO: 17689 - DNA, 1922 bp, Arabidopsis thaliana landsberg
tttcttttttttttataagcattggtatgtatgaatttgtgaactttagaaattttactgaatctagaaatatgtcaaaaaagacgcctccttctctctctaaaatatctctctgccttctctctaaaagtttaagtcgccgccggccttagtataccggtttcggtggctttttgagcaccggaaccggaattccatatgttcttcttgcttagctccgttttctctctctttgtccggcttatctgaacttttttactcccaacggtttcagatctagatctgaaattctagatctacaaagtctaaatctaatttttttgggttgattacttgcttttgtcttcttcaagtgcagccccatttctcgccgttcaatccatggcagaggcaaactttttccgatccttcaccgcctcagatctagttttctcaccattgaagatctagttctcttacctttctccatgagacgctttccttcaggtctcggggtgctgattttgcttcaccgccgttcatggtaaggagtattttggttttgtttccttttgtgagagttcctagtctcagatatgttgattctatgtttgttttagactttgtatttttaattttgattatcaggattatgagtccggaaagtatttgttcagatatgatgtatttgtagcttgagttttttcccctttagtttgatcttgtattcgggagttttcatttgcttgccgactttaatctctagaaggattgtttccttgtcggcctttgtaatcatgtgactctaaattttatcaataaaatccttattctagtaaaaaaaaaaaaaaaaaaacatttacttgtttgcaattcagttctcaaacaagtttaaaccaaccttatttatttaacataattttaaagtaaaaatcctaaattttataaaaatttctgcgttagaaatatggaaccgttttttctgtaaaatatttttaaaaaaaaatacaaaatgatttttattgtgaaacgaaaagaatattgttacttaacgaaaaaatgattttttaaatattacttgtgaaaatctcttcttttttttcttttcttttttgcgtctgatttgatttatatacaatacataataattgacacataaatttttatatatagatactacattatatatatgtaagaaaattagtgcaaaaacgtatgacgtaaatgatcggtatcacgaaatgtggcacactctgagttgtcaatattcaattatattatacatcaatccattatccatattgacccaccaaacaaaaatctcactgcctttcattattaatctcactttctttccaaatcctcttttctatttagtttaatcccaattttttaatctattctcgtgactgcattcgtgtcccttttatttgattcttcatccctcgatctttgtttaatcggcgcatcaaacgagacgaatattttaatttttccttaaacaactattaatatgagactgagagcatgtaaaatgtaaattagtgactagttgaaattttcatggatttatttaaatcaatacaaattatggataccatttatcctttggcatgtatactcagtagactttgtttttcttaaagtctgatgcaccatataattcagattcacagtgagtaaaaacttggatatgtattgaagttttgtatctcaacggttccacttttgtttgcactacttgtcacaggcaccataatccaatcaaagtgtgaagaggtatatggtcactgggccatgatgagagaaaaaaacatcgaatcaaagtgtggaaactcttgaaaatcgagatcatccaaccactagactgctaaaatagtagtagcaccccccccaaaaaaccttctaatggatttatgaaaatttagtactatatgctatag

SEQ ID NO: 17690 - DNA, 1068 bp, Arabidopsis thaliana landsberg
acgttgccaagcttgaaggactcatctctgacctatcagctacataatgcaaagagttatcaaacaaaataaacccaattttcaaaaacattattgaactttagatatatctgtagagagatttacaaggtgtactcgctagtttcaccatgagatgagctccttcaggatcttgaccgagaaaattcttgactgcatctacacaaagacacaaaaaataactgaagcggttcataaaatcagtcagtaaataatccataagaagattttagtccttgtgttatacgtacatggtgcagtaccaatatcaagatctccattctcgaccatcagactaacttgctttccaagaaaattgttacacatttttatcaaaaaaacttaaccaaaaatactgaaatcattattaaaacccgacccaatatgcctttaaacccgactcaaacataacccaattacccttccttcacacaatgtcacaatcggaaataattctcaggggctcttcaagggccaagagtaatctcaaatacacttgttataaaatttatattaattttgatttttttaaaattgaaacttgttacaaaatttatattaattttgatttttaaaaaaattgaaactagagacaaagaataatgaaactcagatactttgattttattactaacccaaccaagcaaaatgggttaaagacacgacttctctttaatctgggtaaaaacttaaaaaccttgttttgccttaacaaaatcaagtcgacatttacactttgctccgccatcatcgttttctcagacaaaatccaaacacaaaatcatctccattgtgaccaaactcttcgcgaaagcaaagatccagacaactctaatgcgtctttttcgtcctctacaaatgacgcaagacttttattatcgattttattggaattgcaaagaaattttggttagaatccgataatccaactattcatgttcactcaaatgacgcatctccatttgaacaattgaaaccctttgatcactcatgtccgactattcatgtttttgtcctcgatctgaaata

SEQ ID NO: 17691 - DNA, 1410 bp, Arabidopsis thaliana landsberg
  unsure (1)..(1410): unsure at all n locations
tatagataactcacccttgagagcatatgtatgggggccgacttatcttgccgttaaaatatcgcaaataatgcctctctagatgttctgttacacgtataacatctaatgatggcaaaacctgccagatcttcaaaacttgtacatgttgattattattcttgaaaatatctatcgcccaaataagacttaagccatcatcaaactcatgttgtctcaacaaattctcactttcaaactcaacctcttgatgaagctctttcccattagataacttctccaaaaagctcataactcttttattaatttccgagtctacgatcgtttccagagatttcaagaactcgtagctgagccaaaccttccatatcgaattctcaaaagaaataagcttcttgttttgaagcttattaagatcatcaagtgctgttgttgatctttcaatacactgagctaatgattcatcttcttctgcattatggaaacagtttcgtgctttcgcatcatctaccaactgtctccacactgatctattgttcgttaaagtcgcttcgtttccaagaatccataagcaatacctacaaacaaaaagagctaaatcaagaaactgagcatagctaaatcaagaaacagagaaaatgtttacatacctcgcacgagtgagtgctacattagttctttgttggttagataaaaaaccgatagctccattaccgttagacctgactgttgagattataatgatatcttcttcaccaccttgaaacccatctacagacctaacactcactgtaaatgtcccttcggtattatacttttagcctatcctttcttggatcgcaaacacttgagctttgtaaggtgaaatcacccctacgcttatcgttctcccggtctttcttgatactaaagattacataccaaaacaaaaatcaccatcaaactttactttaaagactgatctgaatcaacattttgtttacctgagtaaagctttgagactatctcagccacaacagagacttccactaggtttttcgaactatatccttcaccaaactgttctcttccataagctatgttgataaaagagtaaggtccatacattttctcaggaagaaactttttttcataacttctcagtctcacagaaggagcatccaaaatcttcatatcgtaaaactctctgttcgggaaaatactaatcgaannnnnnnnnnnnnnnnnnnnnnnnnnnnnnnnnnnnnnnnnnnnnnncaacaccaatctttcgaacaaactcctcccaagatcagcctctgaagcaatctgcacataacttattaagtaagcaaagagaagagagtgaatatgtgtataattagtctaatataacagaaccaacattgctttttatcattgcaggcaatt

SEQ ID NO: 17692 - DNA, 1973 bp, Arabidopsis thaliana landsberg
caagaaaaaaacttaatggttattatctacactcaataaataaatttcaaacaataagaaactcaaaagatgaaaaataatgcaacaaatcatttcttattacacttcagaatccatggccaaagaaaacccaatactacaatgccctcattgcaacgcattagtatggtattcagaaaaaataggggatgatagcaaaacaggagaaccaatcttcacaatatgttgccagcaaggacgtgtcaaacttccaccaatcagaaacactcaagattttctcgacaaattactacaaaacagtctcacattttgtcttaacatacgtgtctacaattcgatgttggcattcacatctatgggagcaaaaatagatcacagtgtcacatctggcagaggaccaccatgtttcagaatacatggccaaaattaccatcgcattggatcattgctaccactgccaggacagtcaccaaaatttcttcaaatgtatatctacgatacaaaaaatgaaatctccaatcagatgatgacaatgccgcgcaaaaactcagcaaacgaaattcaagaagatatagttgtgggcttgtttaagatattagatgaccataattgcttgtgtatgtttttcttgaaagctagagatcgctacaaagcaaatgaagttcaagacttaacaatgagattggtaggacaaaaaggtaagggtaagcaatatgatctaccccaagtcaatgaaattgcaggcttaattgtaggggatataacagctacttctggtcacagagatgtagttttggaattgcagtcacgccacttacaagaaattagagatgatcatcctttgttgttcccttatggtgaatatggattttatacataaataccacatgcagtcaccacagccgacgaaaggaaatgaacttctctaagtataggagacttctatgcttaccaaatacagactaggctagtggaaggaatgacactcataaaggcatgacggttattccaccaatatgttgttgatgtattcactgtcatcgaacaagaaagacttcgctgggcaaaagataatcaagatcaattaagagctgatctatacaaaaacatattcgatgcagtaagtaaaggtgatactaaaggcataaaaaaagggaaaaaagtaatttaaccctcgagttttacaggaggtccaagatacatggtcgaaaaatatcatgacgccatgacaatatgtcggacatatggtaatcctactttgttcataacaatgactacaaactctaactagccagaagtaaaggaacatttggcaacctatggtggcacatctacaaatgaaagacctgatattgaatgtcgtgtcttcaagatgaacttgaagaattgctattagatcttgaaaaaggcacattctttagcccatctattcctggtacgttaagtaattaaaagtacatatgtacaaaactttttttatgaggttagataataaaatgtgttttactttatgtacagagctacatacaattgaattagactaccgcatgcacacatacttctatggttagtctagacatctaaaatccaaaccgctgctgaaataaatgcaatcatctcagttgaactacccaacaaaatcactgacccactcggatttgaacttgtagaatgcttagaccttgtggaatggatagaccatcatctccttgcatggctaataaggtttgcaccaaaaaatacccacgcccatacaatgctttcacctagattgaaaaatctggatatattgtctacagtcgttgctccgaccaagagaactttgtcatcaaaggaggaacaaagttagataatcaattcgtcatcccgcataatctcgcaatcttaaagaaatatcaagcgcacataaatttggaatggtgtaacacttcaaatgttatcaaatatctattcaaatatgttgcacaatgaga

SEQ ID NO: 17693 - DNA, 1008 bp, Arabidopsis thaliana landsberg
agcctcgaaccatccttccttaaacaacctaacgcacatatcactcatttgaaacggctcaaagtgaacatcagcaccaccatgcgtgattgatctcaagcttcacagcagcagtgacccactccttgaattcgctctcagcgtgaagctgagccgcaagcaacacctcaacgttagacaaagtgtactccttcttgtcctgagtcacagtctggttgaatataaacccaactctcctcatccctaaccctaaagcaatagcatcaacacgtttctcttcctcagagtctctcatcagaatcagattatcctccatcccttgctgcggtggctcgtagatgaaattcacctcaacctgaccatcctcagagacgttcccgtacatgaatccaccgcgtttgacagcgaaggcaagcgactcgttgacgaaatgctgaaacgcattggcgcaatcgcgatcgaacgagacggaatcgcagtgagccttctcctggcgaccgacgcgcatctgtcgagcgattagatcttcgacggtcatcttcctcccgaaggaaccagcaggcgttacagcaggaccaccacgaatcgtacgctcaccttcgtaagcaaggtagaccatagagccgtgagctagattgagagacgagattcggaggttaggatcggccatgtcggtgaacgctaggaaaccagaagggctcttagcgaggagaaggtttctattggtggataaggtttggttgtggatagggatctgaagctgattttggattagggttttgagttgggagactgtgatatgaggtccatctacactcactctctccaatccatctctgcttcggactctgagcatcgtcatcttcgttcgttcaaaaacccagcatttttgaggaacaagaacaaaacagattcgaggaaatctcgaaacctgcttgaagaatttataagacaacaaagagaggatagagaacaaatacttgacgtatggattttttggaaggtata

SEQ ID NO: 17694 - DNA, 2254 bp, Arabidopsis thaliana landsberg
ctctttcttttggacagctttcattttctcttttcttttttctattttgtttcaaaattccatccatattaaaataggcttgatcatgagaataaaggaaatactaatgatgagtttctcaataatgcaataagatgcaattattatgagctatttactattgaaaatgagcaaataaatgtcaaaacacaatctggttaagttagagcaactccattgtataggattcatgtagtttctaaaaaagcaaaatgtattaatattttacttttacatccaaaaaaccaaaaaaccaacttatatgagtaatagaaacgatcctaatattaggaattttagagattttctctcatctgtttcttaacttttcaatatttttattttttttaattgtatgagtttctactaagaaactactgctggagttggtcttagcttcccaatgcttctccacctatatatatgcatatctccttcttaaaactcatctcacaccaaaacacaaagctctcatcttcttttagtttccaaactcacccccacaactttcatttctatcaaccaaacccaaatgggtccaagttcgagcctcaccaccatcgtggcgactgttcttcttgtgacattgttcggttcggcctacgcaagcaacttcttcgacgagtttgacctcacttggggtgaccacagaggcaaaatcttcaacggaggaaatatgctgtctttgtcgctggaccaggtttccgggtcaggtttcaaatccaaaaaagagtatttgttcggtcggatcgatatgcagctcaaacttgtcgccggaaactcggccggcaccgtcactgcttactacgtagcgttttcaaactcacactcactcataatgttgctaaaactgaagagactcttttctaaatttgtttgaacgtacatgtttgcagttgtcttcacaaggagcaacacatgacgagatagactttgagtttctaggtaacgagacagggaagccttatgttcttcacaccaatgtctttgctcaagggaaaggagacagagagcaacagttttatctctggttcgacccaaccaagaacttccacacttactccattgtctggagaccccaacacatcatgtaaacatccatcgatctattttctctaacaataagtgaaagacgtagatcttgactctcttgttcttgtctctgcagattcttggtggacaatttacccattagagtgttcaacaatgcagagaagctcggcgttcctttcccaaagagtcaacccatgaggatctactctagcctgtggaatgcagacgattgggccacgagaggtggtctagtcaagactgactggtccaaggctcctttcacagcttactacagaggattcaacgctgcggcttgcacagcctcttcaggatgtgaccctaaattcaagagttcttttggtgatggtaaattgcaagtggcaaccgagctcaatgcttatggcaggaggagactcagatgggttcagaaatacttcatgatctataattattgctctgatctcaaaaggttccctcgtggattccctccagaatgcaagaagtccagagtctgatgaacacatattacctcatatttctctgcttgtttgatgcaattcttaaattcctctgttattccattgtacattgtcaagatcaataaagcattcctggtttcaaaatataaaacaactgaaattaaacctttaaagagactactattgtctttcacttaccaattaaaggacaatcagaaaaatatggagacataagaatcaacaagtctaatgcataggtacctctaatgttttcgtttcagttctttgacctacaactacaagtacctagatgaacaagctctgtgtaaacaagtcaaatacgcttaaaccctatatacatgactttgttactaactgattaacactaacagctaaactcagctaacaaaagttgagtttcttgctcattctttggatcagctagtggcgtctcaacgttgttagagcatgtatctaaatctgtaacttcatttgatgcccctttagcctcaatagctgaagcattctcctctatattcttctgaggatctttatgcgtggtttcaggagttcctagaagaacaatgaaagaaaagaggcatcaatttctaaggctaccaattctgattttataatttcaatacaagctaatatcatgcatttatactatcttacaatttact

SEQ ID NO: 17695 - DNA, 1422 bp, Arabidopsis thaliana landsberg
aagacatattctcatgatccaaacaacttaaacctcaaaatatatttttaaaaaatagaagtttcatgaaatgctgaaacctttttctgtagcaattcgtggagagctggttagaagatgtgcgggggatattggatggcttagttctggcggcaccaaggtcctctcaaagctttcattctcttcgtgcatttgactacatgatatatatgcatattgctagactcttaaaccaattctttatgtagagaaatgagtcagacgaggtgctagtgaaggcatcatatctttccgatcttcagcgtagggttcttagaaccgaagctgctcttcgtgagaaagaagaggagaacgacatcctccgacaaagagtccagcagtacgataaccggtggtctgaatatgaaacaaagatgaaatccatggaagaaatttggcaaaagcagatgaaatctttgcaatccagtctttccatcgcaaagaaaagcctagaggttgaggactcagcgagaaactcggatgcatcggtgaatgcaagcgatgcaacagatttagattcaggaggtagtcattaccaaatgggccatggcaggtcaagaagtgtaggcgtgggtttaagcgtgataagccggttagctgaggaatttggacaaagagctcaggtatttggtgacgacagaaagttcttgatggaagtgaaatctggtcaggtggaagcaaacttgaatccggaccgggagctacgaaggctgaaacagatgtttgagacatggaagaaagattatggagggagactaagggaaacgaaactgatacttagcaaacttgggagtgaagaaacaggtggttcagcggagaaggtgaagatgaattggtgggggaggttgaggagtactaggtattaatgggtacttccttttcttgagacgcacgtctccttttctacacgtttgatgtaactacggtttttggctttgctgctagaagtgagaaggctccttgggactgaaagagtcatgtttttcatttgccacccaaatctattggcaaattcagtaaataatttttatattatacagtatatctatttgtcaaggattccaaagtccagtgaaccattgctgtatttgaatataaatagtcgtggcaaaaacaaatcaatatttatatttcttaaatagttaagtttttatcaagctaattaaaatggacatagcgagaaataactacaagggggtaaactatgataataatataaatttccttacaagtttgtttgtttgtaaacatatggggttagaaagggaaaaaaaaaattgtttgattttatacaaacaatggtttgagtttaaaaaatctttttcgggtttggcaaatgtgtatttttaaaaactattttacttcttgtttttttggccgatt

SEQ ID NO: 17696 - DNA, 1979 bp, Arabidopsis thaliana landsberg
catacttacagaaactatgtttcttagcatactcatgtatccatttccctaaatctaacgatcccaacagagctcaagatgacagaacactcaaaagggtaatctcattcggcttcaagtacttaccttgcatttcacggaacaaagataaagcctcgttcggtctgtttcttctcgcataacccgtgatcatagcattataacaaacaacacacggctcaacaatccgatcaaacacacaacgagcagcatccacatcttcacactcagtgtacatattaataagcgttggacaaacatagacattatcatcaagccctagtttcatcgacaaacaatgcaattgtctaccttcttctaacgcctttgctactgcacaagctttgagaagagacgggaaagtgtagttgtcaggtaaaataccatcttctaagatctcaacgaagagactaaaaacctcaagaggattcgtgaagcgagaatacccacgagccatagaattaaaaatgacaatatctggttcagacattgcctcgaacaagtggcgtgcatatgacattgaagactccgttggagactcagtgcagaaatttatcagcttagcgacgaaggaaacatcttcaatatgagatttgatcgcgtaagcttgaatttgcatcagctctcttagagaattgcatttggaaatcagaagaatcgggttttgtgtattcacagtgtcgattttcgaatgcttagtgaacgtttctgcgtgtgagaatgatgatattagtgaagctgaagatatcgccattaaagctctgattttgagcttctcattattcaaactgacaaatcttgaggataacgataagcctgttatgtgatcatgacccgattgcaaaattaataatcaaataacccgacccgacccgaattgtaatttaataattaggtataaaaatcgtaaaaggcgctacgaccaatttattttccaatttaattttgctttttaatctcttttatttttatttttatttctatcaccgagaaccacatgggagacttgagagcggcggcgagcttgaccggcgctggttgacggcggccctctcaatctccagtattctcggttcaataaaagcttcaaaaaaagaagaaaaaatcgaaaattcacgaaaatatatattaatttcaattttccatatttgaattcttccagatcttatgattccttgttcttcgttctcgtggcggtttctgaattgttgatgcgacgatctcatgcccgttctagggtgaagaatagtagtagtagtaaatccgatatggatccgattaagttccagatccgttctgggaaccgagcaccgtcttcttcatcgacctatacgctaacaaaaccgaattcgaaacacgcgaaatcgaatctcttgttaacagttggttctatatctgtagtgttgggggttctctttctttgctattcaattttgttctccggcggtaatctgagaggatcgcttcgttatagcgtcgtgatcgacggcggaagtacagggacacgaatccatgtgtttgggtaccggattgagtcgggtaaaccggtttttgaattcagaggagcgaattacgctagtttgaagttgcatccgggtttatcggcgtttgctgatgatcctgatggagcgagtgtgtcattgacggagctggttgagtttgcgaaagggagagttccgaaaggaatgtggattgagactgaagttaggttaatggcgacggcgggaatgagattgcttgaattacctgttcaggaaaagattctgggagttgcaagaagagttcttaaatcttctgggttcttgtttcgagatgaatgggcttctgttatctctggtgagttttcaaaatcttctcttttgttcaaaagtgagtctttttatctaatgccattggagttgtatcagtttctgtctcgctctttttgatttgagagtatg

SEQ ID NO: 17697 - DNA, 1318 bp, Arabidopsis thaliana landsberg
tggcatcgttaaattgttcattgtaagtagcatcaacaccatcaacaacaaacaggactttttggtttacaagacttggtttgatggcatcaaatatgtcttcagaactccttctccttgtaagatgttttagtaaacttggtgagatgcggttctgatagattttattggcattggttaggaagcagtagtgttgaaagtggcttgagatgtcgtcgaaaacacattcagcaagtgtcgttttcccgacgccttggaaaccccaaatgccaattgtacggacctggttcttagattccaaatcaagcaatccatagaccgctttcttatgacgatacatcccaacaagaccgttggagtcgtcagatgtgggagaaggcgattcatttgacatatcgtccataacagatgtggcttcaagtgcatatctctcaagtccaaatccagattctacagacccagacagactgttgagtttgtacttcatatcgatatctgtcatcaatcccagaacgctcgcgtctaggccaactgtcgtttctgcgattatatctacgtccggtgtgtagtatttagaaaaataaatattgattagtctgatgattagatcatcgatcatcttggaatcatcctccctgtcaaaaaacataaaatatataggacttttggagaaaggttaagagactattttactatgatttcttaaaaaaatatatgtaacttgtagagagttttaattatgttggaaagaatataaaaaaaacttttgagaattattttgtttgaaaaagtttagtttatgggacttttaaaaaaaaaggtttttaaaactttcaaaataaataaagcaaaaaaagtctaattagcaaaaaaaaaattggaaagactttaaactctttttaaagctttgaactagccaatcaccccctatgagttagcaaattttttaaaagtaaaacaataaaagaaaccactacaataaaaaaaccactacagtaatcggtgattaccaattgcgcgaacaaaaattactgttggtgatgctaaccaattggtccagtgcatccctccaacgattcacggttctccgattttctctcgcttcatgcctcctgaagtcgtcggcgaatttaccagttggtcttgtcaaatcccccggatccacttcgtagaagactgtttcgattttgatgagaggcaaacgctcaattatcttcgcgagtacgtccaagcacaagacggaagaggcgtagttctccgatatcacaacggcagcgatcctagactcgttgatagcccgcttgaccccagaagatat

SEQ ID NO: 17698 - DNA, 1329 bp, Arabidopsis thaliana landsberg
tgatcgaaacatctctgtcgggtcctagcgatccagagatgtggatcacggtggacggtgtgccggcgattaggatcatgaatttgaattggagatttagagggaatgaggttgtgactgtgagtgatggtgtttctttggagatcttttgggacgttcatgattggctgtttgaaccctctggttcgtctagtgggttgtttgttttcaagcctaaagctggatttgaatctaaatgtcttagttttaatggtggctatggtgatggtgaaggtgaggatcatgatgtggaagatgacgattcgtcgcccaagtattgtcatgtcctatatgccgtcaaagaactagaatttccatgtcaaaaaaattagttttgtcaggtagttaattatttagcatattgtaatatctgtgatggatatgtttctggttagcgcaaccagcggtaattgataatttgtcatgcatgtgacaaaacgtgaattcggtttttcttgaattgaaaatattgaattttgatgcgttttggagaacaaaatataaggttgaaactagttaaaattgatggactgttttttccgaccatctctagttactctatgagattagtttggactcgttcctatattccggtttgttatgttgatatggctttagcaacaaaaaaacgaactttgttaatttctagtccgaagcattaaggattacaaaaattatctaaagaatatgttgccggttaacactagcctttgttgtagaaggattaaaagaaaccagaaaatctcgcaatattctgtaaaaaaaaactagaaaaatctcgtaaattgttctatcatatatttaagaaacctagttcatcattgatcttcttcgcgtggcaactcgtaacgacacaatggacaaaagtgattggtctcaaaccactttacggcacactcatcgtcaaagtcatgtccacaaggtaaagccacaagtattcctccagtgttaaactcttccaaacaaattgtgcatctttcgcctgtataattaatcttgtcatatattttcctggttaaggacttgaccacgagtttgcttgcgggtcccaaacagaaattagtggtctcgtcaaacgagacttgaactgcttcttcgatatcagtctcgtcgtgaggaaaaagatacaacgacacttgtaaagcacacccgggagaatgcccattacttgcagaagaagttattttaataacatataaaatatgatacatcacaactggaatattttggtcgctgatccctgcttccttcatgaaattacaccagtctactagacaaaaatctgagttg

SEQ ID NO: 17699 - DNA, 3134 bp, Arabidopsis thaliana landsberg
  unsure (1)..(3134): unsure at all n locations
ttgggttcccaacacattatccttagggtttagatttccttcataaaaacgtgttcgattgaatctactggattcacggtgttggtagcaagtcgaaggcgaagatagtgaaaagttaggttgtcgtcggaatattcagtgaagaaacgatgaagaaaatatccagcgacaaaaccaactaaaggaaggaggaatggacaaaattgtcaatacttgtctcaacaagtgcccattctcataagcccaataaaaagtacccttgttctattttttggcccaataagtacctaatcctacaaaagcccccatgaatctttgttattgttattcaaaatgtgtttatcaagaatgtatcaaaaaacttgtatagtttgttttctcggatcaattatgggagaattaattgtgagaaagggatggaaaagttaaaaacttataagatcaagaacaatgcataagtgtttacgaaaacaggcactttcatcgtatgaaaagatgtttctacccttccattatcctaactcatgtgactgttgnnnnnnnnnnnnnnnnnnnnnnnnnnnnnnnnnnnnnactatgaggaactccggcgataacactgcttggatggtggtgcgaaacaaagacaataacttacaggtacaaaagaaacaagatgctagaagacaacgacaagatctcgagggccaaagctagtgacgatggtgagctccgacgaatcggcgactacgatggtatagacagaaaggagaagcgagggtggtagcttacatatcaagatgtaattttgatgaagatgacatataatcttcataattatgggattcaagtcgtcgagatctctaattttcaaaatttcagaaaaaaagaaagaaaagagatttacgcttctcaattgtaaattgataaacaataaaatagttaactaaaaggatttcaagcatttgctttgggtttttgttaattgacaaatattatatcatcttttccaagtaaatagacaaatttgattttatctctttttacaatttgatagaaaaaggggaaaatgatgaatacttacaatatgtttggttttccaattgggttttctatgtacactatcctttaggggttcgtttttgtgaacgtagtcggagcaaaaattcttaattgatttgatgagcctctaagattagaatttttaggttccataaacactatcttattagggtttagtttttttctatgaaaacttatttaattgaatttattaggttcgtctcacgagatttgttggcaacgaagatcggttgtgcaaaatgaaaccatgaagaagattggcaacgaagaaggaagaaggaagaagaaagaagaaagaagaaaaaaggaaaaagagaatgaaggggtaaaatcgtccaattgcagagtctaaagtgctctttttcaaaggccatcccgattgtgcccaaaatcaaagtttttagaaatgttcccattatgggattggcactataaagtgatgggcattgtctaattaggcatttcttatagtctttgtggattatggcacttctctctcacaaacatgactattttaccatgtcactcctaaattctaaattgaagcagatcggagttcctgcgtttgttgcatccaaacatcatcttccaccttcaaaatccaaacaaatctcattacaactctctctctctctctctcttcctaacaaagtataatagagaaggaaaggattatctcttcgaaatttgttaattgttatcatcggatatctcgccgttggtaaatacaatttcctcactcattcaagcccagatcgaattatactcgaattcaaaagccacaatcggctttgagttccacgctcggagcatggtcattctggtttccagatcctgttttattaacaacgatgatgaacttcgttgaccatatggaacaaatttggtctagaattagtgatgaattggagattaactgattcgaaccgcgtgtaagattagaacccaaaggttccctagatagtatccctttagggattagatttttttcatcaaaaattgtttaatttgattgatcgagttaatcggagaagacgtgttggtagcggtgagagttggaaatgaaagagatagtgttttgatggaattaaaagtgacggtgttgacaaatatggcgtccatgaagcaagtgcagcagtgagaaatgaggattgaagatttttgttgcagggaaatttgttgacaacgatgaagtgttgttatcaacactataacctcacacaaggggcaaaaccgtcatatcccttaccaatatatgcttatttccataagtccattcaaaaaattcattttttctaatttttttttttttttttttcgtcgaaacaccatttctattaagtaatcggaaagagactttcttctagagagagccaatcaggaaccgacttgcttacatgggaaaaaagactattgcgggctcgtgctttttttgcaaggcaatcggcccgcacattgtaaatatgagaaaagaacttaatagtaaaagaagagaaaaaacagacaagggaactaaaagtcaccaactcagcaagaaaggtaggccactccgaaggattttcaagaagagagataagatcaacactgtcagatgcgaaagagcgattcattttttctaattattgggctaaaatgtgtccaatcttacaaaagccccatcttatttggctacattctattattgtgtggtccccaaacacttttaaaccgtatagagttggcataagcgtattttacatttatagggacaagggtcaaacacaggccatccagtcaccacgaaaggatcggatatatctcaacgtgaaaacacgtgagttaaatcaagaccgtaagatcagatatcaacggctctcccgcatctggatcatgccgctgacaataatgtgaacgtgacttctacctaactcttctattgtacttattcaaggaatctataatcatttttcacaaactgccataacgatttagaaaagtagtcaaaattccaaaagttgaaggatattttttttattgtcatttgacacaaatatatagagtagtaaatgtaatctttcatgtccaaattttat

SEQ ID NO: 17700 - DNA, 807 bp, Arabidopsis thaliana landsberg
atccccttttaatgtaaaagcagtacatagttagtccgatgcagacttgttctattttctcaatccatactactacggattatagcttatgaatggtaaacaaaaagcggtttaaatcgtaaaaggatttgtccgtcctaaccaccgcaactattcgaaacctctcactcttttaattctaattttaactaattaacccttaactgttaaattacattcgagaaatattctttataggttctatacttccaatatagttagctaatatcatcaaaagaagaagtcgacgtgcgtggcatccactcgcggacgacttttccctcaaccctttacctttcgcaaaacctagatctacgccgcctctgtttctccggtcatcggtgctcttcgccgtgaccgggagaggccccccagtggctccactcagtggtttggcttccttctcgtcggcgatttgacgagttagcgtttcagatctagagattctgcgatctgtgcgctttactcccgcttagttttggaagtcgtttgtgtccctgtctcctcgcattactccggtttgtttggaggctctgtttgtgtgttgctgttttaggtgtagcttgtagtgctgaggtctcagctccggcgattctgatcctctcttttagtctgcaccgggggagttggtctctttttggtgctttgtgttgtggctggttgttagagctggcttctctagctgcttgcaagcttcctctttccatttccaagccaaaggtggttactttgtttgtggactggttttagtccgagactagttttgcc

SEQ ID NO: 17701 - DNA, 1365 bp, Arabidopsis thaliana landsberg
  unsure (1)..(1365): unsure at all n locations
taatgtgagttactatctaaacttcaaaaatcatttatatttttatagcgtatacagaccacatagggaagagtgcttatgtgtatagaacaactaatcacatagtgaatggattagcaaactatgcattttagttaccgcttagtttgcatttatttgatgtttgtctgatacttgtagtcttacattgttagaggatacacataagatgttgcttatacaaagtgttcgactgtacttttatgttatgaataaattatagaatgcttttcgttccttacacattataaaaaggaaagatggagtgtatagaataacaagatagcttattatgatgaaatatataattaaaatatattgtaaaattgaatgtgtatgattgaaattttattaaatacaaaagttattagattaaatattataaaaaatgtgtgaataattatttactatttgaaatttaaatattattaatgattatttgaataaatttatattttatacccgcctttttaggcgggccttaactagtatatatatatatattcaaattagaaaatgggtttaaaatctctctttacatataaggccattaaagacccataacttaaaaggcccattaaaatttccggctcttgtgtcgtgtaccgtacgtacggaacaaaaccctaaaatctcctctcacattatgggacagagacaacatttgacccttaaaattcacaaactatagatctctccagtccctttcgcaaaccttagcagtcgaaagatcgaaatcgaaaatccctaaaacgatgaaggagattgctgcatttctcctcgcgaaactcggtggaaacgagaatccaacctcaaatgatctgaagaagatcttggaatccgttggtgctgaaatcgatgaaacgaagatagatctgttgttttctctcatcaaagatcatgatgtgacggagcttattgctgctgggagagaaaagatgtctgctttgtcttctggtggtccagctgttgctatggtggccggaggtggtggtggtggtggtgctgcttctgcggctgagccggttgctgaatctaagaagaaggttgaagaagctaaagatgaatcttctgatgatgcaggcatgatgggtctctttgattgatcatttggttagaagtttggtttaaaggtcaagactttatgtttctgatgttggttttattgatggatctttgtttaatattgagacttgtgtttctgatgttggtttaatgatctttggtggttagactctatgttgggtttacttgtgatttgagaatgtggatgatgatgatgatttagtattgagnatgtagatcaacgagttgttatgtgattga

SEQ ID NO: 17702 - DNA, 3489 bp, Arabidopsis thaliana landsberg
  unsure (1)..(3489): unsure at all n locations
ttatctaaacttctggattttttttttgtcagacttacgaacttatcttcttaacattttctcttgccttattcactctttaacttaatgatccaactttttacttaatcttattcaggggacctcctaatgggactacagggaaagtaattttagtgtttgatgagaatccttcagctaaagtgggtgttagatttgataagccaatacctgatggagttgatcttggtgaactatgtgaaagcggacatgggttcttctgcaaaggtacttcatgttcagtagtgcattatttactggtccgcagcagctcttgtctcacacaatgtttcttctgttttcttatagctactgatcttcggttcaaaagctcgagttttaaggatctagttagattacttgttaacacattgtttgaggtacttttcagttgcaaagtaatgaattttttttttccttgtgcttatattttttttctgtttccaggttgtccattctgagagcagaacttgtccgtttattctatttttgaaagatgctgagaaatctgttgctggaaacttcgatttgtactctgcgttccaaatcagacttgaatatctcccagaaaacgtaattgtgatctgttcacagacacactcagatcatctcaaggtgaaggtagttactgtactatgttttgctccagttgcatgctatttctatgctttgagctcattttgcaaaagttatttattctctcttggaatagaaaattttcctagggcaaagaagtgtgtctccttttttctttatgtatatcacatgcattaaaataattgccacaatttccttgtcagcattttctgtatttcatatgttgaagtagacttttaatattgagtagctgttttctagccggctttcagttctgaaacgtacttgatcccttttcttttaatattgactaatgttactttcgctctatattcctaggatattggaagacaaaagaagcaagggaaggaagtcccacatgcaacagaacttctagcggagctctttgagaataaaattactattcagatgccacaggtctgttactctgttctactagacataagcattctcgtctgttgtctgtcaaagaaaccttatacttgatggagctaattattcccaggatgagaaacgtcttacattgtggaagcatcaaatggatcgtgatgctgagacttcgaaagtgaagtctaacgtcaatcacttgcgcatggtatgtctttcatctgaatatattgtatgatttttggctgtattcattgaagcctataactctataactctatcttatctctatttttcaaaacttcattgcttgactccaagtctcatgaaaataaattattgatagccgaccttctagaatatgttacgttttctctggtgtacaagattatctgttttaaaacaggggatttacagaagttttaagaacgattccgtaattgcatctcaattcaggtgttgcgacgacgtggtctaggatgtgaaggacttgagacgacgtggtctaggatgttcctgaaggatctcacacttcaaagagacagtatgttttccctttgttcggtctaatgacaatggaatgcttttctaaagagttgactttgcctttctgctttaggtgtagaaaagatcattggatgggcttttggtaaccatataagcaaaaatcctgatactgatccagctaaggttactttgtctcgagagaggtaattggcagcttgtccctgtgcattactgctcttaaatatctgtctcggtgtattgagtgcgaactttggatccttgcagcatagaatttggaataggactcttacagaatgatctaaaaggttctacgagctcaaagaagtctctcaaggttagcaaatttcctttggaattgaattgttgtttacttattttcattatggcaatggctcctattatgtaagaactgttaattttctctgtggctttcaggacattgtggtagaaaatgtgtttgagaagaggcttctaagtgatgtaattctgcccagtgacattgatgttacatttgatgacattggggcacttgagaaagtcaaagatatcttaaaggaactggttatgcttcctttacaacggcctgaacttttctgcaagggggaattaacaaaggtggttctcttctctgcattatgtttcagaaaactcccataattttttgaggtcctgcctcggatttatcacagatgtannnnnnnnnnnnnnnnnnnnnnnnnnnnnnnnnnctaatttggctttcctcaataattcttctctcctaaaatttggtagttaacgttatgcattggtggcttctcacccagtccgctcttgttcgtcttatgcagccttgtaaaggaattcttttatttggacctcctggaactggaaagaccatgcttgcaaaagcagtggcaaaggaagctgatgcgaacttcatcaacatctcaatgtcaagcatcacatctaaggtaactgaatactctatgaaaagttctaccgatttacacacgggatctttttttcaaacttgtgttcttcttaatactgcagtggtttggtgagggtgagaagtatgtcaaagctgtcttttctttggccagtaaaatgtcccctagcgttatctttgtggacgaggtaatttttctggttaattccttgcgaatttgcttgtaatcagagcactgacagtcttacaatgttattactgttttgtaggtggacagcatgctaggccgaagagaacacccacgtgaacatgaagcctcgcggaagattaaaaatgagttcatgatgcattgggacggtcttacgactcaggaaagggaacgtgttctggtccttgcagccacaaatcggccttttgaccttgatgaggctgttattagacggttgccccgtaggtaaattataaatcgcttccttgttggactaagctttttttgttaaattgacatgacagttataggttgtgaaaattttgtggtattgacttctgcaggttgatggtgggactaccagatacttcaaatagagcatttatattaaaggttatacttgcaaaagaagacttgtcccctgatttggatattggtgagattgctagtatgactaatggatattctggaagtgatcttaaggtaaattcctagtaattccttaaacctttgttgtggtctgccaaaagtgatagagaaaggcaaagtaattaatgctcatattattttctcttttggtgctctcagaatctatgtgttactgctgcccaccgtccaatcaaggagatattggagaaggaaaaaagagtaaattttctttgtacagagccaagaaaactttacgttgcgtaaacttgtctatagaacaaatgcttatgattggatattatatggtaggagcgagatgctgctctggctcaaggcaaagttcctccac

SEQ ID NO: 17703 - DNA, 848 bp, Arabidopsis thaliana landsberg
tttggaacgtaagggcacaaatgtggcctacactttatgccgtctacatgtactcggagatccaattctctaggatatccagtttttccaatgatgttgactctgtggtgatcaaaaaccatggagactttcttctcctcgtcaatgaagaaactcccatgtatatatgcaatcggcatgtcagccaatggtcctgtatccatttccaagatcttgctccacgacactttatcatactcgatcttagtcgagatccatatctcaaactcatatggattccagtcgttgtgcgtaagtaaagccgcaagcttctcttctttaacacaagataaagtcacatagtcatcatgcccagcgctaaacggtagacgcaaaagtggcccaaatctctcacttgtgaaatcaaaacagattatgtgatcgtcgattttgtttattgcgttactttttgtagcacaaaagtaggtatttcccttgagagaaacaccacgctgataacacgatactatccaatatggagggacatcaagagttgtccataaatcggtttcaatatcgtagatttcataccatgaaaaccggttttcgggtgcgtggttcacggccgaagagatgtaatgatctataaacctcaagactttgtggctacgacaagagttgttcttgttcacgtaccctagagcgtacctgtacatgtccatatcctgttctacgcggtgctgcttctttactaatgtgcagcttcataaagctctgactttgggataaagccgacaacgtattgcaaggttaatttcaatgtcctcatatacttcatgggaagtctagatacaatattctctatcaaa

SEQ ID NO: 17704 - DNA, 1433 bp, Arabidopsis thaliana landsberg
attgttcggatccaatctaaagagttgaatacttatagtaactcggttaacttgtgaatcaagttttgattgttttggagtatcttttttttgtcccgagttactagttaggatattccctttgattagtacccaacactgacgtaacgcaataacaacaaagaacgatccccaagaacaagaagatcatactgattatttgttctttttggtcagacactgagacacagactgatatataaacaactttttgaaaatccgtgaatgtaaataataatattcacagagagaagaaatgatatatgccgactaaaaactggatatatagatatatctatatatatattcagtatcatgcctagaaacgtacagaaattaaaaaccttcaaagtcttctttatgaagcatgattttgagtccctaacaaagacatatatatcttgacaaaaaaagagagatatatatatttcaaagaacaatccagaaaatcataatttatcgcaatacaaataatgagtcacaatttcaaaactatagtgtatgttggaaagatacatcatcaaaactaggatatatttataatttgaataaataattaaattgttgaaaaatgaaactatacaaattattagtcaagatcagagtaaacccaacaaaatgtacaaagtatatcacaagaaattaaaaatccacctgatcatataatacacacaacccaaatcgacccaagtatttgattttgattttgcttccacaaaaaagtattatttatctcagctactggttaaagaaacgagagcttcttctaattttttaatttattaaaaacttttcaaatttccaacgttaattttggtcaagacttttccgctatatatcaacaacaaaatttaaccgtaaaaatcaaattaacctcttatttagttttgatcgtaattaaccttctatttaaaatcatctaaaagaattccaaccattaaaatcatgtaaggaaacataataaaattggaattatatcttctctggttatcaaaatatatatcttctctttatgcgaaattagaatagaattatgtggacgttaagatatttgttaaaaagttttaaaaaaaaaaaaaagtaaagtacagataagagttttgaggggtaaaatggaaatacaaagaattttatagaacactcttctagtctcctagtcttcttctactacaaagtacaaagcagtgttcgtcaactatcttcttctcactctgttttcgtttagagagattttgcagagatgtcgagaagagcaatggtgataaagatgccaatacttatgatactgatttcatcaatggtgatgacgatggtcgagtcttcgagatcagttaataatggtcatgacgattctgagatcttacgaagacacttgctcactaatggcctcggag

SEQ ID NO: 17705 - DNA, 1209 bp, Arabidopsis thaliana landsberg
gttcgtcaatcagcaagggtgaggtaagttcgatctctattcaagcatgggatgaagatagagattggagatatgttggatgagttgcagtaagttgtgaaaaacgaaggtgaggaggctgttttggacaagtgtatcgcacatttgcgatagaattagaggctgggaagcagagtgtacgatagaaattgaggttggaaagcagggtcttataagggtaagtatctctttcttctcttaagaatgtctttttatttacattcattgtttgctggtaagaaaggtttattctgtatgtgcaggcaatgactaagttggatatgtgagtatatatgattatatatggttaattatctattatctactatgtttatctttattttagtacacttttcttttgatatttaattttgtatgatgatattttttgtcataaatttacttacaaaatttgataatttattacataatttaaattgctataaatctttactattacccttttaaaacttttttcattaaaatggaaataaactatatttgatcagttgagatctatatttaagagaagtgagtaaattagattaaaagaacaacgaggatcgatcaatcatacgtgccattaatgattgagacggacgtgcttcacattcgttgactctaccattagcattatttctccactttctcatccgatctcttcaccttgtataaccatatactcatcagcctctctcgccaaaccccaaaaagcaaaccaaacatgattcaagacaagtctaaaggtgcaaagcaaacgcttctagagcggccatggttcctcgctgtggctctagctggtcttataggtggcgcaatgctcatcacaagcttcatccgagctacggacaacaccttgtcactctgctccacggctaagaacacagctgcgtccatagccgaatacacagccaccccaatccaactccaatccatcgtccactacgccacttcacacaccgtccctcaacaatctttcgaggagatctcgatctctttaaacgtcctcaaggagcgtctcccttgtaactttctagtctttggcctcggccgcgactccctcatgtgggcctccctcaatccaggtggcacaactgtgttcttggaagaggatcctgagtggatagaggccgtcctcaaggacgccccatccctcagggcccaccatgt

SEQ ID NO: 17706 - DNA, 729 bp, Arabidopsis thaliana landsberg
gacattgattcagagcagatggctgagttacttggggatgcaggaaatagtgtaagcttgttagtcttcttgtaaagtaatcaaattgattgtatgtagtgacttgttgggtttgaatctagtctcatcttggagaagctgtctttatgattgataagcttaagatggtcactcagcctttagtgtggctatctctgttttcagggagcttcgcggatctcgttttgtataggtggagcttatggacatggaacgcaagtgaggaagcgagctaatgtgaccattagactttcctccatggtcctgaatcatcagatagctcttgtggtgctcatggaacagctttacaggtgaaacattgttgcttctgttcctgcattccagttacattttatatgttgtaataggttttctgttttcaggtcatggactattctcaagggacaaaattaccatcactgatgaggcatgaatctctactttttgggatttcttttgctctatcgtgtacaaagaaactgcattgctaaaaagcttctctgctggtagttgtatgagaaattgtttattgtacgacgtaagtttgcaatccaaatttgtttgcttctgatgtagtttagattccggtcatcgagtgggactcctgttttcctttgttgcatcactattgtttttgaaaattaaaaattaaatgaatgcggaagcaatgatccgtctccatatcgggtt

SEQ ID NO: 17707 - DNA, 746 bp, Arabidopsis thaliana landsberg
atggggataactatccagtcttcactcgcagaagtaatagaaaaccagcataagagacagcatcgttttgagcacttaaacaagattgaatcagtgattgaagaggtacgacaaaagggactcacacaagagaaagacactgccctatggaaaggtgcaaaggagaattacaaaaacagattcagtacttgtgaaacatgggaagcaatccgggaggctaagccacacatggaggggtatattccccatgccacacctaaatactcttttatagcatggcttgcaatgaggaaccgattagcaaccggcgattgagttttcacttggcaaatgggctcaaatctgtcatgcgtcttctgcgacgaaccaatggagagtagagaccatctattcttcgattgtggttacgcaaaagagatttggtctggtcagagcaggaagatcatcagaaacaagttcactacaacatggagtgctatccaagctacactcttagatgcctcattgggacgaacaaacctcttcttgataaggtactcttttcagctggccatctacacaatatggagagagcgcaacaacaagagacatggagacacacctttatcgcattctcaactacttcgaaacatcgacaaacaagtccgaaaccgaatctcttatattcgggaacaaggagacaagaactatgatggatgcatgaaagtttggtttgacacaagataaaagcaaagagcaatagaaaa

SEQ ID NO: 17708 - DNA, 797 bp, Arabidopsis thaliana landsberg
  unsure (1)..(797): unsure at all n locations
actatttttgttttcagtgcggtttgataaatttgatggcatgtcatctttgttttatctccaaattaaacatttaggaccatcgttgtacccttgttttttgttttaaaaaaatcaaaacatgaatttggtagttcgacatttgaatctatacagtatacaactactcggagaagaaagtcagttctcattttcaaatccaggtaattacacccacacctgtgggctgtaagacagaatttacaatgttgaacagcctagctatgattcagaagcaaaccaaggactacaagtcaggtttagttttcagccaaaaagccaatcggaactctttctttttgggtaacaaattcggttcggtaagatgaaccgattagataattttttggaagagatgaaccgatcagttaaccaaagaaatttctattttttctgaattttttattttcggatttttgggctccgaaacaaaccggatcttgacaaattagtaaattaccaaatgaaattcttaagaaggtaacttttaccaaaatgccaaacttcaaaaaagcaataaagttcaacacaaacaataccattaggcaaagaaagagaaaatctagcgggaacgataatttctctttgcaggtttcttgtcaaaacctggagcgnnnnnnnnnnnnnnnnnnnnnnnnagacccatcttgccaagaatatttacagggatagccggagggatgctaagtcccatactgcggctaaactcattagcaaactccaccagtctggtcgtgtctctagcaatcttcttctgc

SEQ ID NO: 17709 - DNA, 921 bp, Arabidopsis thaliana landsberg
gtagttcaggttaacatcgatgactcaaacgcagagcggtgtgtggggatcggcgctgatcttgatgaagatataaagaccgagctcataacatttcttaagaggaacgtcgcaacgttcgcctggtcaatagacgacatggtcggcatagatcccgaggtttcttgccatgaattaaacgttgacccaaccttcaagccaattaaacaaaaacgacgaaagcttggtccggagcgctcaaaagctgttaacgatgaagttgataaacttcttggcgctggctccattgtcgaagttaagtaccccgaatggctggcaaaccccgttgtcgtaaaaaagaagaacggcaaatggagggtttgcatcgatttcatggacctcaacaaagcatgtcctaaagatagttttccgctcccccatattgatcggatggttgaagccacgaccggcaacgagttattgtcattcatggatgctttttctgggtataaccaaataccgatgcataaagacgaccaggaaaaaacatcttttattacagacagagggacgtactgctacaaggttatgccgttcggactaaaaaacgctggggctcgctatcagcgattggtaaaccaaatgttcgcccctcagctaggaaagacaatggaggtttacatttatgatatgttggtcaaatcgaaaaaatccgcagatcacattgaacacctaacagcctgcttcgaaacgttgaacaaatataacataaaattgaatccggctaaatgttcattcggtgtaacgtccggcgagttcctcggatatattgttacaaagcgcgacattgaagcaaacccaaaacaaatacgagcaatcctagatctcaaatcgccgcgcaacatataagaagtccagagattgacagggagaatagcagcg

SEQ ID NO: 17710 - DNA, 1628 bp, Arabidopsis thaliana landsberg
taaagaaacacatgtcgttcaccctatttttttaaccgtctattctatagggattcgtactcaatccttggctacacaatccatgtgatttcgtttaatttctaatgcagagagtgaatttggccttctttgcatttgtattatgtgattttttatttttgttaaattcttccaatttttgtagagtgctattagaagaaaatcattgctatgatagcgcttattaatagtgtattacatagtttaatttgttgtgcttagaaaaaaaataaaaaaaatatagatgcatgtgttttgtggtcattataattccatatagcaggaatcagagaccatatctaaagaaatacgtgaaaccatcaagagtgtgttcctccaacgttggtacaatccccaaattaagattgtcagtaagctcaagttcacaaagaccgattgttcctcttttaggtacattattatgtaatcgaatattgaatcttgtttttaaaactcctcacaaatgaaaacttatccctcaaatatgtatatagcaaatacgcatgtggactttgcatcatccaaccagctctttggtctgccaccattggctcctctccgttcgagaagaaatgagagaccaagaaatcctgcgactgtgacagcatattacggagataagaacttttcaagattcaatataccaaaaaccgaagagagacctgaatggttttggatgatcatggcttgtgtaccttatttgatatccctaaaaatgagtgaattcggtttctacatgaaaccttttcttgaccaacacggcggtgccattggagaaacgatcataaacatgatcccaggagcagctaacaactaacaaaagttattcatggggtattgcgtcctagggtttacgttgggtggtgaagaacagaaacttgcctcattactttaggtatataatatgattatgggaatgcttttagaaacagcaatgcagatcatctggcgtacgagcgaattcttaccgtatctgagatttgagaaaccaaaaaaaacactattatacaaatttggcagattatggatttcactattagtttttcattagcaaaaaccggcctaatttgtgatatttgggcttttatgaataaaggcccaataaggtggagtactttcactaaaaccgacctaaataaaatatagccacctcgtcaaaatcaggtagcttcatatttcttgcacgtaaagttttctctgtctcaccgattttgtttttttctttgtttttttttgattttttaatatcgaaaccctaaagcctcgaaggttctctcgccggagaagaaattatgcagggtttggcggcgaccaccaccaaccgtggctctctcaccttcctcgctcccaggtaacataatcgactcatgatttcgtttctccttttcgatctctctctctctgcttttttcgttctccttcttcgattctggagttcgttcgttattttgatgatttgtgtcgcatcggttgattcttactagtcttcgatttgctatgatatgttttaatctttcgctctgtactgtttgaatcgtcaatttcaatgaaactcgaatcaatttgcctacaatttctgaaattggggg

SEQ ID NO: 17711 - DNA, 1260 bp, Arabidopsis thaliana landsberg
gatccaataaaattcctttccaagaggatcgaagaatcgaagattgcgctggctatcttctcgaccaagtatactgaatcttcatggtgcttagacgagctggtgaagatcaaagaacgagaggaggaaggcaaactcataacgattcccatattctatgagctgaatccatctgaagtgaaaaggcttgagggagatttcggtagtaacttgtggaatcaggtgaagcttactgctgactttgacaagctcaagaaatggaaggaagctttggattttgtttcgcacaagacgggtttcgctttgaccgagaacgggtacagattctaccctagtcatagatttgtgattatttgaacttttccttttatagatgtatgtgtcatccggcttataccaagccaaaaaaaatttatgaacatgttccaaattttgatacacactatttgtgtatctattttaaatatagatcaaaatatacccagttcactttacattttacccaaaaaaatcagattgaaacagcaatccaaactacttcaaaattaaaatactcgaaagtcaacaaaatatccaaagctaggtaaaagcatatatagtccgcctaaacccgtctaagcatagcccgcctaaacctgcctaatgaccatctaatccgtttaatgtccgcatagtcagtcaaatctaccccactgtttaatagaaccgattttaagaaagtcgaaatggtacatgggtgcctagcactttcttgaacactgcttaaaatactcgaaagtcaacaaaatatttgaagctaggtaaaaagcattaattggttatttgggttcaagtttttttccgggtacctattcgagttcacatttatttttttccagtacccgaatgcgtcatgtgaatctaaacccaaaaacccagaaacccagaaacccaaaaaatttgtaatgaacccaaacatgtacctgaacgcatactcataataagagctatacctacattattaaaggtcgagagttggtaaaaatattcattttatataaaataaaaccttttatagtatcaaatcattagtattaatacctaattggttctattttattgaaatttacagtaaattagaggagaaaattgtaaaatactgtgttagatgagacaacaaaataaacctgcaatttggggaaacctttgaaaacaaataagtgactagaaaaaaaaaaagaaggagagcatggtcattaatgaaaagtgaaaatgattcga

SEQ ID NO: 17712 - DNA, 1082 bp, Arabidopsis thaliana landsberg
ttaacccctagatcaaattagtaggatagctagtaataagatcatcttctcggcctaggtatctttcagggtaatcttgattcccagtgagaataatatggtttttggtttcgacaatggaatcaagattaacaactggatactcctccggaacaaaatcaatgtactttaagtaggtaagactcggagtatcaaaagtaatgcttttgaaatcagacccgttaaaataagtgaattctgtacgttgaataataagcctttcaagggttgcacttgatacagtgcgagaccatttccatttttcccactgcacatcatatatggttaatgtcttaagcacaggacaagcagaaagaagcgtttggaaagcacatccgcgtagatcagagaaccaaattgatttgagaaagagagactcaagccccggaaggaatgcattctcagggataacatcaataacataagactcagcgaatatgcaggaagtgagtttcaggtcaacaattgttttgcaagtgaagacctcagaaggcagtaaatatccatcttcaccatatatttccagtttaagatccaagacaccacgcttcaggacattacagagacaacggttgacaacatgtggaccaataacaagaccagtctcaagtttccgctttaaaaaactgtcaaatcttagagagaacttactaatgcgggtagtgaccggaagagccaatacgccattgacaaaatccatcaaactcccttgattcttgactgagtcatcaaactcaagtttttgtacaatggtaaagagattctgccacctctttgacagaactgatgcgaaagcagcttcctttgcagaaaggaacgatacgatgtggcaaatgatctcatttggtagattgctaatcctatccatcctctagccaaaccctagagtagacaaccctttttactcctccgaaaaataaaactcagagcttgaagatgatgagaaaactcggtatataccttgatacagacgccaagagacaggaaactctcagacgtgcaaaaatgcttttgagaagcttgaacatccaaaatttaataat

SEQ ID NO: 17713 - DNA, 1065 bp, Arabidopsis thaliana landsberg
aaaaagtcactcatattggtccatttacaatgccaacacagagtaaaaatgaaagaggactgggcaaagaggcttataactgataatgaaactgttattctactttccggtccacaaggctgctaccatctgatctaaccaaaatatacaccaaccactttcttcatcacatttgctatattgatgtgaagctattctgttacccacaaaaactattggtttgctaaacatttcttcaaaaagaggcactcttccaattcctatgtagaagagaatgtgttaccgtgaaatggcacggagcaagatgcagtggatttgagagaagttaaggcgtgtggaagggcaagtgttccagcatttgatcataagatatttgaggacttgaggacactcctttgggatatctggtcttagtccgcacgctgcaatcccaaccgctgcctgcactggtgagcaagacccatatgcctcctcccctgtcaccatctcccaaagcaccatcccaaagctatacgcattgctcatccaactctctcttgtcttctccgggtctcccgcgattatctgatttcagccattcacaaactacagtcaacaactgcttttccaaatagaatctacttatgcataattggacaaggagaattagtgatggtgaagcatgtaggtagctttcagatgtctggtattgcatctataaccgaaaagctagaccttgaagcctacaagtataattacatcatccaatcaccaggcaatgtttttttgtattattggcttacggatcacatatgatgaggtaatggtaagcatgaatcttgaggcaaatcaatgaactatgatttatgcagggaaagcgtcaaagaaatacagacctcgggtgcaagccatcgatagccatccgtttcatactccatggcctcgttgacactcttgcatgcagtgactattcccaaatcacccaaacaagcgttgcactgcttatctaatagtattctctgtgtgttaaggtctctatatgcaacaccatgatcattaatgaatttcatcccttctgctatgtca

SEQ ID NO: 17714 - DNA, 1774 bp, Arabidopsis thaliana landsberg
taattattaatgttttggtataaactttctaagttgaccccatgtcatgccctagttttctacttttgatcccattcatatttgtttttctctcaacattaatttcttttccatgtttattttgtgctttcctaacaaatgattacaaatctctagtattgattacacattaggcttttcacatattgattgttttttcttctcattggatatcatgtttgttttttgtccttcttcttcaaaatcgtttttacatatatttctatgtaagccaagaattgttctataaataagcctaatgtgtaatcaatagaactgagagaaactattctacttctaaggttttctccaaatttatcaaaaattcactacaagaatatggagcatttgtagcgtccgaaaaccgatatttaattatactatagcgttattagaagcgctctatcatcgtctgtcataataggtcagatacatattgtagcgcttttttgttttgctatcattatttcattaattacaacgctttatctgcagcaatctttaattatttaatagcgattagtttctgatataaataactattatacatagcatatttaatttgctacatataattagataatagcatttagttaattgcaatatttatatattatggcatttttaattatgcaatatttcttcaattaattccagttcataaattaatttttaatcccaaattcagaaagaaattcatattatttagatatcataaattcaaaatttagaaagaaattcatattatataaaattcaagatcccaaattacatttcaatgtcaaagccaaacatgattttatcggtacttaacaaaaaaaaacatataatgtttacacaaacatgattttatcagtaggtcaagccacaatactacctactacatcgacaatggtttgaattttagagtttggtctccacacagcagcatctccaatctttgaaacttctacacataccttgctcgcatttggacttaggggcatatgatggactgtatctgaagggttagaggtacatactcttccttatgctattctttctctcctgttcttgtaatctaacatgatgcatttcttcttggcagatttgatggtgctagcagtactgttacttaagctctataagaatcaaaaataataccaagcattcaggtgatggtcttttctacgctgtaagttaaagtgcagaaatttaccagtggaggtgctggtcttttatctggtgatgttgtttcatacagtggaggagatgaattcacatattgtatactatgaagtggccatgcaatgttctcatttagtacatctcccataacaaactttcctggacttggtctccacaaatacgcggctttgttaaacaccttttcaaccttaacaattgcagcagaaggaccaagaggcatattgttcacaagttcttttcggtctgttgaacacaatcgaccctcaccaaccacagaatcagccatattccaatcaattatgatgattttaacggttgatgaatctttagcctaaagcatgatgcataaataataagtgattgggtatagtgtttaggttcagctagataattgacaagtgatgggaaaaagacattaccgaagatcctgcagtctgattctcagaaggggaagatacatcactgtctagaatgatcttatcgaaaggccagacaatcttgttccttaaagcttcaccaagtgtgaaaactgatggtgtaggcctcc

SEQ ID NO: 17715 - DNA, 1341 bp, Arabidopsis thaliana landsberg
  unsure (1)..(1341): unsure at all n locations
cttttcatccaactcggtcaatctgtgaatgttaaaagaactggaaatggtgcctgaaagaggggacaataaattagatttctagtgtaagaaaaatcatcaaaacagggaaaaggcattcaacaataagatggaggttgttgaggtactcacaactggggcatgcgcggaattctaggctctttaggtttagctggagcaccttgccgcaatgtttgcttaaagtactcagattcagagtagctgaagatacagtagataaaacaaaagggatgtttcttttagatatgaagactggcaaaataggactgcacaatgtataagacagaagtaatcattacttgcgctttctctcccgcttggggggatcattccaattgtcgcttacaatctttttaaaatcgagcttgttttcatcctatgaacaaatttacaaatatattagtaaattttatcatcagtaatgcagagcaaagctagggatatgacatgaaagttaagactatgcaaagaaatatacaagttaccttattgtcatcatcaaaatcatagaagtcagcacctacaacaaataaaacaacagattatcaaaacattacaatattcacacaacctaataggggaaatagtaggtaagtgacacccttactgtcatccattttaaactgtatagcatcttctgtgaatttcttcatcttagcatcaagttcagctgttgcctcttctcctttggcaatgattctatcaatatcctcgtctgtgattgtgctatctttagaactgaacaccatctcagcaccatatcttaccatttgaagcaactcatccttattgacagctgcatagttaagataaataccaattctgtcagagatgaaccaatgcataaagcaatcactgtataacgcacttacttttctgttctgccaatctcccttgttgaataaccagagcatcaagtgctaacttcttgtaagctctttcaatcactttctcctcaatagcagactgtaaacaaacaacacataattaattttaaacctctcatggctgttttaacttgaaattcacggagaggagaccaacctcagtgcagaatcgaaacacttgaacttcttctttttgaccaatcctatgggcacgatcctgagcttgcaagtcgacttgtgggttnnnnnnnnnnnnnnnnnnnnncgtcacacgtgtagagaaagttcatgaactccagtggacaatgatgagagttgtagctatcactatagaaaagcccctcaccctctgcagtagcttggttgatgcaaaaccctacagctttagtagataaccagaaaacttatttct

SEQ ID NO: 17716 - DNA, 638 bp, Arabidopsis thaliana landsberg
tctgtcccccagagccaaatgagaaagaaggtcacacaatttggcatatcctcattacaaataataggaaaatattcactgcaaaattagtaacttaataagaggttaggtagcaaacatataaactacaacacaagtaattgttttagcaattatcaagtattgaccattaataaataaaataaactaatgaaagaagaagagtagaatgaaagtaatacttgatacattagcatgattttgtattttttagtatttttaacaaatgaattaacagtaagattaatggatgacttaattcacaataggagaattctggtttttcttcaattaatgtagctaatctttttatttaaataatataaaaggacaaatgtcattttttcatgtgataatggtatatctatatggagaaaattgaccaactttcatatatatgattatataagtaataatatgtaaagaagaaatgaaacgaaagagtgaaagagtgagcaagagaaacttgtataattaacttggatatatgcgttaaaaaaatgagaaccgactcttttactaaagcatttattaagcagagatttagctgacattatacttctccatctatatgatagaaaagtgtaattttattcaat

SEQ ID NO: 17717 - DNA, 875 bp, Arabidopsis thaliana landsberg
tcgctaaagggatttaggtcagtgtctagctttgcttgacggatttctatcacgggagtgaattaatctgttgttgaacttgttgtctagggatagcttctgtgaagttttgtcaaccgcctgaatagattaagtagaccacactattcgattaccccatcctcaggaatcgtttatccatttgattgcctgttatcatttcggctttgtctttcacttgcctgctattgccatttctgcttttagtttcatttcatttctgttattgcatactaggactgttagaaccaaccaactttctacttggcttgacttagagctttctgatcatatctcatctgtttgcatcacaccggattggattgacatcctaaaatactacaacgacaagatagtgttttagggattaattgacaaaaatcctactatcatgcagcagggctcggtgtcgaccaacacaccctgggtgtcgatcgacaccatcaggagcagcacgcggatgcaatcggtgtcgaacgacacaacaatggtgtcgatcgacaccaacactagattcctgcaactattcctccagatgcggaacacgtcatactcttggggatttcaacagatcagacctgttctatgcaattcgatcagcgattgtacccccacccttccagaggaacgactatgagctgaagcatggctattttgctttagtaggctagcatccgtgccatggcttgtttcatgagcagccaatggaccatatcgagcgttttgaggacctcgttccgagcatcaaagctaatgccctctcagaggactacctactgtgccagctcttaccaaattcacttgctgggaatccgcttcttggatgaaacaactta

SEQ ID NO: 17718 - DNA, 1556 bp, Arabidopsis thaliana landsberg
cttgtgaattcgcaaagacatttgccgctaaacaaataattaaagattcttaggaatttggatattacgcattccttcaaaagcacccttacttacagaaacctctccgatattggatgtattatatgatatacctatgactgatccagtaccctaccaaatattgccaaagaagacttgtgagattttcatcactataaataggaatcgttagggaatatatatatatatatatatatatatatatatatatatatgcaaatacttactgtttcatctgtcagtactgcacgaatctcttcagcctcaattaaaaattgacgtttcccgggctcgtcagactgttcaagaactatctgtctaccgaattgttgtagtagatgatggtgcatcactatccatccattaatagatatatgcacgaaacatttatcggctagtgtcttcaacccatttctaacatccaagttactgtcagcaagcataactgtgacgtaatcaacacttttgtagttgaagaagcatgcaatgtgaaggaatagtgattgatttttcttcgacaatctctcatatcccacttttaatatgctttcaatttttccatcaagacttgcttcgatcctaggtaattgaagttcccactcgtgcttgctctccccacgcaaagatgaacccacaatagaaaggcctaacggaagattaccgcaaagatgtactactttcttggcaagctcttcaaaaccatctggtacagagctttgtttgaaagcagagagacataagatctcaagagcttcttcctcggatggaaaatccacatggtagatatcctgaatcctatgtgccttcaaaatattcttatcttctgtggtaacgatgatccgactgccagaaccaaaccaagaaggatcttcagccaatacctctaattgctcaagatcatctacatcgtcaagaatgatgagcactttttgatcgtgtagccattgtttgattgtgcctaaatgatgtatcttcatattctcttgcttcaaaatctcagacagaagttgcttttgcaagctcaacttggaataatgttcagcaccacccttaatacttcccttgaggttctccataaaacatttaaacggaaaaatactagagagtttgttgaataaagttctagcaatggtagtcttaccaatccctgcaggaccccaaattccaatcatcttgacttcatcactttccaggcataacaaagagttcaatcttttcaagtgagcttccatccctaccatcccctcaaaatccctcgacggtgtgagattcagtttgtctgaaacatctgtaacaatcttttggatcatctttgcttcattatccctaacaaaagcaaaagcatatagatctggttggtctaaatttggcaaaacgaatagcgtgagagaaataaaaagcagtaaattcattgagacatacctattaagagagtgttccccagccatggtagcgacatgtgcgagagcatttaaaatcggatgtggacctccgcatttttcccttgacaagta

SEQ ID NO: 17719 - DNA, 590 bp, Arabidopsis thaliana landsberg
ctgactttggtgatcatgttggacctggttcaataacattatcatcttttcttggtgtcctggtgattgaacatgttccggttacacttgctgattggaggaaaattgatgcagtggctaaacaaacaatgtgggaagaaattcaagtatatatttatatgcaacaatttttggctggacatatatgaaacaagtgtgacttttgcttgttgtatgtgatgtatgggaggtttaacttgctagaagaatggcagagagttgttatttttaagcaaatgggaaatatctggagggcttggaagtcaaggctagttttcagaagtaatggctgataatactgttgcttatataatagatttaaaactccagatcatgccatccactcaagtgcgtaacactttggttgggagaaaatccaagccaattttcacggctagttatttacaactaactactttgttgttatatgtcatggctgaataagtaaatgcgttgttttttattaagtagaaaataggaacatgtaccggtgatgaggcacaaaagattcttacacccaaatggaaggaatgcctcgttcacttatgtaa

SEQ ID NO: 17720 - DNA, 806 bp, Arabidopsis thaliana landsberg
tcgagtagggtaccaagctgcagctgcaaaacaagaaacaaaaaacaacttatatcaacttttaactttattcaaacactcgtggacattaacatgttttacttattatttttggttagtacttacaatatatttgtgcgtggttggagcttcgttgattctttaaccgcagattaaccgctccccaagtgtttgtagcaactgcgtttggcttatggccttgagcatataggaagattgggatcgcttgtgatcttccatcaccagtaccttttgggttaaatcctaatctcctgattatacatcaaccaaaaaccgttattatacttgaccacggcaaaaaaattcacataatgggtgcaatctttatgattttttccggaataaggtctaaattatatggttaccaaaaaaaaactaaccaatatcggtcttcaacaagaaaatcatcagagtaataaaatttatcttccaagttagagaaatgaagtatcttccaagtgaaaacattgtttggagggttggatatgaatgtgactttctcttgttcttggaccgctgtgccgtgtgaagatctcagcaccaaatgaagcaatgtcctgctcaagatatccttggttcgtgtcaaggaatgttgtaagaggaatcaattttgcgtatccccactcttttttcgcattattgtatcgattgactattccatctacaatccacatttgtgcacaaacatgcaagtcacaatcaactgatcggttcatagaaaatgttaagacaaatctttgaaatctacagtcacacctttaaca

SEQ ID NO: 17721 - DNA, 1307 bp, Arabidopsis thaliana landsberg
  unsure (1)..(1307): unsure at all n locations
gtgtaggtgtattgagaaggtgtatgcaaagtccaaaggagtcacatggagcagcaatgaaacaatgcttacgattcttgcgaggaaccacaacactcggtctagagtttcggagttaaaatcaaatagatacgaagctaatcggctacaacgatagcagnnnnnnnnnnnnnnnnnnnnnnnnnnnnnnnaccacaggtcatgtattctactttggtggaagtccaatatcgtggtgctcacagaagcaaaatgtcgtagccttatcatcatgcgaagctgagtttatggcgggaactgaagcggcgaaacaagcgatatggcttcaagaacttattgaggagatcaaaggaagtacatgcgagagagtgatgattctaatcgacaacaaatcagcgatagcactctccaaaaatccggtgttccacggacgttcgaaacatattcacaagaggtatcatttcattcgagaatgcgttgagaatgaactaatacaagtggaacatgttccgggagagaaacaaaaggcggatattttaactaaggcacttggaaggatcaagttcaaggagatgagagatcttgttggagttcaagatgtggtacaagaagacttcaagcttaaaggggagaatgttggattaagcttgaaggagaagtaacttgaagagcaagttactaatgaagagaaaaggaaattaagctttaaatattctaggagttatctagaatatatatttggagttatctaatgttattaggagttatctaatgattaggataatgttaaagttttattatataaggagatgctaagttgtggcataagttatgagttttagagagattaagacttatagattgtttagtttttgagttattttcctaagctaataagagagttatttttataatcctaagtgttcttaatcttattaaacttgaatatttaaactccttgccaatatattgaaaacaattcttcctccctctattgctccaaaccagtctgcatttatacatgatcgacttatgatggaaaatatgttgttagtctctgaatttgtcaaggactatcataaagaatcaatctctaaacggtgtgctttaaagattgacatatccaaggcttttgactcggttcaatggccattcttgctcacagttctaaaggcaattaatctcccggataaatttgttcgctggattgagctctgtattagtacatccgctttctgatctgttcaagtaaatggaaagttggcgggttctttccgtagtgatagaggtctgagacaagggtgctc

SEQ ID NO: 17722 - DNA, 1104 bp, Arabidopsis thaliana landsberg
ttctcgaagaagcagagaatgagagaatgcacttaatgacattcatggaagtagcgaaacccaaatggtacgaacgagctcttgtgatctctgttcaaggggttttcttcaacgcttatttaatcggatacataatctctcccaagtttgctcatcgtatggttggataccttgaggaagaagcaatacattcttacactgagtttctcaaagaactcgataacggtaacatcgaaaacgttcctgcaccggctatcgctgttgattactggaggcttgaagctgatgcaacgcttcgtgatgttgttatggtggttcgtgctgatgaggcgcatcaccgtgacattaaccactatgcatccgtaagtgtgtactctaaatgaatggagattatatatgttaaagatcgatgattaattcttttcatatgtttgtcaggatattcactaccaaggtcatgagctgaaagaagctccagctcctatgggatatcactgaatcagaagagcttctagttttgttttgtcgctcttaagctaacacggtccagatttcttttgttgaagtactcatgtcctttttaattggatggtacggtggagatgagccaccaccacattatttagtttcctttctacttttgttttggaaaatcttagtttctctacattacgtaaccaaaatcctactatatagttcacgtttgctcaatggtttttcattcgaagctctcctccgtgaaagtggctctgttttgctctgttttaaggttcaaattactctgtttttttcagttcctaaacatgttttaaattagctaaactgtctcaaactcttgttattattttctttttgttgattaattaatttgacatttcaaaaaaaaaaaatcccactacagtatatatgaaatataaaaatagtaagttaaaagaaatttccaatacagtcttcaacatgtaacataatctgtgtaaattgttaagtattatttattttgctaaatgagttttttttggcatcatttttttgctaagggtttattattaactttttatggaccaggtttctatttttaaagtatatcatattttcttaccaata

SEQ ID NO: 17723 - DNA, 1354 bp, Arabidopsis thaliana landsberg
cgacattaatagtaatactatataacaaggaaaacgtaaactagaatcaaccaccatgatatatttttttagaatggcctaaaataagggaagagaaggtttctgttgggagattttttttttaaaaaagaaagaatggaatcgtagccaccacatgatttgaggtgtttgtaaagagagacgacctctaagatgcgactggttttgaagtggccttcttaatggcttccgcataagtcgtgtgctggtatgttaaggtcgattcaagcaagtcccaaagcgacgtcttcgggttccatcctaattattgtccacaccagagtatttatcagaaaaccattgtgactgttagaacagactaatcagacaagcaaagaggaagttaccaagttgacggttgatgatggtcatgtctgggattctcttgtcgctgtcatcataaccttctccataaaactctttggagctcacgtcgatcgttggactctcgatagctgtctctccactcactttggcgtagacctgtccattttatgatttgcaacatttaagcgtatgctatagtaatagcttatcgaaaatcaatcagattcttatctgtgaccagtttttctcacctcagtcatcatttcagcaagttgtctcactgtcacttcattgtttgggttgcctacattgaagatatgcccattggctctctctggattttcctggtaaagaattccgcaagcaattcagatgcaacttctttgataacataaaaacaaacgatatatcaccagggataagcaatgaatgaaactcacgatcatcaaaaggacagcttcgatagcatctttgatgtagatgaaggttctctgtgattctccaccatccacaagcttgagaggctcccgtcgcagaaggttctgaaaaatacccaccacaaagttaaacaaaaaaagttaagctgcagccatgagaaaaactcaggtcattggactaagcctgtatacttacgttactaaagcacgctagaacccgtgggacaccctcgctgggaccatcaatgccagggatgaaatccatcctaggtccaatccagttgaatggtctaacaatggtgaactcgagtccattctcagcaccctcagctgcaaccagaaaaaagtgacgtgagaaactttttagtgtctagaaacaccaaattttcattcgtgtaagaaaactacataccgtaaacaagtctctctataagttgctttgcacaagcatatgaccacctctgcttctcaattgaaccaaagatgcaaggggatatatcttctttgagtacataaaattcaggatcctgtagtaaacaagacgagcatca

SEQ ID NO: 17724 - DNA, 1337 bp, Arabidopsis thaliana landsberg
tctatgagaagagatttgagtgaaaaaaaaggcgagctcagatcaagtcaatttggccagattcgattgccctttttacaatcttgtaacgtatgaagtagagatcaccgcgctccatctccacagtctcggggctctctcctctgccaaggtaagtaaaggcaaacccacacttagattacagaaagattgtgtatatatatatgtgtatggaggaataagagaatgctcactcttcgtatagattgagggagacaaagttcttgcttctacaaacaacaaaggtatccaaatgcggctgcggcactgtaagttcacaagtgtagtcatcactaacacaaacacaactctagctactgtgaagggaatgctcagatataatagcaaacaatcttaaccaactgagattatggtccaaagtaataagatttagggaggtacccatatcatccacttcacttataagggattgcttgagaaccgactgataattctcgggcagcttaagcagtacagtctcttcgaaatgctttgccaaatcatcagcacacctgtgatcattcaaatatatgtctcacaacagcagccactaacgtaaattgtaaaaaatttgagtttaaagtctgaaaaaaacactcaaacaaaatattcatgaaaaaagtgcctaggctacctgaagtttttcaattctcgggacagttcaaatactccatgaaacaagaactatattaatatgtaagttcattgtatcccattcacaactcaaacatgtagagagtagtaccagacaaatctctaaacactatctattccacacagattctacaccaaacctataacatttagaacaaaacgcatacaaggaagaagacagccaattaacataaagtcagacaagtaagaaaacaaacctggtagcaaacactttctcttgctcagaaagtcgcctttcagcttcttctgagttgaggttgtggaacataaacttctctatctgcaacaatcaaaagaacaccattggagatgacataaaagcaaagtcaattaagcaacattgacacttggaatcaacgttgataaactcgcaaaactaatatgaaagtcttggaaaaaaaaaaaaaccttgagaagcctaactctgagatatgatctgagtagaaactgggctctgtccaaatccatctgatatagagacaccaccagaggatctatgccattttccacataatcttcaattggttcttcctgtttatttacaaacatttcaaaaactgataatttccaaatgcaaccactagaaagtgacaagacactgaacaactctaactaagtttaat

SEQ ID NO: 17725 - DNA, 1212 bp, Arabidopsis thaliana landsberg
  unsure (1)..(1212): unsure at all n locations
agtagaattattgtttcatctttcattagttattttgcgctaacatttgatatcttcctatttattttcgaattccgcacatctggacagaaatatgtattatcttataaatggttatgaaatagttgtcaacgtaaaagaattgttagaatgctacctaaataacgttgtgcttcttgattgtgtcaactgttaaacactaacaaacaactaatcacgattgcgttttttaaattatgaatagagtggtgagtttttttttttttgtttgtgggctggaaaacccataaaattaaaaagctagtttctatctatatatacatctttgcagcaattttgtgaaataaatcatggagttggaacttatttacagtgactgccactgacttttgattattgattttcttttggcaataaattgattaacaaacaaaaaatattcaaaatatattccaatcccatatatcacgcagatttctccaaaatttgaactagatttcgaaaattatttaaaacaaaaaatatttgacaaaccaaaatataattacaatcccttaaaatgagcaaaacgcacctaaatacatttactatcagttcactaaatcttatttctccaatatttgaactagattttgacaactatttgaaacaaaactttatttgacaaactaaaatataattgcaatcccattaaatatttatttaaattagcggtgtaccgcggagttttttaacgggacgggtttggcggaacgggtttggaaggatgttacttaataacaattgaaaactataaaatgtaaatattttatagataaatataatttgcagacttttatatatactaatttaaaaaaaaaattgtttccgcggtataccgcgggttataatctagttatgatatataactgatttctattacgttggtaactaaaaaaaaatcgattgaggaaaaaagaccattatgaattttgtaatattgtataaacaaagatagcttcagcattgatatctattcataaaaatgtattcttaatcaaacgtaaataactttgctaagaaaaacgtaaatagaataataatgatgtgtcatcacagctccttttatagttgtcacaagcaataactcaatattatcatatcatatattatatttttgaagatgaagatgaagagatttacttcaagatataatntaaggtagaactagaa

SEQ ID NO: 17726 - DNA, 545 bp, Arabidopsis thaliana landsberg
tgctgcacgtcgactctagaggatcccctaatttctggggaagaccttcgagtagattattttctaaaatctactcgaagctcgggggctacacccattgggtgcacctccggtgaccaacgtgaagttcaaaatcctacaaattgaaatgccgacctctaaggcacaagcacgaaactaagcctcggtcaacgagtgatcgaagcaggagaagacaacaggaagtcattttcttcaaatcacctgcaagctggacctgggatctttgggctgattacctctaaatcaactcaaagatcgggggcttgtgggggatagatatcccccaggtccactaaagagtaaaagacctcacgaaaggcccaagggccgaataaatcataaggtcattctttcgtgggcctggggagagacaaccagcagagcagatcgacatgaggccagattgatgcaaacccggacgatccacgacgtcgaacgactgaccacaacagagttccgacttttccgcgccggagccccatgcaatggagcatgcgaggata

SEQ ID NO: 17727 - DNA, 3183 bp, Arabidopsis thaliana landsberg
tcccctcctccaccggggttgtgcgaaagccgtgatccgggttcaatctggtgctacagacgaaaccagccagagaacaatcgcgagccaattgacaatcatgtcacggaaagtggtccagaagaggatacgcaagcattcccaaagaagaggaaagtcgtttctccttcttcaagtgagcgcatcacagcctggcctcttgtgtgttgtgagatgaaacaaggctatgctgtagaggaaacagagcatcaggtggtgaagcgacaacgtcgagaatctgaggcgttagagttgcgcaattggttcatgatgccaaggaacacaccaacacagtcgccagcgatgacagggagacacactccaacccccccaacaaccaacagtgaaggcacggtgggccaaaagccaccggagccgccatgaatacagccttttggaactgccggggtataaaagggtctctggtagttcgacgcctaaaggggattaaggcaactttttctccggacatactctttttgatcgagacgaagaattccgatgatgtcgttagagatgttgcggctcagttgggatatgataatgttaagtgtgttactccgttaggaattgggggtggtttggctttgatgtggaaaaattcgatttcagtttgtttttatgatgttgatgcaagacttgttgattgtaagataagtaataaagatgtgtctttctacttctcttgtgtttatgggcatccaataagaaaactaagacatgttctatgggaaagactacaaagaatcgccctcactcgcaatgaaccatggctaatgtgtggtgattttaatgagattctccatccccatgagaaaaggggaggaagagtaagagagaattggagtttggttgatttcaggaatacggttcaaatctgtaaagtatcagatcttccattcacaggaaacaatatgacttgggttggcaaaaggaaaactcattatgtggaatgctggcttgatagagcaatggccaatgatcaatggaaagcaagtgtccctgcttctgaagttgagtacttggagttaattgattcagaccatagacctgcaatcattaagatccgcaaaacaacagaacaaggtacacgttgctttcgttttgactccagattgtgtaacagacctgagtttgaatcgattgtcgaatatggttggaaccatatacccgcttctagatgctctgtaataaaaaggattagaaactgcagatctcatatatcaagttggaagagaacaaacaacacaaactctgttaaacggattaaggagctggttatgatcattgatgaagcaagcactgactcttctgtttcaaatgatcatctccataatctcagaagggaactactacttgcctatcgtgaagaagaaatgtattggaaactgaaaagccgaatacaatggcttaatgaaggagacattaacacccgtttttttcatgcttctacaaagaaccgcatagctcgaaatcgtctactctcaatccaagattaagatggtagcgacatatatggtaatggaaacatcgcggctgaagctgagaaatattttaggaagctgtttagtagttctaatcatcaagaattgacagcaattctgcaacatatccaaccggtggtgtcacctgctacaaacgagcttctgctgacggatattactacaaaggaaatacgtctgccttgtttgcaattggtgcaaccagagctccgggaccagacgggttcacagcatctttttatcgtcaatattgggatattgttggccctgagataacgaaagaagtgaaaaaattctttgaaacgggacggatggaaactccatggaatcatacaaacctctatttaataccaaagatcgaacacccaaagacaatgaaggactttcgaccaatcagtttatgcaatgttctctacaagataatctccaaaatattggtacagaggttaaaagcagttctctcgtcggttgtctctgaaaatcaagctgctttcatacctgtacgtcatataactgacaatgtgttcatcgcccatgaggttttccattcactacgagttaagaaacgatgtgcaaacgagtatatggcggtcaaaacagatattagtaaggcgtacgatcagatcgaatggagtttcttggaagaagttctaaaaaaaaagggatttgcaactcactggatccaatggatcatggagtgtgtccgttctgtttccttctcggtattgatcaatggaagtccatacgggaagttttcaccttcccgaggtctgcgacaaggagatcctctatcaccatacctcttcatactatgctccgatgtcttaagttccttgatgactaacgcacaacagacggggaaaataaaaggaatccaagttagtaatggtggtccctccatatcccatttactcttcgctgatgattctctatttttcctaaaagcgggtcgcaaaaatagcctcaatctccttaacatttttaaagagtatggagaagcgtcaggtcagattataaactttgataaatcatcaataacatttgggagtcgtgtctaccaagaaacaagggatcatgcaatgcagactctacaaataccaaatattaggggcggggaaaaatatttgggacttcccgagcaatttggtcgaaagaaaaaagaaatgctccaatacatttccgaatctgtccgcaagaaaataaatggttggcaaaataagtttctcactgctgcggggaaagagaccctcattaaatcagtagcttttgcgatgccggtctactcgatgaatgtatttgcgctcccaatggaactttgctccgacctcaatagtatgatagcgagattttggtggggcactacggcaacaaaaaagaaactatcatgggtttcctgaaaaaaaatgacaagaccaaagagagaagggggtttaggatttcgagacctgcaccaattcaaccaagcactacttgcaagccaggtatggaaactgctataaagaccacaaagtctgctctatagaatgcttaaagctagatactttcgacatgggaatttctttagtgcgtcacgaggcacgagaccgtcttatggatggagttcccttcggtttggatgtgaattgttgaatctcgggacaca

SEQ ID NO: 17728 - DNA, 1799 bp, Arabidopsis thaliana landsberg
cataaatattgttcagctaaggcccttaccttagaaatttattggaataagttttaaaaccaacgaaaaatatggaaaagtactaggactctccttagagaatcaaacggagaaagctcttctcacttatttgaaaaagaaagaaagataaaaaaccaaagagttgagagttgggaactggtaacttcatcaaacgactctcactgaccatcattcgcacttaagcatggctttgatcctttgaacggtggagctaatcaaggtattgactgtggtggcagaaacttccaggttggtatcaggagagtaactcggaccggagacaaggatctggaaagccacggtgaggagtgtatagctgccaccctcggcttcgccctcggaaggacggccgtcacgggagatcataaaaccggaagggaggattggaatggtggtaggatcgatatcgcctgaacatggcagcgcaggcggtgtttagatccattggagcgtaggccaccattcctcccaatgcatctttgaagctatcttggagtatcattagcttagtattaatatccctaattgaaggctatataagaaaacaaaaaaaaaaaccaatcatatagttaatgccaaagttattgaaattgtaatagaatttattaatatagatgtgaataactttccgatttattcaagatttgatgaccggatctataaaacaaaaacgaacaaagttgaccggttctatggaacttttgctcttttatcacatccctatttaaatgctagctatgctaaatataaagttttctatcctataaaaatcattagttttttcagtaagagtaatatatatacctcgagaaaagacacagtgttccttgggtttgatccggtgacgaaacgagcagcctcagtcgctggattcccatggcacagaacgtcccacttttttgcatacaaacattaaaaatcttgttaattaccaaaaagtaaaaaagaagctgattaataagttggacttgtgcagtgaatgaagccatttattcttacctggtgacgaacctccagattcttaaggaaatcgtacacttggacaggagggagagggagggataaagatgaaccagcgcagacaatgagaccgggcggttgacccgcctcattgtttatccgcaccccaatcctaattccgctgttgttagtttcagactgtggcgagaagtcgagtttgttaaccattttcatcatccatgcaaagttcctcaacattctttctcccaaatgcattacgctatttctgcctcgtattgtttgcacaactacaaaaaaaaatcacaacattttaaattattcatatataccaaaagttttgaaactatcacttgttgtcaatattaaatccgcatttttaacacattttaagttgcacaaaaaaaaagttactttgtatattaatgtacgatataatataggtaggtgtagatgtaattaagtacctccgggattgtcattgttgggcaaggcagggacggaggtggagaaaatcagcctctcacacgtcctctcaagagtaacggtccatcgtcgagctccgtagccaaagccgccgtataagaggtctctgtaaagcttatgtggccgcactctattatcattcactaccacatgctctatccacgtcacctgcccatttgtttttgttattttctggttttgctttcaataacacatattctctaaaaagttattgaagctctctatatatacactaatgaaatggagaagacagaagtttaatttgagaaata

SEQ ID NO: 17729 - DNA, 554 bp, Arabidopsis thaliana landsberg
ctggagaggtaaaaaacaaacagtataatgggtttgtaatgtaaccacataaactttccttttgcccaatcagtgtgttgcaacaatccttagttggttgtcctcctgtggtcattgccggtaagcatagcagcctgagatctgatggaatccacgactgtgccacctctgatttgatcaaaattggagatgatatgacgactatcacaaatgtgatgaccattagtttcacaaatttcatgttttgaagctttgatgatttctttttgcttcaattggttttaaaatttataaatttgagattttggttttctaggttctttacgatgagaaaactctatatatatatatatatatatatatatatatatatatatatatatatatatatattgatctatccttgataagaaaaattcatccatttggcaatcatgcaaaataaagtgaaatcatgactaatgtatatgttccacaagtactcaagcatgtgttgagttgtgtaagttgagagaaatatctttccatttaggccatatgccaaaccaaaatgt

SEQ ID NO: 17730 - DNA, 591 bp, Arabidopsis thaliana landsberg
cttcaagcgtcgattggcccatgatctcttcgtatctatccaaaatccctatacaagatttcttccttgttgtataccctttgtatctcatgcagtgctcaagtggatttgacctcgggttggcaagttacgaggaggtgaagttgggtctgtccgaccagacttttctggtgaaaaatgggcgccaacacatgtcaaaccaattgggtttgttttcaaatttttctagagtgtcctaggggtctttaggcgccattttgttaactgggccataaggttttgaggtttggaaaaaggtgaacatgtttgatctttgaaagagggctggttttgaacttgagaaaaacctgatttttcttttatgcccttctctttggtgacctttttgggatctttctgaacttttttggggtcattctcttactaacttttgtagggtattaagtgtactacaacttttataaatagcccaagtcatgacaatgtgatttacatagcctttttgccataatccctctagggctccagttgcctaaagggatttgaattagggtttgagcgttctctcttttttaggtgcatgataagcca

SEQ ID NO: 17731 - DNA, 625 bp, Arabidopsis thaliana landsberg
tacttgaatttgcttaatttgttttcctcattttctatccttaacttgctttcttatttgctcatgaactgtctctgtttattaaatatttgatttgctttagatcgttctaggactattcaaagtccttcagagcaaccaatcagctaagttataactgtcttaacttgtcagaccaaataaactaagctagataaagtttatttgattatttcttatcattcaatttatagaacctttaagcagtgctaaaagtttctggaagaacttcatcttagagttaaacaatacattccgccaacaatgaactgtcacttgtaagttgtctaactcttaaactcaatgaacttctttttttttttttttttttctgaaaactacaacaatattttttgataacaggcaaattttatgtttgttgaaggtatggctgaaacaagctcaggaatcattagaaaatgtactcatcgatctctataaggtaaataaactctaaccgataccattctcttggttctctcaattattgttattagattgtagaattgacaaaattggattgaaatttttgagcccaaaggtggaagacctaaagagcacgttgagcttttaaagcctaactttg

SEQ ID NO: 17732 - DNA, 1414 bp, Arabidopsis thaliana landsberg
gggaaattgatgcttggcttgagctgaatctttgtaagagctttcattaatcatggattcaggtctttaggtcttggttgaaggagaaccaagttagagcttaagagcatgcggtcgcagttgagatgataagtttgtctaaatgagtaggaaggagaattgtgttgtcatcttctactaggctaaggtgagggtggtatttgcgaagcatggtatcattttcttttgttatgcttcttgacgcatgatatgtagacttggatctgattgtataggattagattacatgatgatatgactttatgattgttaagtatgatgtttgataatgtgaagttatgtatgatattataagtatgtttatgttaagtataagtatgtatgtatgatgattacgtatgttcgtatgaaagactgggtagaatcgagctatgggccgtggtctccctagtaatgtggacagtgatgggccgacgggttacatgctggtcaagaaaggctgacgagcccgatatgcatgggagtgtctgagccacgagggccaacctccactcatgaggttctagttgtcacgaggatgaatggacctaaagatatatatacgtatatatgtgctattatgaataagatgatcgttatgaatttgttattagaagttaaagcatgtaaagttgattgcttgtgtctaagtttattgttatgaagatggttgtatagctttagaaattgttctatgtttcagtgggcagagttgattcccctcactgagtattctttatttacccccttttccccttttgtctctaattagtaagcgtgaggagttgtgtacaatattttgttcgtgtgtgaagtttaaagaaaacgtttttgacaagatcagatgaataacatgttgtcttagtctatatggcgggacgggtgttacacgtagcatgatcttgttgtttcgagacattatttttttcatgtgttttggttactttcgtaagtactacgatgaacaagtgcttttggtaaaatggacaactgtttatggccaaatctaagtggatgattctgaaagggtttagagaaccttaattctattatggtgcagccggttgtgatggttccgtaagcctgcaataagtcttgatgattttcagttagccgataatacatatgatcttcaccaagcacatacagttacccaaaacctacttttatttatgtttttttcaagctggtggttctttaagtcatccatttgttcgaatccatggacggtatgattattaatgaacataatttgtgcgacatgttcctatgcaaatccatagtatgcaaagccacacgctctgtttcaattagagatgtgttttaaacgagactttgtttagagatgagagaatccagatctgatgagaacaac

SEQ ID NO: 17733 - DNA, 624 bp, Arabidopsis thaliana landsberg
caggtcgactctagaggatcccctcctcattaaagctagacactcgccggcgctattcttttcttcttctgcatcatcagcagaaggctcgggctgactggttcggctgggacgcctcggggagcattgacaggcttcgagacatccaaggtcacatcaacctctggaagcggcaccaccgccaatgtaccatcaggaacagcatcagatgaatcctcagctagcagatcgagcatgtcatttatgtctgcgtcactagggttcaggggcacttcaaaataaatctgccgttcatcatcaggtatctccccgagcgaagatactaaagaacggacctcctcagcagagggtcgcactctaagacccaaattgctatctgtcacgggtgaattggacacaaaaagagtgaaatctttgggagaaggcaggttccaagccgagtatgccactggagctccaacgtttgaaactttacccctgaggatcatctcgagtcggctcaccaaatcaacagaaagaattctcctattggtaactcgggttgagtcggccagccctcggtaaagatatgctggatagcgcctgtccttcagcggctgaatgttcttgaaacaaaatctgtga

SEQ ID NO: 17734 - DNA, 1259 bp, Arabidopsis thaliana landsberg
ataatcttaagagcaaagttcttttttcttataagaattccgtgtatcctactccaaactattagtctacttcatcttaacccatccattaagtcaaaatagtgtaaagacaggtacattacaaagtcaagagtatttacccattgatttgcattttgtatgtttgaagaaagatttgctaattgtgtttgctaaagatgaatgtttaagacattcatcgagatcttgtcttaacgacttgtcctctagaagcttttctctccatcttctccctctttttgcgagtcttctcatcctcaacacctccttaagttcagtcatatagacaaaacacagtccattttaaatgatcatgttttatttcccccttgttcaaagcactttgagagtattcaagacaaagtgattacctctgaaccatgtgacaatagtcccttaataagaccagaagctttgtatgctccaaatgcagggatctaaaataaaaacaagcaaaagtaaatggttgcatcattcctacagagcaaatctgttgtttgccttaaaatatggcaataaagaaaattgagatgggtatcataccactaaatacgcgtaccaaaactttccagagatgatagatccgacctgcacaaagcaggtgatgtagagtacatcatgcaaatatctgcaaggacgaatagagcatcaggcttatactatagaatctaccataaatccaatccaccataaagatgacgattatgtagcaactgataaacgataaaactcggagaaagccacaactagtaaaacatcactcatttcaaacaactgataatgaaacagtcctcctactattgcttttggttatggaaacagaatccaactatacagaaacacttgagacaaaagcaggcactttctagttgatcaatttaaaagacaaatctttccgaacgtacccacacattccaggggtgctcatgtcaaatccaccatcaagaagttcaccagcatcactaacactaggctttgccatttgatgaagaagcttatatggaatcccgtaacctaacgatgttaacacaagaccaatccaatttttccaggtatgacttgaatgcgaaactataaccctcactaggacatacaaaatctgcacacacatattgccaaaaacatcaatcctcgaattcatcgaaacacaatcagctaaacattgtaactttcgagacctaaagatcaaattcaacggatttttagttccatattgatac

SEQ ID NO: 17735 - DNA, 3819 bp, Arabidopsis thaliana landsberg
gtaagatatcacaactctttttatttgctcagagctttccaaaatataagaaagatcaatatgtgcatggtagtagaaactagaacgttcttgattatgcttaattgtgttataaattttttgaaaaaaacagaaccaaaaacagagttgtagtggtgtcactttatgcttattcagataaaaaaaagactcaacgcgtttgtaaaatatgtggtaaagaatcggtttaataatttttaaaatgaaagaacaagaagaattggaatcagtcaaagtccaatttggtatgtacagtcaacaaattcctacacaactctcaacagtttacaaacgaaatcttatcgtctaagtaaatttccttaaagttgaagtttgaccggaaagtcaaaccgaggcttcttcgccggcatagggctcatgacttcgtcgtctccgttgaccatcgagaattcagggatcggagggatgttgaggtcaaacccacggtggctactgctaacgtggctagtggaccccgcaccttcggagttggacacgctactagtgttgatgttgttgtttccttcgtagtggcaccgcttgtgtccgccgagagcttgaccggaaggaaaagacttgttacagatggtgcaaacgtgtgatttcccacttccagtagtcacggcggatgtggttgtcgccgacgaggttgaatgatcatctcctccgccggagagagtctgtgataagttcttacggtggcttgccttgtgaccaccgagagcttggtaagaagagaacgtcttgtcgcagacgctacacttgtagctcaacttctccaccgccggaggaggaggaggctgacggttgtcgcgagcgagaagcatgaggcaaaaagctagatactcttcctcagtgaggttttggtggtggaaatcggatcttgatctcttagatcgcttaccctttgtccagtgctcgactccatggaagactgaagaatcttcgaacaaaggaggaatcggagaagctaatcttggtgatgtaagagcctcgagcgccattaagttaaagattctgaggatttcttgtctctcgagttttagtttgaaggttgcttgtgaattgcagtgaagaaattgtttaattgctgaagaagaagtaatgaaagtgtgtgtaaatatatagtagtaggtggagtgtggagaaggaagttgcgtgacaagtggtaggaaagtgtgaagagtgaaggtggcgattagataattactatatttttctaaaactctttttaatatgcggaccaaagttgtgatgaaagtatctagatgtttttttgggggtaaagagaggaaaataattagggcacgtttggtttgacctagtacacgtgtgtgtgtgtgcaagtggtgttggtaaaatgaagaagaggtcggctataagacttttccttcattacttagtttactagtactgatgccgccttacaaaatattctagagtttctgtggtttctggtcgttgtcatggatggtactcgtatggtacacgtttcggtttactttaagatagatagatagttataacttataacaactaaccagttgacaaaaaaagaaagaaagtctaacaactaaccaatattgatttggaaagcatcttcggaaatatctatctacaagatcaattcatttcgaaaacgtttttcttcttcttactttcacattagaaaattgagccatcacttaaattaggtgatatatataaaataaaacgttggctagttttagacttgctttgtctaaagaaacaatttaatggttcgaccttgctcgatggtaaaataaattctaaaacagcctaaaagaaaaatattcgtctgatatttacctgtttttttggttgggtatgcaaccatcaaccatgattaaagagaggaataagaatctaaatgcggaaatgtatgtattaccactcaaagcttttgaacagttattcatattgaaaaggtggaggtaatttaggactaataagaggtctgagacggtgcatgactattatacaagaagactatttcaagtttccacagtcaaataaacaaagctaaatgcaaggagccaacatttttggtacaactatactagtgatagattaatattatatttatgacagtaagatgtgggagacgaactacatttgactaaaacaaagagcaacgacatttgacttcttcacgcggcgctcttcaaagttcaaaccggacggtttactctttatttgacgcaaacagttaaccggaaacagctagtgttacaccaaatttggtgtgatattgcatcacactcatgtcactttttagtgttctttggaaaagttttttagtgcaaaactttactaaaatgatgttttaattagtgtcccactagaaatgacttagaataatctgaagatgatggacctaaaattcagattactgaattctctggaaaatcacaaaaattcatcttgaacaaacggggatatttattatttttaaatattttctgtagtaattttttgtgtaagttcttctaaattttattatagttattgataatctaaatgtagtatatttgaaaagtcataaattaaaggagtttttggtaacacgttatccaaataaagacaataatacggattttatataacgcgtcaagaaatatgtatacatatattaattaagcaattggatgtatctgctacaaattctcatgggaggctgatgtaatcatgatatctcgaatttgaattttactttctgcattataaaacatgtgtgtggattactaaagtgtcgtcgtggtattcatcatgttatgtatggattggatccaggttcaaaacagtgcacgtaagacacattttgatgtgtatataaaggaaaacatgaaacttgtgaggtggatatatgtgatgcagagaaccaaaaatgtatttgtcggcgtgtcatcatgcatgggtcacgcattgccttctggataaagaacactctcactcacaccaaacttgtaatacatgataaaagtacgtttaaagacaaactcaaaagtgttatctagttatcttttgggttagttcgactttgagaagttgatattagaatacttatcagcttaattcaaactaatgttctcaaaccctttagtatcgttttatgatatttaaatatatatattttggcagattactcggttttaaaagtatgacaagaaaaaatgtaatttgaaagtgaactttgaattatatctgtatttctatattttagactggataaatttaaactgaaggtgagtaggtatttaatatacgtaaaatatattagttgagccaatgggtaaaaaagtactcatattatcatcatatatataggattagaatattagtcaatcagaaatgggaagaaaatgagtattttgattggttaagttcaagtagggccttgggttagaggagtcattattctttgggtaatacgcgttgggcttaaatgtttgggtccactcttcacattattaacttcttctcttatgatcgtattcgttttcttgtttctcatgaaaaagaagtctctcctctgtgtgtgcatgcatgtgtgtcaattgtcaagtaacttatgcatttttaaattgttaaatttgtggttaaatcataatacattacgtctttctcacatgttaaattttggggataactattaatcaaatgcatatttttgactaatgatttcgcttgatgtacgatcaaccttttaaaatacttaataatgtgtaaatcatctctttatcataaactttaacttgg

SEQ ID NO: 17736 - DNA, 877 bp, Arabidopsis thaliana landsberg
cggtttcacaagacgacatagcgactgtttcttgtttctatgtacaccatgtaataggtgactcgatcagaaagaagatgtgtgcggtcgtgcttttgccatcgtcttcatccacattgagactgctgtcactaaagcctactagatctctctttgttttcttctcgaagcatagaccgtgagatcttggtgcttctatgcaccttaggactttattaagcgctgctccatgtgaatcctttggtgcatgcatgtatctacttaagactcgaacgaagtatgagagatccggtcgagtatgaagtagatatctaaggtacctaatgtttcttctgtattacttctcatcgatactagcctcctcctttgctttacacaactttaaatttgcacacattggtatatgaacagcgttgcatccatccatctttgtttcttcaagaattttattcacatatctctcttgactcaatataatgccattctcatgctgtaacacttctataccaaggtaataagtgagtcttcctagatcactcatctcgaattttgttgacacctctttcttgaattcaagtatcattcttagagtagatcctgttacaagtagattatcaacataaactgccacaataagaagatcttcattctctcctttacggtacaacgagggctccttggaacacttaacaaattttaattccataagaatttgattcagcttatggttccaagctcgaggagcttgtttgagtccgtaaagagccttgtttaacttgtatacttgatcttcttttccctcaacaataaaaccttcaggctgaacaacatagactttcttgttttaattcacccatgaagaaaagcatttttcacg

SEQ ID NO: 17737 - DNA, 1821 bp, Arabidopsis thaliana landsberg
tttaattgagttgaagaaagagcactaattagtggattactagtatatatgttggtcaactttctctctcttctctttctagaagtctttcagaggtcagagatagttttttcctttttgtttacatgtccggatgttttccggtgtttatcatgtcttgtccgatttggtccagctctttttccatcatctccagcttctatagtggtggtggttggccctagtccggtagcatctggcttctataagcagagttagccagttttgacgtttgtgtttgccgtccggtttgtttcgattttcttttcggtgcttttcggctttgtcgtcgcgtttcattggcgcttgtgaagatactcctcaagtcgtttctgggtttattcttgaaaaaggcttgatcggtgatagcaaaaattgggatttacttgtagaaatgaagaatatttgatttgaatagatgttgattcgaactgaaatcatcatgggttttaggatggagaccacgactttgaccttatgatttaaacgatggagatacataactacaaagatgtattttccatgtggttttccattaactacgaacacgatggagaccacgactttgaccttacggccgggtataaacgccgttgatgaaccctacgactgggtataaacgtcgatgatgacccgacggtcgggtataaagccggtattttggagacatgtccaatctcatacgtgttaccaggtatgagcttgctgggaggtattgggatatggagaaccggagatagaccaagagcgacggttgagatgaaaagatcgagatatggcaagaagatattattctataaaataaatgttaatattggaatttttggaagtttaacattatatctaaatttaaatatattatttacatttatgtttatcataatttctatataagagaatgtacgttgtaacattattttgatgagagtctattataattcttcctctaaacacctttgtgttttttactctcatctaacttatcatgtggttatcatcaacattagaagaatggacataactatcttctcctgggttttacggtgacatggtgatgatgatgtggtctccggcggatttactcatttagttagttctttgatgctttgttccgtttcttttgagcaacatataccctttctaatgaaagcagtcaaggttgtggttttaaatctgaagcaggacttgaagattatgaaaatgttaacttctgagtagatgaaaaagggattatcaatcttctttagataatccaacatgataatgctcattagcttattgagttctgtaagtggatgtttgaatgtttccactgttgtaatactttgtaacacttgtgttatatataaaagccacacacttaatgagaaaaaaaaaaacaaggtttgattctttatttttccattcttctaggcctatatatataaggaaattcacttacatataacaacccaaattctctaaccgcttcaattagatctccgaattctagattccgatcaatccaaatcggggaagttggtgcttcatagattcggcgccgagtctggtttcctcaaagacggtgttgtgtcgtcgattcacgccgcgagtcttccttcttagttcttcgccgattcacgccgcgagtctttcttttgctaaagacgttcaccgagtcttcttcttaaggtgattcgaccgtgtacctctctagataagcctttgaatcaatctatcttgttgaagcttctttagatgaagcctttgactcattagtattatgaaacttatggacacttc

SEQ ID NO: 17738 - DNA, 470 bp, Arabidopsis thaliana landsberg
agatggtgatgatggtggttattgtcacggtgctgctgggagtggcaaacggttgtggtgctgatggcagagattaaaggtgctggcgatgctgctgatcactcacggtcatcctggccagtccaaaccctcccatttctctcatcacccctcggccccctatcgcccaccccgcactcccatcaaacgatgcttgccgcgaccaccttccttgcggcctcctcatcctccgaataacctccgcccctctccccgaaggcccacaaaccccaccctactatcaagtgctgcccggcatctcctccccccgtctcggtcccgttcctacccgcaacgcctccctgcccatgctcgacactcacaccttgcccacactcgccccagcctaaccggatccatgctttccaacgaagcccgcccatcccccctatgccagccacgggctcacatctcgcccctcccccttggcc

SEQ ID NO: 17739 - DNA, 2279 bp, Arabidopsis thaliana landsberg
  unsure (1)..(2279): unsure at all n locations
caaagctatcaagagtttggtaagtcaacttcaggagaaaacattccgtttgaaaggttttcccctagccttgcagctcatagcattttgtaacatacctggactgttagacttggtgttagatgactcaacctctaagacaatcctcctttggaaacgattaactcatccaaaacaagttatatcgcttcctcagattcatgctttggaagcaaccttaaggtattctttttcacctcaattatctatattgtgtctataatattctctttctataaatccagtcttatatagtattactaaccttctaattttgtacagctgctagtggatccgcttatagttggagaccttaatgctgactaaagttgggcagagtgggatgatgaggtgaaagataagaaagttgcatacatgtatgatttgatatgggcatctcatcaattccgaaaaacagattggcagggaggtgatgccacattgcctctaatctcagtcccaaagaagaagcaatctggtgttcataaaaagcacattgtggaccataagaagaaattagttgtgaagtctgtggctcccaaatccaagcgaaagtattcaactcgtagtaaaccggaactcaatctctctgatgatgagaagtctaagctcatcagtgaactacaaactaaggtggaagagctatcgaaccgtgtaatgaagcttgaaaaaacaaaaaaagcagtcagattctagcggtccacaaaactctactccagttatgttgcattgttttctagatcaaagcgcaagaagacaatggaggtccctatccaatctcaaacccatgaggtattcaagatttcaaactgttttaaatatttgaacattatcatagacttcaactttaggctgttttaataaatcttttaattttctcatagacttcatctcagtcacacacgctgtctgagcatgtatttggacagcctgaagttgcacagcaagtcccagacgatcatttagatgaagctcaagactccagtgatagtaccccattgataaacacagttagtgtaattgttaacttcaactatttacaaacttggtagaattaacgacgtcaacacatcttattgcaggagattactgatgaccccatggatgtgtttgttaccccactacaatcagagcactctaatcaggctgatgcaaatgaaggcaaccctatttatgacacagatgtcaaagatcaaaatgccaatgaggaagatgttgatagccaaatgcaggtacttatataaatacaaacacaactaatcaaagcctttctttaaccatcaaaactacattttcttttgtgctgtctttaatgttaatcatgggtggacaggttttcttggacatctataatgacttatatatataagagacattgactattgtaatttccaatcaggttgatccaagttcaaacccaagagtcgaaaaactacttcctctaaaccaagacaatattattgatgtaagataatatagtatttgttggacctactgcgcagaccaatggttaggtgtcttttttaccaaatccattcacatatttggacaagttttgtgtgctgcacttntgcatcagcagcaccttgcattcatagctcgcactcggggctgagcctagtaagctccatcaatttgtacccatcctctgtcctctccataaggctccacccataaaggtgccctgtagcattcttcaacgaaattctcatatgctattcctttgtacaatacagcagtcaaggcatgggtattgtttgcttcaagacatttattgaagaaatgctaatagatcgagtgtggcattgaccaccacatgaaataccgagatttgtcaagtcgaacacaacgtagtgtttcctctgaatatgcagtcggcttaaataccggacctgctttaatcaaatttttcaatgcatccacgcaatcttcagccaggtagctaacaattttagcaagcaatggagggggcatgtgaaattcttgaatgctggtttcctggccaaaaaataaaaacctaataagacaatataaataaaagtataaagtaggagagtttatgatttttgtaatgtatggaaaaccatttttacactacagccggcggatggttcactgctgcgtttctgtcttctcataattgatatgctcgtaagacatcaaatcaggaataatttctaaactggggagaaataatggatacttatttaaaaaaggatatggttcatattcttctattc

SEQ ID NO: 17740 - DNA, 339 bp, Arabidopsis thaliana landsberg
attctcgggcttccatatgacgaaaagatcgatttgtggtctcttgggtgtattttatcagaactctgctctggtgaggtactgtctagtttccatcaaaagtcttgtctatatgttatatcctacatactgaagaaacaagtaacacaatgtatcaatgggtgcatcaggttctgtttccaaacgaagcagtagcgatgatattggctaggattgttgcagttttaggccctatagaaacagaaatgcttagagaaaggtcaagagacacataagtactttcaccaaagagtatgatctctaccaccttaaacgaggtaatttttcattaatataacc

SEQ ID NO: 17741 - DNA, 673 bp, Arabidopsis thaliana landsberg
ccgacaaccggccagagtattttatttgatatgttttagataattaatacaggatatatacatcgactacatgattagaaaaattatattgcgactaagaaataaataaataaataaatcaataaataaatatatatatatatatatatatatatatatttggagttaaaatgcattttggatcgcaaaccttagtcagcaaaacgtaaagagaagacgtgcatgagatgatggtgaagttttcatggggtagtgtctccattgagattcctccgtttagaattcaactatatttgctgtcaaaaaaatatatcaaccttatttttaatattcaaccttttttatgcacaatatctaaattaggttttttttccgttctaagacaagcaaataaattaccagagtgattttgttcaaaaaataataattacaagaatgagaaaaaaaggctaaatagtcataggaaaatacttaaaaatcccacgaccagaacataaaagtccatttggaagaatcattggaaaatacattacgggtagaaaaaaagggaagccacgaaaatgaattagaattggaaattgtggggtacccctccaaaatatgaacaagtaaattatttatgcgaaatatgtattggaataggttcttttaaactattaaaaggtgaaaaaag

SEQ ID NO: 17742 - DNA, 681 bp, Arabidopsis thaliana landsberg
ttgctattccgcatttcgagcgtatcatggtttgaaggacgaatattagaaggcatacatatcataggaaaattgggccaacacaatactttgagtctagggggcaaatagtccaaactttcgggtaagtacaatctacctgctttttcaaagttcttcgaattaatttctaagaaacggagattacgcatgcgggtgtaagcactcttatgtacatacaacccaccaatattccttgaatccagcgatatacctaaaaccttttgagtaccctgaaaaatatgatattaatgagaaacagacaaacccatacaattcatcgtttatcagatgacatctcttaaacctcatatcttgagttatgtaaggatcaaatatatttctaaaaaacttacagtgcatgcattgagtacataacgtatatcatttggatccaccagaaattctcgttctccaggatggccaatggactgaatgcgaacaatttttctgcccatttcttgtaacatacggtgcatctccacatgaccccatatgacataaatgatggacttatcaaccaggttttgcaacccaacattaacaccaaatatactatctgctagcaaggacttgatggttgtgacttcaatatgattgaaaaaacatgctatatgacgaaatatcgctttatcctcttcg

SEQ ID NO: 17743 - DNA, 947 bp, Arabidopsis thaliana landsberg
tatacatatatgaagatgcaattgtggacattactccagaacccatcacactcattcaaagaatcaaatcaagcaattatcataagaacaaacactcaagcatataaatattttcaaaaatagttttgattttgttcctaagattaggtttcctattcctagaggtcactttaggcacatgatttcaaagtgtgaaatccaattttgtctttagaaaagaaaagataagagcaattagagtaaagcagcagtggatgagaaaaaattaagaaaagtttagaaagaatcagagtagtaaaggtaagtaggtaagggatgtccatttctatctaggtttcgtcctacagtcaacatttcctctgataccacttctgtcacacccggctttaaggaacaaagccaggtgcatctcatacatgcgccaagaagacaacatatataataacagagtgtatagagataaatgtcataaaacatcagagtatttactacatagcggaagacttattacaaaataaaagaataaacataaaacgaactaaggatcgtcggcgccaatgtcaactgagcaacaccacctagatcagatcatactcctcgccttgtggctcctcctaaaccacctgctcttctcctgtggggggtgtgagacagcaagagtgagctcacacatgatcatcgctcaacaagttgtggggaataatgtggcatgaactcaccaaaggtgggagttcatgaagtgtaaggctgatcaatgaaataaaggctgaagctgtgcaatgcttttataagttggtcaaaattttattagcagttactaagtgtaagtaaataccaaaccatagtaataataagtaaaaataaaataatcccaaatgcaatgaaatgaaagattcactttaagttccataatttaatcatgtgagtgtccgggacactcaataaaa

SEQ ID NO: 17744 - DNA, 1006 bp, Arabidopsis thaliana landsberg
atatatatccttcccttattcgtttcatcgcattcctccttgactatgcaactcccgaaacttcatacaaaaaaaagaaaatctaaatttatctgttttgctctttcccaaattcaaggttgttaggttggttaaagagggaactggaaaaaccacattggcaataggtgatggtgcaaatgatgttgggatgattcaagaagctgacattggtgtaggaattagtggggttgaaggaatgcaggttcagtttttctctcagcaccatgccttttctgtttttcaagccatgttttctgtttcttgactagcagaaagttcattgaaaatcaaaccatgtcgacatttttgctgatccttcttacttttgcaggctgttatggctagtgacttttcgattgcccagttccggtttctggaacgattactcgtcgtccacggacactggtgctacaaaaggatagctcagatggtaatatgtagttcttttggccattttagttactcttacatttagtttgtttctaaccttatgttgttctacatccagatttgctatttcttctacaaaaacatagcatttggtctcactctcttctactttgaggctttcaccgggttttccgggcaatcagtatacaatgactactacttgttgctcttcaatgttgtccttacctcattgccagtaatcgcccttggtgtctttgaacaggatgtttcttccgagatctgcttacaggtaagctttataaatctcccttcttgaaaagctatttcgaatctctgctgatcatcgacaataatctgtgtttttttcgcttgtgcttgtgtagttcccagctttataccaacaaggcacaaagaacctcttctttgattggtcaagaatacttggatggatgtgcaatggcgtctatgcatctcttgtcatattcttcctcaacatcggaatcatttactctcaagctttcagagacaatggccaaacagctgacatggatgc

SEQ ID NO: 17745 - DNA, 1266 bp, Arabidopsis thaliana landsberg
tttccacatgtcagtatgaaaccaaatttaagtaagtcatgcagccaagttcatcagcttgtttaatattttatacttcaccttttcccatgtcttcaatgtcgaaaacattctgtgggcagacgtttacaagtcgttcagcaagttcatcctcaacttccccacgtagaaccacctaagatagtataaacaaaagcattacgaaacatatatattgggatgaggaaagacaaaacaaagagctgtttcccataaagcatatgatagattgatgtatatacttctcacctcaggatgcattctataccaagcagtccctactggagaccactttgcatgtgttttaccaatgcccttaaccgcatgagcttcgagctcgatttcctgggaaaaaagagataaaagaagatgcacatgtttcatctctcattgcaagtatggtctgcttgggtgtatataaaaagaatgtacagaaacactacctgaccaggggcgagttttgctatcaagatatcgaggtcgcatggagtgataggattattagcaaattcaggtaatgaatcttggctgcaactgaatgaagtgtaagtttttggctttgaggttttattttccgattctctcagaagctcacttccatttggtaaccattttaaatcactcgttaaaactacaagaaaacgaaatgatatctttcatgagagatggagctgataataaaacaagaaatcttctgatgctaactaatgaacatatattacctttaagacgtggtctatttttcggacatttcacatggagtttgaatacaatggtgttcttttcattcgcctgatcatgttctatcatacacagataaagaagtaagctaatcagaagaattatcatcatatgtagatggatcacataccactgaaatatatgcttaccggataaatattcaaaaagtcttggatctgcggcaattggaataagacccatcctgtgagcaagaacttcgtctataataaccgatgtgttgtacgctatcaacactttttcaatagccattgaaggaacctgccataaagaaagaaaccctttaagccaaagattacaaccaatgagggattcatcagaggttggatgaaaacttgacagaccttaactattaggatccttcggaatgcattggcaaacgctgcatcaataccaatcatatcaaattccatatctgtctttgtgagactaaccacatcaactttgaagttatcatagaagtttcct

SEQ ID NO: 17746 - DNA, 382 bp, Arabidopsis thaliana landsberg
tgcaatttagaaaaaatatttccaccatcgttttttgatgttataaaacatcttccggttcattttccttgggaagtagcgctaggtggacctgttcagtataagtggatgtatccatttgaaaggttcatgttccatctaaaaaataaagtgaaaaatctgagcaaggtcgagggttctatcgtggcgcagagtataaatgaagagaaatcatattttctttgtactactttcacctaatgttcaaacaaaagctagaaaaccataccgctatgatgatggcgggaagaaaccttcttaccacaccgatatcccaaaaatatttacagaagttgggcggtttagcggaaaacaacagtcggtttggttgacagatgaagaa

SEQ ID NO: 17747 - DNA, 2772 bp, Arabidopsis thaliana landsberg
tgttgttgatggcaatccctccatatccttctcagaaagcatccctgaatgtgttgaaggcacaacaaacatttaagctataatcaatatatgtgaagaagtacccaatagcgacattcccaaactaattcagtacaacttactcatttggtttcagaactgcaactgcgccacttggcaaggaataagaaccatctggggtcgccatcaacatggacttggggataccagtaggtggcttaactctcttaacatcatagttagggtctccatttgtggggcaatgctgaataaaatgtcctgagacagcaaagaaaatgctctcaacacttcttatctattatatatccatctacaaaagtgagagaaaaataaagattttcagagctgacataccagggatattgcaacgatggcacacataacctggaggtggcgttttcctttccattcctatccagccagcaaaaccaaactaagtatcttacaacttgagcaaatagaacaaaaatataaaatattttgacagaagtaaatgttttgtatactgtattttgacattccagaattcaaccaaaatcaaagaataaaagtaagtataagttaccaaaaccacgtccattcatccttccaggcatacccctcccgtaacctctaccagctccaaaagtatcttgaccttgtctgttacattgaataaatataagaggtctgttaaaccttctcacaaaatccaacagtttcacctgcaccatttctggaagattgcttaccgttgttgccagtcaagtgctggagtgtcaatcagcgcctgaattttgctttcttcatctactttgtcgtctgcggttgcaagatgaggacgtggaataatatgctgggcatcttgggtatcaggaatggaataaagatcagtcccaaactcgtcatactcatcttcaggctaagaggtgaatacggatgacattagtacttttgtagtagaaaaaaattaggtgcagtcaatgccaacagaagccgagaaaagttcactataatcaacttacaaattcagcagcagatggatcagcaacaggaaaattggtggtttcagcctgaacgtcttccactttattctggattctaggcctgcaaagttaagatatttgcatcattgaggatcccgaagtttcttaaatccgatagtcagacaattaacttatgtttagctaaaacgatgcaccagtaaaatgcaatgcttttaatatcatgtctatttaagtttaatagctaaataagtagacaaagaatatagaaactaaagatctgagaaagtactcttgtgtggtaataactgtgatgcgaggacgtccaggaacccgacgaataaggacagatgtattctttgggattaacattgcttcatccagatactctgaaaattcaaaacagagaacatataaaggccacagattgcaatcatattggcacgagacacagtacactaaagcttcctgagaaattcaagaatcatattccaacaaaccatttcctaatagttcacaaaagtaaaaaaaaaataagacaaagctcagctagtaaacaatcataacataaaataaagttcattgtatcacagctgcaagcaaacagtctaataatacgaaaagcgcagcacaacatttgacatagaagacaaaccttcgttagtttgggcattggagacgacaatatcaaggtctttaccagtgcccaaatgcttagtttcgaaaattttgtctttgagaataccgacggatataaaaggaccatccatggcaatggtatcataatcccttgcactcttaaacttgtaataaattgccattgaaaatttgtatctgatataaaaagcaaaaaaatacatatatctattacttatcttataaagatcatgacacaaagctactagattttgaaaaccctaatcaaggcctccggattattaaaaaaaaaaaaacgaggccagagatttgatttccaaaacaaaaaggtaaatacaaactaagaaaaccctaaagattcaatttttacttcgctgattcgacttcacagaaggaaactccacgcgtgtagcaaaatcaatccaaatcaacgaatcctggaaaagttcctgcagattcaaggaacgagaacgtccgtgtgatcgccgagcatgagaatggcgccgttgatgtctccaaatctccttctccgaggaatcttcgcagctacaaaacgacaacttgtaacaaagaaacggatgatcgggcttcactccataagatccggtagctccaagctccgatttgggggatcaaaatcgagaaacctttcggggggaaattgaaaaggatctagagagtaatcataggaatcgagtagagagcggtgtcttcacgagaaagaagatagatcgatcttgaaatctagggtttggacacaagagctctctttctctcgtatccgtgtttatgtaaatcccgtaagagaattttcctttaaataatgaattaaaatcttatcttatgggcccacttataaagtaaggatatggacagaaccacggctttgtttttatttattttccttcttaaaagttaaaacacattaaattacctaacttttgttaatttgaaaacgtaaaaagttgattttagtatattaataatattttatttggtgaataaatagttttgacttttaataagctaaaatcatacagttaaatcaattttttgtgaaatatgtaaatttggtggtactttatgctat

SEQ ID NO: 17748 - DNA, 519 bp, Arabidopsis thaliana landsberg
tcatgagatccagtaaataacaactaaactcgaaataaaaactgacaatcgatttttcattcctgctcatcaactaaaatcatagtgggttcttccccaaagtaattaggaggccaattccacaacctcaatagcttaacacatacaaaacttttcgttttttaggacgcaagtcagagaagttcttgaaatttaacatttccagaataactctttttcttcttagtgttttcttttttgtggaaaatgaatgagataaggagagagtctattgatctttccaataaacgtaacttcttttttccgaaaataattatatcttctctgatatttcagatttcacccaatgaatgattactttgtttttgaattcaaaaagatttattcggagggttacagggtccatggataaccccatttttggaaattccgattaattacaaaaattatgaaatttccccttctacttttgaattttttttttaattaaaaagccaggttattgactattaaaattta

SEQ ID NO: 17749 - DNA, 596 bp, Arabidopsis thaliana landsberg
cctaaccccgcctcttcttgatggtttagatttattgtcggattttacccttgggaaaggtttagattggtaaatataggaataggctgaggtttgtttgatacagggagaatattcggggatatgtggattccttcctttccatattctatcgagctggcgatgatgtcagcattctcatgacgttgacgttgagataagaacgacgagtcattttagtcattactaactctttcttttttcttcggttattctctacctattttagaaatatacacatgaatttttttgtaataacaaacgagtgaagaagaatatccatagagattggaatcaagatatgtaaccagaaaattttgaacattcattaaatttacagtttagaatatattatatggtatcatatcataaattacatttttatcagaaaagaaaaagataaagaagttttggcaaaagtggaggaatattcctcgagagtaggggagaaactaagctggaaaaaaacatattaaattggaaaaaattgggaacgagagaatctttggaaaagtgacattcacccatatccagatcccccccggttccctcatgaa

SEQ ID NO: 17750 - DNA, 565 bp, Arabidopsis thaliana landsberg
cgggtcgggtttaagtcatggggtcaaaggtcaggggtcacgtgctccgtccgtgacttcaactacgccggcttatcggttgtctgatttgagacttcttctcggtgttatgggagctcctctcgctcccattaacgtctcttcctccagtcatcttcttcatctcaccatcagagactctcccactgttagtctctgattattctcattgttacatttctaaatttttagggttttgggaagtaaaaacacaaactttatgtttttaatccgataaaaatcgtaaatttatgattccagatctctctgctccacattttcgatttaatttcttgtttatgattttttttccttttttgatttttagttaaaaatcttatttttggatgatttatggattggttggtggaatattgtcattatctggtgggggtttgattcatgtaatactcagagattagttactcaaaccaaattcgatttttgttctattattgtgaaaatttgttttctctggggatatggtgtttgaaggaacattatctgcacagtacattttgcaaca

SEQ ID NO: 17751 - DNA, 672 bp, Arabidopsis thaliana landsberg
aaaattaaaaatcaaaataaaattataaaattttaaaaactaaacaaaactaacaatattaacaaaataaatataacttaaaattttaaattctttattataaaattgcccaaaggtgtatcatatataaaaaataataacatatgtctatatctcatcttaaagaaaaaatttaattttttgataaaaacataagcatgtgatatacctcttaatatgttataaataatattaattaaaataaaatctttaactttctaatggcttactattgagtagatctcaccagaatcattgagaagttggttcccaacaagaataatatttgattccataacgctgttacttgtttttactgaagacaaccttttgaaaatctactttaaacatgtctttcatatatgcacacgcatagtttgtattgtggaggcctaattatgttgcttacttggtttgttcttttcttgaatctaaaataatacaagttactttcaattttgatgtaaggttaattaagagttaaaatttttgagtgatatgtggtttttggtttccttgatgcttaataaagttactttaatttctctactgctttggtcatttggtgtatgattaataaatatatatatatatatatatatatatatatatatatatatatatatatatata

SEQ ID NO: 17752 - DNA, 462 bp, Arabidopsis thaliana landsberg
gatggacggaccacgacgtcgtccgcctaatgctaaggtcctttactgttcttgatcctcatttggtgaataatattcgtgagaatcccaggtacaccaaaatgtcgcccgaagaaattcttggaaaatttgtaagcgggcggatgatgatcaaggaggcaaggtacgtcgatgacgcgttgaacggtccaatccacgagcctcaacccattgctctcaaggcatcgaggagcaaggaggcactaccaagcaaggtggcgcaaattaaggtggccgggcttaatgacgaagaaatggctctcatcattaagcgcttcaagacggtgctaaagggtcgcaatggacagccgagcaagactaagaccaaggggaagcgatcatgcttcaaatgcggtaagcttggtcattttattgctaactgtcctgataatgaaagtgaccaggaaaagggaaacaagaggg

SEQ ID NO: 17753 - DNA, 718 bp, Arabidopsis thaliana landsberg
  unsure (1)..(718): unsure at all n locations
caccatgccgttcgcgttgaggaatgcgggtgtgacgtatcaacggtgcatgaaccatgtgttcggcaaacacattggccggacggtcgaggcctacgtcgatgacatcgtagtcaagacaaggaaagcctccgacctcctttccgaccttgaagtgacattccgatgtctcaaggcgaaaggcgtgaagctcaatcccgaaaagtgtgtcttcggggtgcccaaggcatgctcttggggtttatcgtctccgagcgaggcatcgaagccaacccggagaagattgcagccatcaccagcatggggcccatcaaggacttgaaaggcgtacagagagtcatgggatgccttgcggctctgagctgcttcatctcacgcctcggcgaaagaggcctgcctctgtaacgcctcttaaggaaagccgagtgcttcacttggacccctgaggctgaggaagccctcgggaacctgaaggcgctcctcacgaaggcgcctatcttggtgcccccggctgccggagaagcccnnnnnnnnnnnnnnnnnnnnnnnnnnnnnnnnnnnnnnnnnntgattgtggtcgagaggcaagaagaggggcatgcattgcccgttcagaggccagtctacttcgtcagcgaggtacatgtcgaaaccaagatccgctacccacaagttcagaaactgttgtatgcggtgatctgacacggcggaagttgcg

SEQ ID NO: 17754 - DNA, 998 bp, Arabidopsis thaliana landsberg
tctctttttgttgcatatttaagttggcaaaaagagtatgcaaattatcttcctcatcacagcattatcatcgctagaggattcatatctagtggaggatttagatttaacctttttctttttgccgtcctttgccatgaggcacttgtcgccgacgttggggaagaggagtcccttggtgatgacgatgttggcagcatcctcgtcgtcgaaggagtcgctagagctttcgtcggagtcccactcatgacaaacatgggcatcgcgcccttcttcttgtagtacctcttcttctcctttcttctccccttcttgtcgtctcccctgtcactgtcactagaaataggacattttgctataaagtgaccgggcttaccacacttgtagcaaaccttcttggagcggggcttgtaatctttccccctcctttgcttgaggatttggcgaaagctcttgatgacaagcgccatttcctcattgtcgagcttggaggcgtcgatgggtgtctacttggcgtagactcctccttctcctccgtcgccttaaatgcgaccggttgtgcttcggatgtggaggatcatctagctcgttgatcttctttgagcccttgatcatatactcgaagctcacaaaattcacgattacttcctcgggagtcattagtgtatatctaggattgccacgaattaattgaacttgagtagggttaaggaaaataagtgatctaagaataaccttaaccatctcgtggtcatcccactttttgctcccgaggttgcacacttggttcaccaaggttttgagccggttgtacatgtcttgtggctcttcccctttgcgaagccggaagcgaccgagctccccctcgatcgtttcccgcttggtgatcttggttagttcatcaccctcgtgcgcggttttgagcacgtcccaaacttccttggcgctctttaatccttgcaccttgttgtactcctccctacttagagaagcgagga

SEQ ID NO: 17755 - DNA, 455 bp, Arabidopsis thaliana landsberg
  unsure (1)..(455): unsure at all n locations
tatgtgggatgccaaaggcatgatgtgtgcagttgatcctcgtcatggtcgctacttgacagcttctgctgtcttccgtggaaagatgagtaccaaagaggttgatgaacagatgatgaacgtccagaacaaaaactcctcatactttgttgaatggattccaaataacgtgaaatcaagcgtctgcgatatagctcccactggtttgaaaatggcatcaactttcattggaaactcaacttcaatccaggaaatgttcaggcgtgtgagtgaacagttcactgccatgttcaggagaaaggctttccttcattggtacacaggagaaggaatggacgagatggagttcactgaagcagagagtaacatgaatgatcttgttgcagagtatcagcaatatcaagatgctacangtcgtgaagaggagtacgaggaggacgaagaagaagaagaag

SEQ ID NO: 17756 - DNA, 1204 bp, Arabidopsis thaliana landsberg
agtcggccttgttcttatttttcatcctgctctatacggattcgtgttatctaatgtttacatccttcaatatttttgctaatttagtgtcttttatctgtttctttggttgcaggatattgcagaggctaaggacttcttcaagcacaaaggggtagatgttggatcgaattgacacaaaggcttttatcagaccattcatcagagatatttttcgttattgacaaaagacttaactgtactgtttggaatttttgaatttaacagtgtcactgaggtaaaacgcaaaagcttcgtatgcatccaaaagtaatcgcaaaagtataacaaatattccaaattgcagaaacttattagtaacaatagaagcatttacattttcttgtggtgaattaccataaagctttggcctttgtgtctagtaagttctccaggtatgcaaaagagatcgcatcaacagattgaatcaggctatcctctgtacgaaaactctgatatgcaacacaccaagaaggtattaagtcgctcataactgagtaggtttcaaaagatacaaatgaaacatttggaaccaaaccagtttttaaaagatactaagcaggaaaatcaaaagacactgaaccaaaaagatcataaagatatgactttgatattcaacttgcatttgccttctcctttctttatctgtccacaacaacacctaattcaaaccagctgcttttctgtgtgtttatggctctcctttcgttcaaccatgccacagttctttatgccttaagaatacgctcctctatcgacaatgctagcacattcagctcttgaaatctcttatcagtcttgtcattgttatcaacatcaccttcaccaaaatcattgtttcccttttcagagtactgctcattggatttcatagtttcttcacttctgatgctatcatcatgaagcaaacaacaatcctgtccctcatttccatcccctacagcgatgtgaatgtttgactcatcagatgacttcagaaccttatgcttatatgcttttcttgtttcatctccattcgtgcatccagaagcaaactttttatgagggctagattttttttgttgttgtctgcctttaatgctagcaccttctcatgcattgatccttccatcagcatcttccttctctgcttcattacatcaaacactttggttcgagcttgagc

SEQ ID NO: 17757 - DNA, 631 bp, Arabidopsis thaliana landsberg
  unsure (1)..(631): unsure at all n locations
ctacgcctccaattgaaccagtcattaaaccgggtttaaccacaaaattgtatttactgttnnnnnnnnnnnnnnnnnnnnnnnnnnnnnnnnnnnnnnnnnnnnnnttacccacataagtaatcacgacctgtcttgaaacgacgtcgtttcacctttgttttatttctaaaaaaaaacaaaccgatgtcgtttggttgggcatcattgttcgaccgattgaaaaattagggttcttgagagaaaaggggaaaaagggaattttagaatttctgttttttttttgaaattatgtcattctggtatgggtcttcgtcgagttatgaacatagggaagatttagtgtatcagagtgacccagatgatcctgatttctgagggtccggagagtgggagtaggtcgaaacggcggacggtggaagtaaaagtggcgatgaaggagacggaacaccagcatttcgatgtgccatacataatttttttattcgatttacgaaaaataagaagaaaacgaacaattaataatcacatttgtatcagccttgtatttataactatgtttttaaacgtatgtggatatgtataaataatgcattataaaagacaaaataagtttgccaaaaaataataa

SEQ ID NO: 17758 - DNA, 314 bp, Arabidopsis thaliana landsberg
tgtattttgggaacctcgggtttattttctactattgctattttcttataggatatattaaacagtttttaatgatttaagattatttttaagacaattttgtatttaaattaagaaagtggaatagaggaaagctataagtaaggtgaatgcacgtcgtctcaatgttgagggagacgggtgtgacagtccttgtgatcaagacagctaagttacgcggaattcgaccttggtcttatttgtcaaggatttaaacagtcatatctctactccattcctttggggtttgaatacaagggttcctagtttaattt

SEQ ID NO: 17759 - DNA, 3459 bp, Arabidopsis thaliana landsberg
tgcttcctcctccaactactcttctggaatctcgaaagtatgccgagacggcatctcattttttgcgggtatgtgctttgttacttataacttgcttcggcgttgtcattgtaaatctaacttttccttttccaagttgtcgcttcgatgaaccggatggtacattcgtatgattcggccatgcggagcaacatggaggcggctggcaagttagccgaggcggagtctcggattcaggccatcgagcgggagaaaaacgaggccctctccccagctgccgcagcgaagctggaaagagaggaggtcgagaggatggcctttgtgaacaaagaaaatgccatcaaaatggccgagcagaatctcaaggcgaatgctgagatcgtccgtctcaagcggatgttatccgaagagagagggcttcgtgatagcgaggtggctcgggccattcagacgatgaggcgggaggtttccgaaaccttaattgccaagataaggaccatcgagcacaaagtgtcgctccttgatgaggtcaatgaccgattcatgtacttgtctcaggcgcgagccaacgcgcagctgatcgaggtcctcgaaggtggcggagttctggagagagagaaggagcaggttgatgagtggttaaaagattttgccgatgctgaggtaaattttaatcgcttaatggccgagctgaaagatgacctcaaagctccagctcccgagcccgctcctctgagtccgggtggtcataggtcggttgagtcattatccgacgaggcgggaattaccgatcaagccggatcgctcctccctgccaaggataaccgcccatccgaagatctcgactagggacccgaggcggttttttttttgtctttctcctctttctgctcggttatattacttatgcctggatggctttatccgttgacatgtagaacccgtgtctggatggctttatccaatttaagtcattttttgaaatccaaaagttatggtttattagtcctgaattgttttattagtatcggattgattgattttttttttttaaatgtttagagtgagtctctcggttgcgacccgatcgtattcactccttgaccagcgtttaggaacgagctgggataccggtgttaaaagtataaccgggtttctgaagatgaaaatttcttatcagaaataatctgataagttttcacctcgtatttgtatagcgcgctctagccgaataggcgtaatggatactccgagctgtcgctcattgtattagccgagtaaaaagttgaatttttatttatgtttcggttcgaaaacctgtaagataataaaaatgggagtatgaatatacggacccactccccccttttttaatgggggggggggggtagctgaactcgtccgaagacgagctccctacgtacccttttcagggttcaagccacctcgtagttcaagttttgtcacctcggatttagttgtagtatttccttaggtgcattgcgttccatgatcttggaacggctttaccgtttaagtcagcgagctcatacactccgggtcggatgactttagaaattaagtacggtccttcccagttcgtcccgagttttccagcgtttagttcggcagtgttctggaaaacttttcggaggacccgatctccttcatggaatcttcgttgccgaacatttgagttgtaatgacgagccgtttcattctgataattttgtatgcgaaccagggctgaatctcttcttatctatttgaatttaatcttgacttaatctatctcacttagaggcttgagaatcatgtaatggatcatacattcagagttttctttgcatcatttttatcactctttgctactctgaatgcctggactcatttttagtctagtaccacaccatttgcccacccattgtttgaaacttcatgcacttttatatattcattatgatatgcatctatgtgcgaaaactacggaatatacagaccgacatagctttccttctgctaggatagtgagttgtagtttattggttgttcatatgtgatgagatttgaccattatggtttagaggttgtcaacttgtattcatgggtatgagatgttacactgtttgagtttctcctgatgcaaattttgttagacaccggttccacttcctagttcctaaaaaaaaaaaggaagattaacaaaaagaaagaaatgggaaaggagaatgaaggaaccggaaatgtcgagttgttattattcatataaataagcatcataggaactcattgatttgattgggataatatgtgttggttggtttgatctgaacttaagggaagctacgtaccacctaatcggtttgtgtctcactgtgatttcgcataatgacatgcatccactttacattgtttgagaacctgaaacacttgagccaccaaataatagccttcttacctagcccaaaacgtgtttgataccccgtttgtgagagtacacgcttctgttaatgaatgttaaaaggttaagttcgttgactctgaaagttcgtttagatctcgggatttaattttgtcgctacacttatggcaaagtacaatctagtacgggttgatgaattttgtgatggtggtttgcagacaattgataagagcatgatcccgaaaaaaatgtgagttctcatgttttcaaacctcttctcctgatacaggtttttgatttccttgaggacaagcaaagacctaagtctggagaagttgatatgttgtgtttttgatgtctttagtccattcgttttgagttatttgtcgtgtcatagtccgtcttttgtgtgttttcggttgtgtcttgagtcttttgcaggttttaggaacttttgaggtgaaaagatggttttgagcttgttcgggtcgagaaaggacgagagaagttgaatcgaggacaaaggaggaccagaccgatcggtctagtccatacactgatccgggcgacagagacggaccgaccgatcggtacatgattagaccgatcagtccgcactgatcaggcgacaaagacggactgatcggtccaacgtcagacatataggtctgtgcatcaatccagcgaccagagacagaccgaccaatcggtccaacatcagaccgatcagtccagcttcctgacgagtagtttcggtttccttaaccagatttatcttttattttctgtaattgggtataaaaacccaaagtcctaattttatttctacgttttcttttaccattcttttttgtgcaacattttctaagaacctttccgtaagcgatttcgggattagagattcatcctctttgactctttggagaagatttctaaacttttatcttgtttattcaatttgcattatgctttctttcatatctctttgtgttgttcattttgctatgagtgagtagtttcttaattggttttagggt

SEQ ID NO: 17760 - DNA, 609 bp, Arabidopsis thaliana landsberg
aacaaccttcttggttgggagcagaaccttccatggaagcttctttctcctgtgcctcttggagctagtggcctaaaggagctttgttgtgttcctgatgactgagagctgtgttgatgcccttaagtatgattacccctatcatcatttgagctagggttatgaatcgtcctgacatgcctagggtggagccttcctccgaagcccctagtcatctcggagtatatgtaggcctcttcccttctctaccgaaagtcattatcgaccctaatgtactcgtccatcttctacagaagcttttccaaagtttgtggtggcttcctggcgaagtactgtgtcgtcggtcctggtcggagccctttgatcatagcctcgataataatctcattttgcatcattggtgcctgggccctgagacgcagaaaccttcggacatacgcttgcaagtattcttcatggtcccacgtgcattggaacagagcttgggtagttactggcttcattgggaaacctgaaaactggttacaacatgtctttagcttctgcatgacgtgatattctcgggcggaggaaggaatccatgtctgagcacgctctgactgcatgacg

SEQ ID NO: 17761 - DNA, 2037 bp, Arabidopsis thaliana landsberg
ctgactagactctaaaaggttaatgcgagcttatgggccttagagcatgtccattgcagggaccttactagttttttaagagaattctaatggaaagaagcataaaaaaaaaaaaaaattgtctaattaaccaaggtgcgaaccttgaataaggtatttttgggtgagtaaggttcgctaacgtggcactatatcattggaggaccaataaaacaaaacaagtttttttcgttttttctttctctcctctctcttggtttcgtatagagtttctgggttttggtttatgttcaaatttgtgtttgatctgttggtttttaagataaaaatgtgactttttgctgcttattcacttctcattagcattacaacggattggtgacacaaaataattggttctaggtttatgtttatgctcttttgtttgctcatttagttgatgttatcaaataattggttctaggtacgtgctttcatttaagttcatgacagtgtcttgagctggagatagattattctatgttcttcctttggtgacaatttcattaatagacctctcatcttggactttagtttcctcttgtaagccttttgatttgtattctttttctcttttttttttgcttttatgtcatcatatatgtttacaatttgtaatattttctaatacttttaagttttatcaaataaattattttaaaaatatttttgctttttaaagaaattttcataaggactccaccattggataacaaaaaatttagagacttaacaaaaactctaaactttaaaattaccaaaatatattattaaaaaatgttaaggattttttgtaaggattcaatcaatgggcatgctcttatcttttggtttcttcttgttacatcgttttttggggttccaaatatttacaagacttaatataatccatttagactgctcaaaaccactatccaccatgagccaactcgtgtagcccgcattattttagcatcaacatttgtagccttaactcgtctcatggtagggtaatttatgcccaatccacgggttctcgacccaatcgacactcaaaaataatagtcctaagggtttgcatttctttgtcgtcacttttctatatttttaaaaaatattcaagtttaagatattagtcaggccattaaaacaaacttagaactctgccattggtaatatcgaaaaccctttgattccacttgctcatcagaaatatcataaaggatattatcatgattcatgaaaaatacaaggcaatatcaaagtaaagagacggtccattctataatgttgcaaaaagggttcttttatcataatcaaaatgcaaatcgatggggtaattgttgattgttccatggtttcatccacatgaatccatattaccacagttttttgtaaacatctcctaatgcgatttacgatatgtcaaatgatcatttccccacattgtctgatacctgtaacaacacaatcattaactttaatccacgtcgaatctaaaaggaagagaggtcatatggcgatttcgtgtttatataccttacaagatggcttggggtagaggatatcgtaatggcctggacgatacagcaaggttataaatggagcagaagcttcttcatctttctcattggtaatgcccacaggaacaaagtcatgatgattcacagtgacgcccccactatcacatgagctacggtcaagatacacaacacggattgcaacaccaagtgcgtccgacaaagcagatatgtgaatatggtcactctcttcccccattggttcgaccgaggacttgcaaaactataacaatgtagtgttaatatcttgcattcacctatgctctaataatctatgaggaggtattcagaactttcaacagaatctttagtttaaacataagtgcaagagacttaacgtctcacaacgctgactaatcagagataaagcaagcaagtttggaaggacattaaaattgacagagatatcacagagactgaaaaataaacattcaaacat

SEQ ID NO: 17762 - DNA, 607 bp, Arabidopsis thaliana landsberg
tgacaccgaatgccatggtggcgctggcgaagtatgtctgggcgacgacttcgtacggcaggcagccgtctgttgaagtttttgcgaagaattattgtttgcattggcagaagaggatggttggggacggagttgcccagttcgggtcatgcacattcacgccgaagaccggcaagaccacaatgccagtagtggagttggttccgtgcgcccgcaacaagtggggcaattggaatgaattttggttttacgttgcggagggtactgtcgaaggccataaaggtctccctgtgtctgagatgtgctctcattattactctgcgtatccgccttttgaagtggcagaggaagatgcagacgaaggggcccttcggtgcgccgccggtcagagcagtgggcgtgatttagttgaagagtttgtggcgtatggggtgtggccttgcgcacggttgggtgctgggtgaagtgtgcctcgccagatgccttttcacggagggagggttgtgcgacacctgccttcgcactgaatctgcggaacccgatccggctgcctttgtgcgcgaccggaggacggggccgtgcggctcgtggggccgtacgtgccgag

SEQ ID NO: 17763 - DNA, 2156 bp, Arabidopsis thaliana landsberg
aaataaaatgggccgaagcctacttggtaagtccatgcgaaaataaaaagagtttaagtttcagggaacatttagggaaggggctcaggaacaggctcctttatcgccggttcggggttcgaagtggacgcctcgtttttaacattcacgtcgggttcattattcacgcgcttccaagggttgctatcctcctcgtcgtcgtcacagtcctcactgtcaaacaggatcacttggaccggagcgtttacaggaccaggtacttgacctcgagcacaaaagtacatccggagcatgtgcgggatctttgccacgcatcgaagttcctccactcccattaaaaatggtcgctctccatagcccttaccttcctttcaatatgggcaattcgggccttgaacgtttgcctcttgaggcccaaacgttgcctttcatcgcataagcggcgatgcttgtcaacgacctagaatgcgaactggttaaatacgagtaaagtttgttccggaaaaaagaaggaaggaggatttaccttatccataaaatcgtacgcctcctttttgtctttcgaggggaaggggcagcaggcttgaggaaagagaacaccggcgggctcaaagccattgccggacagaaacaatggacttccgggatcaaagggacagacggtggaggctctttcgttttctattctagaggtgtttaccaagtaaatttctgagatcatattttgagagagttgtgaaagtttatgttcttatttatagtagtttagggtttactcgaaaccacaaaattaataatagtggcgtgtccgaatggatttaaccatttttgggattcgaggaaaaggcaattattgccttggaggcgtgacacttttcctggtttgcgaggaaggaaatggcagccatcgcatttaagacaagcggatcattaaataaagaaaatatatatatataataacaaaggctgaagcccagtaaataagtcgaacagattaaacccgagttggggagttcgcggattcaagtccgcatttcttagagataggtctgatcaacctacgaatctcgtgacttgaccacatggttaaacaaaaatgctatataaaaggtggagtttgccaatctatacttgaatcgagcgcaaagaaaaccctcttgggttcatagtcttaaaaaataataataaaggtttaaaagcctcctcaggccaagtatttgtttagcctacttaggcaggtaaaatagtaatagtaaacttttagtctgttaacaaaaagggacaatccccattaagtggacacagccactacaggttctcaggcacctcgagttcgggttgagctgactcaggatcaactaaatcggcgacagctgtctcagtctcacccggctcgccagtagtaggctgctcgctaggaaccttggaatctgaaccatcatcgtcctcgatgaccactgtctccgagttcgtggatggaggaatctctggcggggtggttaccgcctccggaattgtcgtcggcacgatggatgcttcgagctccacgggatcgctagcacctgaggcaattatctcggattaggaaaaatacaagagtaattcgctgtgtattggtttcaacagtttaggaatgtaccagcccaatctaaacctggcatcatttaagaacggagatcgaactcaagggacgaagatttgtctttccacgtcataacctccttttccctgtctagcaacagtctctcgtagtactcaatcatgtcattgagttcgccgtttgcctgaaccaagtggtaacaaaaaagagttagcatctaagtggaggattaaagtttaaagaattattatgggtgaagagaactaacccgagatgagtgatgggcatggagtaggaattgcttgcgaattgcaggacgccacctatcaaaggctggcaggatggtgtcttttcaagttttgaagcaccgaaagacgtttccctctgttttcatcgctgttagaataaagaaagggttggaccaggcaaggagcgttgagtcatttaatcgaaatgataaggccggaccaaaaaatggaaggtaatttctaacccgtgaacgacttggtctgaggaacaaaaacagccttagttccggcatctcggccctcagctt

SEQ ID NO: 17764 - DNA, 422 bp, Arabidopsis thaliana landsberg
  unsure (1)..(422): unsure at all n locations
aaagacagccccaatcatggacgtggtacaggtcaaaactccccaaaccctgtgtgttacgaccaagtcaccccctatcaaggaagggctcaattttatggttatcaagcggattacgccgacggatatcaaggaaatcnnnnnnnnnnnnnnnnnnnnnnnnnnnnaaacatcgacggctatcaataaatcttgccagtccagcggttatcaaggaaattttgccggctccggcaataaggaaatcctcctggttctggcggttatcaaggaattggtaatgtaaactccggtggttatcaagtgaaccaaaacagttatgaaaactcttgtggttactatcaaggagatcaagtgattaatggaatccagatggttacagtccttatcaaggaactcaaggtggttatagtaaccttaac

SEQ ID NO: 17765 - DNA, 1413 bp, Arabidopsis thaliana landsberg
gccgatgactctgatatcagcacaagccggttccgggtcatgaggaactaggtcccaaggcccaaacccctccatgttaaaaaacaaaaaacaaaaaatctcgtagatgacagcacaatcacacatttgaaatatacaattccgatattcgctaaagggtgtttgtcagatttgtataagatccattccgtacaagaagatcctgcaccaggaccaccagaaaaaaaagaaagtaaaggggtggatttgaaaaatataaaacatattggggaccaatgttaaaaaacaaaaccaaatatttgctgtatatgctaagaattcaaaattgtacaaaaccccgaccccattaggtcgatgagagagatataaaaaacaacaaaattagacgagaaaatatctaagaaaggcgtcggaaaattgcaaacagatagatatagagacgacgaagatgcatccgattaatgttgtggttgcggcgaggatgttagccggaatcagtcaatctaacgccttacaaagcgaggcgattccgtttggatcgcttgagtggatcacttacgccggaatctcttgtttccttgttctcttcgccggaattatgtctggtctcactttagggcttatgtctctcggtctcgttgagctcgagattctccaacggagtggtactccaaaagagaagaaacaatctggtaaattgatccttctctttcgtaattcgtcaccgatcaattgattataaggaattgcttgaattgatatgaatctgtatctgatcatttgactttgtgtgaattttgctgtgattgtggaatttgcttgcgattgattgattttttttctcagctgcgatttttccggttgttcagaaacagcatcagcttttagtgactctgcttctgtttaatgctcttgctatggaggtaattatcttcattcaaagtctctctgactttctatgttcgttgtgatgatgaaaccaggatcttaagaggcttcacttgttgaaaatttgcaggggcttcctatatacttggataagatattcaatgagtatgttgctattattctatccgtcactttcgttctattcgttggagaggtatgctttgatcttctacctttaaagtcttgctaggtttataagcttcatgagatttgaacactgtttttttttcaggttattcctcaagctatatgtactagatatggactagcagtgggagctaatttggtctggcttgttcgtatcttaatggttctatcgtacccgatatcttttcctattgcaaagatgttggattgggtgatgggacacaatgaccctttatttaggcgagctcagttaaaagctcttgtgtgcattcacggtgaagctcgtcgaaagggaggcgaacctacacatgatgagac

SEQ ID NO: 17766 - DNA, 1232 bp, Arabidopsis thaliana landsberg
attattatattaataaaaatacaaacagttttgaaataaaaattaaggttttattgctgtagaaaaataaaataaattaaaagttttattttagaaaacaacaccattcatgacaaaacctctggaaatgttcttttagtccaagagttttggttttctcgcagtttttacccttttgttttatttgtcgatatcctccccccaccccccaaccacaaactttttctccttctctgctcttgctcgtcctttgattttcactttcaaaattcgttccgctttttcttttttcggagaaagattcaatctttctgaatcatgtactgaaatatcatcattcaaacgaacagtgttctccattttgtcgggaatcagagtttctgcttctctgtaaaaccaaagctttctcttttataattttctaatggcgtcaagagaagtatcaacgatgataagaaaagggtttatctctgatcattctctctctttctctcctttaagaaccacgtctgtctccaaacccttgtcccccatagcctctcctcattctcagtacgatttcaatagcatctggatgtgcgctagaggcttttgaagatgggtacagagtgatccatggatgtgcacaagaggcttttgaagagagaatggagtctcttattttaaaaatggtggagataagtgagtgcgatgtgtacgtagagactgtggtgttgatgtattgagatgatcttaacaaccagttagttggtgaaactgtcatcaaaatcttggctttccttaaggtagatatgaacattgatttgataaagttttgtcttttatatagtgaaaattttgattctggttgatagacttaaggtttgaattgggtacaaaccagaatgattatgatagagtagattagatccatgtctctttgaatcttttaagtgttcttgatttgtttgtgactgagaaaagtagaactttgtggaggactacttgctcacagaaacactgtttctgctgcatcttttgtgtgtggttttagtagttatagtgttactttgtaagaaatgctcatttgattcattcacattgcgtcaagtgatctgctctgtgattgttcttgacgttttcagtatgtatggctggccaaatctgagagtttttcatgtctatattggtttctcgagctctttttaaaatgtgatggtttcagtcttttcttttataggtttcttcagcta

SEQ ID NO: 17767 - DNA, 4116 bp, Arabidopsis thaliana landsberg
gtttcaggtcgcctttactgatgcagaggaaggaagcaagattgttctaaccacacgaagtgaaattgtctccacagtagcaaaggctgaaaaaatctaccaaatgaagttgatgactaatgaagaatgttgggagctgatctctagattcgcttttggaaatatatcagtcggttctatcaaccaagaactagaaggaattggcaaaaggattgcagaacagtgcaagggcttgccattagctgcacgagccattgcatctcatctccgttcaaagccaaatcctgacgactggtatgctgtatcaaagaatttttcaagctacaccaacagtatccttccagttcttaaactaagctatgactctcttcctcctcaacttaagcgatgctttgccctctgctcgatattccccaagggtcatgttttcgatagggaggaattagtactcctatggatggcaatagacctcttataccaaccaaggagcagcagaagattggaagatattggaaatgattaccttggtgatttagttgctcaatctttttttcagagattggatatcaccatgacgagctttgtgatgcatgatcttatgaatgatttggcaaaagctgtttcaggagatttttgtttcagactggaagatgacaacattccggagataccaagcacaactcgacatttttcattttctagaagccaatgtgatgcttccgtggcttttaggtccatctgtggagctgagtttctgagaaccattcttcctttcaactcgccaacaagtcttgaatctctccaactaacagaaaaagttttgaatcctttgctcaatgcattgagtggcctacgaattcttagcttgtctcattatcagataaccaacttgcctaaatcgttaaaaggtttgaagcttttacggtatctagatctgtcaagcaccaaaataaaagagctcccagagtttgtgtgtactctctgtaatctgcagacactattgttgtcaaattgtcgtgacctcacaagcctgccaaaaagcattgccgaacttatcaatttgcgcctccttgacctcgttggcactcctttagtagagatgccacccggaataaaaaagctgcgaagcttgcagaagttatcaaattttgttataggaaggctgagtggtgccgggctgcatgagctcaaagaactttctcatctccgagggacacttcgcatctctgagctacaaaatgtggcgtttgcctcagaagcaaaagacgctggtttgaaaagaaagccattccttgacgggttaatcctgaagtggactgtcaaaggttctggcttcgtccctggtagttttaatgcattggcatgtgaccagaaagaggtcctaaggatgctagaaccccatccacacttgaaaacgttctgcattgaatcttatcagggtggagcatttcctaagtggttgggtgattcttcattcttcggtattacgtccgtcactctcagtagctgcaacctctgcatatcactgcctccagtggggcagttgccttcactcaagtatctcagcattgaaaaatttaatattctgcagaaggttggtctagacttcttcttcggtgagaacaactctagaggtgtaccgtttcaatccttgcaaattctaaagttctatggcatgccaagatgggacgaatggatttgtccggaactagaagatgggatctttccttgcctccaaaaactcataatacaaagatgccccagcttaagaaaaaagtttccagaaggactcccttcatccactgaagtcaccatctctgattgtcccctaagagcagtttctggaggagaaaattccttcagaaggagtctgacaaatattccagaaagtccagccagcattccctctatgagcagaagggaactgtcttcccctacagggaatccaaaatcagatgcaagtaccagtgctcagccaggttttgcttcaagtagtcaaagtaatgatgacaatgaagtaacttcaacatcaagcttgtcatctttaccaaaggaccgtcaaacagaagatttcgaccaatatgaaactcaacttggaagcttaccacaacaatttgaagaacctgctgtgatctcggcaagatactcaggatatatctcggatatacctagcacgttaagtccgtatatgtcaagaacatcacttgttccagatcccaaaaatgaaggttctattcttcctggaagtagtagctaccagtaccatcaatatgggattaagtcatctgttccgagtccacggtcaagtgaagcaataaagccgtcacaatatgatgatgatgaaacagacatggaatatttaaaagtgacagacatatctcacctcatggagcttcctcagaatctgcagtcactccacatcgacagctgcgacggactcacttccttaccggagaacttaacagaaagctatccaaacctccatgaactactcatcattgcttgtcattctctagaatctttccctggaagccaccctccaaccacattgaaaaccttatacataagagactgcaagaaactaaatttcacagagagtttgcaaccaacacgaagttactcacagctcgagtaccttttcatcggaagtagctgcagcaatctcgtcaatttccctctatcattgtttccgaagctgagaagcctctcaattagggattgtgaaagcttcaaaactttctcgattcacgcaggactcggagacgatcgtatcgcactcgagtctcttgagattagggattgcccaaatctggaaactttcccacaaggaggccttccaacaccgaaactttcttcaatgttactctcaaactgcaaaaagcttcaagctttacctgagaaattgtttggactcacttctctcttgtcactgtttataatcaaatgcccagaaatcgagacgattcctggtggagggttcccaagtaatcttcgaacactttgcatcagcctttgcgacaagcttacaccgagaatcgaatggggattgagagatttggagaatcttcgaaatctcgagattgatggaggaaacgaagacattgaatcgtttcctgaggaagggttattgccaaaaagtgttttttctctgcggattagtcgtttcgagaacctcaagactctgaatcgaaaagggtttcatgatacaaaagctattgagacgatggagatcagcggctgtgataagctacagatatcgatagatgaagatcttcctcctttgtcttgtctgagaataagctcatgttctttgttgactgagacttttgctgaagtggaaacagagttcttcaaggttttgaacattccatacgtggaaatcgatggcgagatcttctcttgatgaaaaagattgtttatttatttgtaatatgtacacattagagaccttacttgatgtacacgacattgtaaatttcacagagctcttctctcagagatctccactgttgatctaaccttgaacaatataaaagatgtaaggcaaagaactttcaaaagcaaatgcttcaaaaatcccttaagagagaaagatgatgaaagagatggaagtatcgcaatcgaaactcaaaagacaaagcctaacaagaactccaaattcagaagcaggatcatagtgtttccagctactaacataactggagataactgttctaaaacgtagagaatggggaaaaaaaattgctgaagaaaatgaaatctctcttctgagctagttgggcctctttctagtttgtcgatggtggtcgagtgattcttggcctcactggtgtctttgatggacttaccctgaaaaggaaacagagccaagtgtttaacaattggacatattcagagaaagatcttaagacattgcattgatggaagtttaccttatcggttgggatccaacgaccataccactgcaattaagcgccctaagtgcactatctgcctgttcattccaaaagaaaaacaaattatatgtttttgagtttttaggtgaaaactatggcaagacatttgtgtcacatccatggagaaaaggaactacccgagccaattccacaaaagctt

SEQ ID NO: 17768 - DNA, 658 bp, Arabidopsis thaliana landsberg
cgaatatacggaaagccgaacaagataaatttatcacgggtatcaaagtagcaacagcgagcccttccgtgtctcatttgttgtttgcggacgatagtcttttcttttgtaaagcggataaagaacaatgcggagtaatattgggtatccttaaataatatgaagtggtaccaggacaaatgataaatttcacacaatcatcgatccagttcgggcataaagtagagtaacgctattaaggcagaaataaaatcaaccttggctatacataatatcggaggtatgggatcctattttgggctacctgagagtttagcgggctctaaaacaaagattttttcctgtgttagagatggattatagtctagattaaatgggtggtcggttgcattcttatcgcaaggatagaagaaagtgatgattcaattggtagcgttggcattaccaacttatttgatgtcgtgctttaggcttccgtaaatcatttcttggaaactaacatgtagtcgccagattttggtagagcttgaatggggtatctagaggtatgcactggatggcttggaataaactctgtagtagtaaaccgaaaggtggcttaggttttagggatgtagatgattttaattcggctttactagaaaaacgattatggtgt

SEQ ID NO: 17769 - DNA, 1672 bp, Arabidopsis thaliana landsberg
tgtaccgagtgtgcgtatgttcaggtttcatcatgaagtgtcaaaacaaaagtctaatgttcgaacttccaagtagcaagtgttgttaacatcttcaatgcaaaaattgttgtaggtgaagtggtatcactattttctccttgctgttgttgatgtggaggcgaactttctcggtgagaaagaactcttcttttgtcccactctttggcctgagcactgatcctgggttttcatgttttttgttgagtatcatgagtttttgagtcatctccattgcttccatagttgtcaaggcatttcagaacacatcgatgactagtatcatgctactggattgctgggcgatcccttgcgttttggtcttgacttgggttttcctgaaaacaagatacagattgatgaagatcagtggtgttgttatctgtattgttggtgtcgtcatggtagttttctcagacgtccatgcaggggatcgagctggtaatggtgtaaattgattcattacttctctttctcttatttattcttaccatggtttcactcatcttaagtctgcaagtaaacactcacatatttgcccaagaaactcgagttaagcatatttatggtagctttcaggtggaagtaatctcatcaaaggagattttcttgttatagctggagcaaccttgtatgctgtcagtaatgtcagtcaggtaagcaagtctctgatcacatactaaaaagactttaagtgtacttgtaattctagtcgttatgttcctttgtgataggagttccttgtgaagaatgcagacagagttcaactcatgtctcttttgggccttttcggcgcaattattggtgccattcagatgtatccttcaaacaacaaggctaagactttaatgtttcttaaaacttatatgtgcaatctatgaggatactccttgacttgtccatagaagcatattcgtaggctttttatttgagcctccctacaatgtaagaagttctattgtggccagatcttaattcaataaagcattaaaaaagtcaatgattgtttgtagaatattataaataaagcaaaggattccccatgactttcctctctgaatctgcagctagagttttgtttctttggtttattgtttgattgaagtaagaaagcagtaatggtctgtttctatttcaatgagatgaagacgaagaagactctcattggacttggattaggacagatcatctcgcttctctctactttaattgcctctattgcctctgagatcgccagaaaaggtttcccccttttttaaaaatccaacccatttttatacattcattgacttacaaaaatttgaattgttttttaaaagggattagtgctccaacatctcagacgtttctgggttatgtgtcacttgcaatcgtctatggaggtatcatgctgtatcgaagatccgcaattaaagttagtattgaacttcttttcttgatttcaacaaaaaaaaagaaaaacttctctttttgaaaacatttgattcactctgtcttattggtttgtgagttttgtatatttataggtaaacataaaatgtaatgagtgtgtgaatgttaaggattaataatgaagtgtcaaaaggaaagtgtaatgttggaaattacaagtaacccgtgctgttaacatctt

SEQ ID NO: 17770 - DNA, 1117 bp, Arabidopsis thaliana landsberg
taaaaaaatttaagggtggtaattttggatggaaatgttttttctttttagggcaaatggttcccaaatttttgtaaccaaattatagattggaaaacgatttcttctagcagctaatatgggttacaactagacacatatatatatcataagattactacaaaaccagtgattttgttttggttgaaataaaagagtgtattcgaccaaaaaaaagtgtatcaatatcaaacgatgaaattttttattaggcttgggcccgtattcaaccaaatcaaataaaaagggcctcttctcgacttgtaaagttgcatcgagccttctccaaccttagacaaaaacatcaaatgatgttattctactatttctcgcatttgatgttcttgattaggaaccggatagctaccatgtggaggcactagaacaggccgttgcataagagactccaaagaacttagtcatgggattgaattctcttcacctcgagcgtgtaatccattttcttcaagatgcttatcttggagattttcatcttctacttcatcagcactatctatgtcagaatcaatatcaggtccaatatagttaccaaactcatcatataagttaccatccatctttgtgtaaacctgtcaaaaaagaatcccatgagcaatcagaattttgtagtgcagataaacaataacggcaaaaaagtcaaatgagtgcattaccacaaaatcaagcttttgatagatctatctgggttatttactatagcaaatctgcaacatctttcatttaacccattggcgactaatctcccctaatgctcaacaccatgtctaagagaacaccatcaaacagcttgaatcaaccagaaacttaaggtaatttggactagagcaaaaccctaggcgagaatcgccctaacacgtgccgagacgatgagcaccgccgttgaattcgtcggaaccactggaattcaccggattgttgagaaacctccactcttctgccgatctcaaacccatgttcaagagacgtcgaaatcttccggatctattcatagagccgcttcaaaattctccgagtatcaccattggcggggaggctttcaaaattatattttagcttt

SEQ ID NO: 17771 - DNA, 597 bp, Arabidopsis thaliana landsberg
atggctcctcctgagaatcctaatctattcaagtaagcaaattctcatcctttttactcaattcgatttgggtttctgtttttgattactcaataatgggtttctgtcactgttgtacttaggtgataatatcgagttccttaatgaagacaaagatggcgagggagaagaggaagaagtttaaatttgctgttaatttgtttttggatttgatactttgttgaatacttgaattgtgtttaaatttgcttttggatttgatatttaaatcaattaatactttgttatttaaatttgcttctcgatttgataatttgattggaatataaagcaaatactattgtgttaaaatttggttctgttatgcccattggacaacccatttggacatgggcattaatgggcatggacattaatggacatgggccttaatggacatgaacactatttgtcaaatatcgaaatggacattattggactgggctaatggatatggacaacccgctttgacagctctaactcaatagttttagagtagtatagtttgaaagcccaagacactctcatctgcaaacgattaaatgaataattgtttag

SEQ ID NO: 17772 - DNA, 740 bp, Arabidopsis thaliana landsberg
aatctaccagttgaattaaagttattgttagttatgcatttaaattgtaactaattgtcagggtaatatctaaatttagagagtttataatattaacaacaagtagacatataaaacatatgtttcaaaattttcaataaaaaaatttagttacacataaaattattaaaagttttacaaatagactcacttgtagcgtaggttcataacctagtaatagctataatggatgagatccgttgaacacatttatgaaagatatttactcatccttgataataaccgggttactttgtgtcatcattttttgctattaaaattataaaatataaaatttgcttttatgattgtgcaaaagtaaagatttaccatcacattatatatgcaaaatataaaattaaattgtaagattatgtttgaccaaaaaacaattattagatcatataattgcttaaagttaatattattattccttaaattcattgcctatatattgttttacaaatgtgaacttacattgttgatccataataaatgttgaccaacaaaaataataatcaatttttcagaaactttatctaaaaaacagattttaaatttaatcaaaaaaataaataaatttgttgaatggtataataagttcaacctcaactattcaccaaattgatgtatgtttctattcaaaaccaaatgtttaatttctaatcacctagtactacacaatttaacccaaaaacaca

SEQ ID NO: 17773 - DNA, 624 bp, Arabidopsis thaliana landsberg
taattcgtttttaagattttcttttgaaattttggtctccataacatcattttggcctcaaccttaatcgttatgtatatgtcaatctcataaggatttgctttgtcgtgctgaagtaaatccgcaagtgtctcttctctaacacaaaataaagtcacatagtcatcattcccagcactaaactactattattctacaccacttgtctttacatttaacgacatttacaatgttcgtgctgcttctttagaactactaaaccacacttgttctgttttgcattagtgagagttttgttacatatttctgtaaccctagtggaataactgtttttaattttgtttgaaccattggaccgcatgcataaaagttatttcggtgaatggagggtaaaacacgttactcaaaaagtattacgatacgtcgataagtgtttcggccatttctagctcctcaaaccttggtgactattttttctatttccataacaaaaatcaattgacataatattttttgaagatttgcttcctttcagtttttgagattaaaaaatccatgagatatgataaggtctgatatgtccatgtatatattttataaatataacaagatttttttcacaac

SEQ ID NO: 17774 - DNA, 762 bp, Arabidopsis thaliana landsberg
ccgcggcgggacaggcggcgctctggcaggagaagcaagcgacgcttcgcctttgccataatgactgcgtcaaaaaaaaggtacgccgcgtcgttcgattacgtatccttttccttttttcctctttctctctcttacaacagggaccgggaaagggggatacccgaaaaggatccttctccgtgaaggaaccgggctccgagcctccctactgatcagaggttcgaaggttggcccctcggaggggttcaacagccgcctcagatcgcgtgggccctacacccactactggtcagaggttcgaaggccggcccctcggaagggttcaacggccgcctcaggctactcgggctccgcgcccactactgatcaggggttcgtaggctggccctcgaagggttcacagccgccttagacacagagcgagggatgaccaggggtacgttcgatacataaccaaggctcgggctgcgctctcgaggtaccctaggacatttctgagaccagcgggaacgatcttgtaacggaatcccatcagagggaggcatcgagccctcggaccccgtcgaaaggggaccgggtccggcagatcacccgcaggtacttttggagcgcgctccgggcctctagccgacccctaacaaatggggcacgggcgtccactcggattacccgtcagcacctcaccggagacaccatgttcggcgcctccgagggcaacatggcgcttcccccctccatcttgcggaaaggcgggggatc

SEQ ID NO: 17775 - DNA, 2007 bp, Arabidopsis thaliana landsberg
tataatttggtttagaatacattttagtcgggttcgattctaaggttggctaaatcgagtaactctgaatgggtgtaattcttaatgtaaagactaacttataataaactccggtatataagtgttggcttggtgcgttccaagcaaaaacagcgtgttgtaattctctctattttctcacatgtatcaatattaatacaacaaaattttgtcactattttttcatatataacaacagtatataaggtgtccgaattcaaacctccattaataggaaaagaagaaggaaggaaccagaactctggcggcataggtttgcagccagaccaatcgtacactccaagaacctaatcaattaaagatttaggatgactaaagacaaatatcgtttgtattaaaaacaaaataaaaatctagtcccataccgataggcaagcttttccgatcaatggtgtataggtagcaccaccgtggtcgagtatccacttacgagcctttgtacaagtacttccttgatcatcatcatgaccggcttctactcccacgattcgtaaacaaatgtagttgatgactgtacaaaacataatactagggctttctacatgtaatccccacccaccatcttcgttctacaaaccaattttgctaagtcagtaattcttgctatatttaataacatatactgatatacatatatatagtaattaaatatacaaatttacctgatggttatacatgtaacgtattaactctatacgatgctcaactgtaaagattttctccagatgtccagtaatgtacaagcatataacctatgcaacatgaagtttaatttttttttttttttttaatcacttgtataactgattatgcttaactataaaagttagtttatagtatgtgaagtaactcactaaaggagcgatgaagaaatttggaccagagttatctgcaggccagtgtccatcatctgcctgcaaggccgtgaaataatgtaatcctcttttcaatgcggtttttgcatcttcataccttattttcgctgcatcctctactctcacacgtggaatcttctgttcaaaacctttttccctaagaaactattaagtccacataacaaagaaaataaattttttttttatcaaaaagggaaaaaacaagaaaaataataataaaacaattctctaacaaacgtattgtgttatacgtttcacctgcatcctccataagagatcagcactggccttgtaatgtgacctattgttagagaaattccgacgagcctcctcgacctcggcaagttcttgaggggagcctgcgttggcatcaaactcccaaatctgcctcccaacatagttgttggtcgtgaacaagtgagtatcatttccggccttagctccaattcttagtctccacattttgtattaatcctccaagttcagtcgagaggcaaaacaactaattatatagattgataatgcttgtgaaaacgatgatttgagtgggaactgacgataagttaattaataattttcaactaatttgttttcttaacgtatttaacttgtgctatttttctataggaaaatattcttttatattactttattatctacaagatcaacccttttatctattctttttttcttcttgaaagatatatgttttttaaatgacaactttaccaaagtacatgctacatactcccaagaagctttcttgaataagatatgcaaataaaacgtggaaatgatatctttaataaaattccaatcaccaaccacaagctcaccttttccacaagtgtacagtacgaatggtcgttcgagtatcattcaagttcagatcatttccgtttgatttcagtaaatttggttaggggatttaagaatctattgggtattttaaaattttgattccggctcggtttcgttctctcctggttcggatcggttcaaatatttgagtggaaaaatgaaatagaagtaaaacttttttgggttcggt

SEQ ID NO: 17776 - DNA, 2207 bp, Arabidopsis thaliana landsberg
  unsure (1)..(2207): unsure at all n locations
tcagtcgtttcaagacaaagagatctttatcgtataagtgtatcatatgtatanccaaacaagaatcaacaataaaataatgatcaaactgttgctacatataaaattgtaaaatacacatcttattgcatcatctggttcttatttcaatatttcatatccaatgaacaccatttcgtatcggatgtttttttcacaattttgtgactgaacccaataaagaaaggtttgcgtctgaaccataagcatcttcagaatttgcggttgaaccggcttacgcaatttgggttgtaatcttatcttgagaacattttttggatataatttgcggcaaaagaaaaaatggatatttcgttcgcattatcgaaaacacaaatgagtaggacgttatcgacgacatcaataagcgttgaacatcttttctgacaagttgtagacaaaatgaaggctaagattatgagaacattttttctagaaagaatattaacatttttcgtaagatttttacggataacattaatttgttttataatcaaagcaatatatgtaattaatgagtatgagtttgtatgatatattaagatttaaatgtttctggctgttcttgttcctacaaaagccttagtcaagtgtatagaaatgttaataaaaggaatagcataaccgaagtgtgccttagtcaagtggttgtttccgatctgcaagataatgtctggtctcaggtttgatgattcaaaattgatatttagcataaatgaacttttttttactttagataataaaatctattgggccggccctggactcaggctctaataatcaaccaggctataaaacgctttacatgtcgttttattgctcttattgtgagagccgtgtctgaagacagtgtgagacaccttacgtgtcagcactgtattggtcggtgtgataatgtaaaagctaaaccttcgatgaatccgaatatcttcctgtcgccgatgaagctgaatcgatctcgatgtatctactgctgacgagctacttcgtctagaatcgagtcttcgacgagtctctcttgctacggctaacagacctgtcgctgcttctcttttcggagaactacacaggcgagcttctctcatttcatcctcttgtctctggttgatactgagattataatgattatactattgaagcaaattgtttctccagtgaagtctttgttgagttataaacgaaagatgtgaagtgtgtcaattataatggcggattgtttttgtttctctgttatgttacttcgattagttgatcgtttttttttttttttcggatattacacaacaggtgtctcaaattggtgtcaatcttcaaaagcgtggtgtttggacaagtagtaataggtcctcctggatcgggcaagaccacttactgcaatggcatgtctcagtgtcagtgcatctctctaatgggcaggtttcatcttctttctctttttggatcaaagaaagaagcttacttacttttgtacctgtaattctgtttgtattgattgtttcgctgtccctcgcattgtaaagtttacaagttgcaaactttagtaaataatagtgttgaattccagaaatttgaattgtctgacttttgagcagagtcattgtgaaatgttgttgccttgtctttgtttttggtagagagatttgcagattcgtgagaacttctctgtaagtaaattctcttaacgttgagttactattttgttgttgttgcaggaaggttgctattgttaatctggatcctgcaaatgatgcattaccgtatccttttcaagccaaatacaacaaaattgttaaaaattgcaggtgtatgttgtttcttgacattgattttagttatgagtgtggtgtgaatatagaagaattgatcaagttagaagatgttatgtcggaacactcgcttggtcctaatggaggtgaattttgccatcttgattttcccttttcttcttacttttgattttaatctttggtcaaattaacaaagaaactttctaatgtgacaggtcttgtatattgtatggagtacttggagaaaaacattgactggctggaatctaaactaaagcctcttctgaagggttagcaacgatatgtcccttcttcttcttcttcttttcgtggtcataatatctctttcttaaagtaaaacgttttgaattgtatgcagat

SEQ ID NO: 17777 - DNA, 512 bp, Arabidopsis thaliana landsberg
  unsure (1)..(512): unsure at all n locations
acgactcagggcgcatgatgagagaaacctaagactcattccactaagcatcctccactccacagtatttccatagtcaatatatattcctttttctctgtactttctgcttatcgtgtctaacaaaagcgtgggaatagtttgtggcccacatgaagcagagctttgaagaaccctgagaatcctgctgcagtcactacagcagaaccatttatcttgggggattccctacagcaatcaggaaagaaatgagacaggtttaatgaacatgtgaacacagaccacctatattacatgacttactttcaaatcacaaagctcattttccctgagacaaccgacgtgatactctttctcgcacttcaagagcaaagaggaaaaatgaccattagacaagaaagacgtgggtaaagaaaatctggaattagaaaccagagacaacactacctggtcacagagaataactgtcctatcatcaaatntccccaatgcttaaaatcatgcgacctatc

SEQ ID NO: 17778 - DNA, 2112 bp, Arabidopsis thaliana landsberg
  unsure (1)..(2112): unsure at all n locations
aaaagttatatggatgcattggggtattttaatttagtgctcttgttcttattctaattcggtcattcatatttatgctactgaatcataagaggcacaaagacttccttacttaggctgattagacaatagagacatttttaagagttgatacaatgtttcttttctttcactataaaattcttattcgtttggttgttatattaggtagaaagataccaagtactctcatcaaaaactagagtacactttttcattgcagtagcaagagcagattgatggatgtgcttttcaggcatgttctaactcaaacttaatttcagttttttttattccaacttcaaagcttcatttctataacaaagtttttcaaaacattacaggattttgaagtaacgtgaagctgaatattgaaaatatgcaaagacaaaaaggtaacatatagttttgacatgatatctctaacgattatgccacttacatatccattaattagtattcaataagtaactttgcatccgaaacgtatataaccatcctagtactatgttacaacttattaactaacaattggagttcagggtgtagagaaagatcaatccttttatttgggatgcttactgttccttttcggttcgaattacatagtttcaatgagtgtccaagaaatttgattgggattttcgcaggctcgagcgggaatcagggaggttcacttccattgacttacatcgacagcagaaggcagtagtcaaggtgctctcctgattaggtgatgaatcttcaaccttaccaacaaatgtcttttttaccctttctctttatactaattttattttcccaacaatgaccttatcaaaaaggtggtgctctcgagaattgacaagtgtggtcttaggttgttggctgttgctctcgtttgacattgatactcataagtttagntttcttttgtttttctttactgcgtggaaacaaatgttcatttgttagtgttcttatttccctccttaggtggtgctagagaaaacgaaggaaagcctaggtgcatggtgcaacatatggtaatttgttggattgttgcccccaagacatgaaagtactgaaaccattggaagggctttgactctcggtgttaacatcaagatgatcactggtgaatttgctcacccattgatcgtgttgtaataataatacacctttgccattttccactaacattctattggacgacgtaggccaggtaaccagttgtaaacttggaatgggaataaacatgtatccatcttcggcttttcttggtacgcacttagacgcaaacctcgcatccattcctgttgaggagttgattgaaaaggctgatggatttgccggagtcttcccaggttataatctgcttatttattgtttggattataaacctcactatatgttcattgcaaaggtggtgatgttagttctaagctttgttttttttattgcagagcacaaatacgaaattgtgaaaaagttgcaggagaggaagcatattgttggaatgactggtgatggtgtcaatgatgcccctgctctaaagaaagctgatatcggtattgctgttgctgatgctacagatgctgctcgtggtgcttcagatatcgtgctcactgagcctggactcagcgttattatcagtgctgttctcaccagcagagctattttccagagaatgaagaactatactgtgcgtcttctcctatttttcatccttaatttattccaaccacttgcttgcttgcaattgaaactaattactctgttctatttttctctcttgttacagatctatgcagtctcaatcaccatccgtattgtggtatgcaaataaatccgtttgagttctggcccttgttggttttatcttggattaatagtatgctgatcatattgcgttgaaactttttgcagtttggtttcatgcttattgctttgatatgggaatttgacttctcagccttcatggttctgatcattgccattcttaacgacggtgagcaatggctgtccttttgtataaacctcaaaatttgtttactttttctacaatgtttacttatatcttttggtatgctt

SEQ ID NO: 17779 - DNA, 550 bp, Arabidopsis thaliana landsberg
cgatttctttgggattgttcattttcgaatcttgcatctgctaactctttttagacggcaagtatagaacaatttttcttttttttattcaatcatttagttttagagtttgtgatgttttacaaaagttcaaaactttaataaaaacataaattttgttttaaaaatacagcttattgtatttactataatttgaaaaacaatattagattaatatgtttgaaaaacaataaataaccctaaaactaattccgaataatcctttattttcatacgattttctgattaatcgttaaatccataccgagcggccgattaacgcctatcaattttttaaacaaggggtacaagtacaagaaattccattaattaatactatatatatgcaatattttattaagagttctatgcataagtaaagtatatatgcaatattttataccatagtctaggaagagtcctacgcattatatgagtttgaaattaatatacttaaatatgcaataaataatcattaaaatatgttagctacttaaaaaaaatcaattta

SEQ ID NO: 17780 - DNA, 1242 bp, Arabidopsis thaliana landsberg
catcatatatatcagagcaaactcgacaatgaatattttattagggttttttcggttcctcttattttattattccttacctctgttcttcttgaaggttactaagatagatcagtgttttgtattttaagagtcggtgtttatgtcaacagtaagagaatcttggttaaaaccaaaaaagaatatacaaacgaaccttggagattatgaagatatggacaagattagtaggttgcctgatgacttgctcgtgaaggtactgctgtttcttccaactaaaattgctgtaagcacaagtattttatcaaagcaatgggagtttctttggatgtggttgcctaaacttgagtaccataataccaattattcagcttctgaagaacagcggttaaggagtttcatcaatttgaatctgcaattacatagagctcccatcatagaaagcttgcgtctcaagtttagcctggggagatcaattaagcctcaaaatatcaaacaatggattataattgcagttttccgctgcgtccgtgagttaagcatcaacctttttcctctttattgtattgagaatcctgctaaattgccgagtagtttgtatatcagcaaatcgttagtgatcttgaaactgaaagaccagattctcgtggatgttcctcgtatggtttatctcccctccttaaaatatttgctccttaaacgggttacttacaaggattcaaattctcttcatcaacttctttccagttgccccgttctcgagaatctagtcgtggaacgggatgaatataaccatgatgaaacattaagtataacagtctcgtctttgctgagactaaccctaaagatatcaagaggttctgagtttgatgagcttgtgatagacactccttctttgaagtatttcgaagttacagattataagggtgaatatgaaactgatggtgctgatgatagctactccttcgattttaaagatatgcccaacttggaggaggcagatattagttcgacataccctgatatctacaagtttgtcagatcagtcacatccgtcaagcggctttcattatgcataagagtcaatgccgaagaggtaacctgtttccatctatctatcaatctcattttagaacactaaaccaggttttcttgagctttattccttcatcatcatgtgcaggctttatatcctgatggtattgtcttcaaccagcttgagaatctaagctatgtccatgc

SEQ ID NO: 17781 - DNA, 5256 bp, Arabidopsis thaliana landsberg
gaaaaaaagagacattggagatttagttgatgtggtatcgtctttagacggtgatgagaaccttcaagaagatgacatgatcgccgttttatgggtaagaagtcgtatgtaattgatatagtactagctagtcacattatatttatcggtatatttgtaacggtctagttgtaatgttttttcttttgcatttagtgatggtaatattttattttttaatgtcagtataggagatgattattcgagggacagatacaacggcgttattaacggagtggaccatggccgagctagtactgaaccctgacgtgcgaacccagtttcgaaacgagatttttactgctgtgggagacggcacagacggagtcgtggcagatgctgacctggcaaaactcccgtacctatacgcagtggtgaaggaaactctaagtctgcatcctcctggaccactgctttcatgggcttgtctttccacgtcaaacgtcgtgctcagcaatggcatggtgattccaaagggaactacagccatggtcaacatgtgggctataacccacgaccagactgtatggtccgacccgctaaagtttgacccggagagattcactgggaatgctgacatggatattcgtggtggggatctaaggcttgcaccgtttggagccggtaggagagtgtgtccggggaagaacatggggctagctactgtgactcggtgggtggctgagttggtacgacggttcgagtggggtcaggatcagaccgagccagttgatcttggtgaggtcttgaagctttcttgtgagatggagcatccgttacgtgccgttgtaacggaaatattttaagtcaaaaaagggctaagtagggttttgatttttgtcaacgttttggttacttataatttttaatttaacgtttttttgttgtcgagaggtatgaattgcagaatgcttgccgttttagtattttatcgagagtttttttttctttcaattggtgacatagtgatttggtttgatatgtagtatcaatgtaccattatcttgtgggtctaaaatctaaatggagtaatgagtaagagatatcaattttggtcttttgttcttgttatgactttgtctacatactttgatttacatatttctaaaaatatcgtaatactaaatattaacccgcggtataccgcgggcctatatttttattaaataaaaaataattgaatattttttaggatgatttaataaatttatgctattgtttgatttaaatgtataattcaccgctagacgaaattttttaactcatattttaaaagttttaagttgtatttgtttattttgttaaatgtttaatattgtataattgtattttgattgttgtttctcagatttcacccgtagtacaccatcccatattaatattgaatcaaacccgtcaattctaggatttcactcttggtagtatttaattgtataataataatttgattgccattctaagatttcactcctagttctatcgcaaattattatcaacccaaaccagtcaattctaaaatttcacccgtagtacaccatcccatattaatatcgaatcaagcccgtcaatcctaggatttcacccgtggtagtatttaattgtataattatatttttattgtcattctaggattccactcctaattctatcgcaaattattatcaacctaaaccagtcaattctaaaatatcacccgtagtacaccatcccatattaatatcgattcaaactcgtcaattctaggatttcactcgtggtactatttaattgtataattatattttgattgtcattataggatttaactcctagttctatcgtaaattcttatcaacccaaacagtcaattataaaatttcacccgtagtataaagtttaaatatttataatgtttaaatttcttataaaagaatcaaaatgtgttttaaaaaaattaaagttttaagtgtttttttttttaatattgttaattttgtttagtgtttaagattatataattatattatgattgttattatatgtttttttccatagcatactatcccatgttattatccactcaaacccgtcacaccatataaccccgtcccgtgaaattaaacacaaatttgtcattttattataaatttcaaatatttataaaattagaaacttcaaaaaagattaatattgacccaaacttcatcattgaattttgagtgttatatctaatatttctctcgcagtatatcgtcccgtattaatatcttttatattgtttaaatttcttgtaaaatttaatttataattttttaaactttttaaagtttcaattttttaaaataaataaccctagtaaacaaaccattttaattttggacacctcataaatcaagtttcatgctcattcgtaatcgaaatcattttggtcctttttatagtatggctcttaaccattatccaatttttttaagcgatgtgggacattgtacaatcgtaattattatccacccaaacccatcctaccatataacccagtcccgtgaaattaaacataattttgtcattttcttataaatttcaatattataaaatttgaaacttcaaaaaagattaatattgacccaaacttcatcattgaattttgagtgttatatctaagatttctctctcagtatatcgtcccgtattaatatcttttatattgtttaaatttgttgtaaaatttaatttataattttttaaactttataaagtttcaattttttaaataaataaccctattaaacaaaccattttaattttgtacacttaataaatcaagtttcatgctcattcgtaatcgaaatcattttggtcctttttatagtatggctcttgaccattgtccaatttttttaagcgatgtgggacattctaaaatcgtaattattatccacccaaacccgttctaccatataaccctgtcccgtgaaattaaacataattttgtcattttcttataaatttcaatattataaaatttgaaacttaaaaaaatacaatatcgacccaaaattcatcattgaatttggattgttatatttaagatttttcctgtaatatatcgtctcatattaatatattttatatatatttataaagtttaaattttgataaagttataatatttataagataaactttataaaaagtttttaaaattataatatttaacttttgaaaaagttataatatttataatttcttgaaacattttaaagtttcaattctttaaaataaaaaaacccgagtaaatcggataactattttaattttggacgcctgataaatcaagcttcctgctcattcgtaatcagaatcattttggtccttttataatatgggtctgaaccattgtccaatttttctaagcgatgctaggcattgtacacatattatttctttataggttgaataatatatgtccgttttaaaaaatttgaattacatcatatgcagaaaaaaatataatattttattaactatatatattttatataaattcaaaataaataaagtataagatcaaataaaagtgaaagaagaattatatatttatgtttaaattaggtagaaatattttaggaaaatagttaaagtaaataacaaatatggttagtttagagatattgtttatattaaatttggtaattaaatcattaatttttgtttttaattattagtttttaggtaacttttccaaaaattaatgttatccaagatcagaacagaattaaacatgttatccaagatccgaacagagttaaaccgggttatacccacccatttgaattaattgttgaattatggctcaaatcttcaacattatcttcaaaaaacgtttacaaaaatgtatatatagatatataggttcatgaagttcgtgaaccggttttctcgaatcgggaaccaaagcggctcaagaccggacaagagtgaaagacacgacccaataacgttttcgatcagaataacccgtattggaaaagcatataattgaaaaattgtaaaatggaaaatctcaatttccaaattttaaacaaagcataatgttaaatttaagggatcatagaagaaggaaagaaattcaaaaagcaagggcaagtcaagagaatagtgaaaaacatgagggtaaaatggtaattataagttggatagtttcagatgaacgttggagattgagatccaaagctcagactcggaacgaagaatgaaacgaatttttttaaagaaattaaaaatcaagtctttctcttcgtctatctctctctctgctcagactctctggtgttgaagactaatcactgaagcagatctattatacggaggacgaagaagatgtatgagcagcagcaacatttcatggatttgcaaagcgattctgggtttggggacgatagctcctggctcgccggcgatgacgatcttcgtctctctcctcaccaatctgccgccggtacgaactccggcaatgagaatctagatcgtcgtctcttaaaagatctcgttgagatggttccccttatcgagcattacatggtaaatcctttctaactctcttggccgtttttgtcgagttatcagagctcaataatgtttgggtttcgaggggattgcagattctgggatagattcgacggaattggtttcttaattttgagaaatttgcagcaattttgaaacttttttgacagattgatttggacattaaaatttgaaatttctgaaagataaagactgtagatttcatatttagctcgaaatttattgactctcttctctcactgaaacgatatataggaacataaagaaaggagttcgtttaagcggcgtggttccatgatctacactaagatgccttcaaaagaatccttgtcccgaagggtaagatgtcaatcttcttgtcttcttcatctctttatggcaattttaacattattcatacactgtagcttggttgcataggtatcaataagtttcgacttggttaacactggtagtttgctaacttgcttagataatggcttgagtttgtgatcttttccttttggggtatgagctgatatcagcttggcgttatggcttaatcaaaaattgtatatttagaagggattatagatgtttttcaattattatatgcagtaaatgttgttgctggaatgatggaatctgttctggagactggtgtcttcatac

SEQ ID NO: 17782 - DNA, 1202 bp, Arabidopsis thaliana landsberg
  unsure (1)..(1202): unsure at all n locations
aatatcacaatattttgtaaaaagttgtcgacattaatacaaatctgtcgtttcattatggattttttatttataaagaaactgaagtgtaaccgattttaacatacaatcaaatcggaaagactttatatatgggctagttaataaatctcatgtaagaaattttttcaaaattttaaaaacaaatctgccaacaaaaagtttgtcattactaaaaaggttattttagttataaacaaatcagccataacattgacatgagaaaatctgttatgctttcacactaaaaaaacaaaactgtcatcactaaaaacaaatctgttatcactatgtgactgtcgagtaattttgttttttaatgatttttgtaaaacaccagatttgttatcaaggtaattaaatctgtgagtacataaaacaactctgtcataactatataacatttttctgggataacaaatctgttacaaaacaacagatttttggttaaaaataaaaaatctgctgctaccataaggaaaaatctgcggtattgaaaacaaatcagtgactgattcattttcaaccattctaaattttaaaattttagaacaacctgtggagactatatgaaacaaatttgtcgcaaaaaacaaatgtacgaaaaaataaaaatttgtcgtaacttaatccagtaaagtctgtggtacaaaacaagtatgttgtaaaaaaatatgtggttgacctataaatttgtggtcgaaaacaaatctgtcgcaacaagagctacaaatttacaaaaatcgacgatggcnnnnnnnnnnnnnnnnnnnnnnnnnnnnnnnnnnnnnnnnnnnnnnnnnatggtattcctataatattatttttctttgcaaaggaaaacatggacattttagacataatgattactcatttaactcatgtttttagaattctcttttagtcgttatgtctaaaatatggatcactctaatacttctcccacaactaaatgaaactctctgattcttcaacctctctttgtttcaaatttcaaattggttgagcatatatgacaaaaatattattgagtcaagcttaaatctactcgttattcgagttttttatttgctttttgtttttacatacccgtatgtatgtttataagttaagaaacggaaaaaaacccgaaaaacctccatttatttttaatttgctggttt

SEQ ID NO: 17783 - DNA, 506 bp, Arabidopsis thaliana landsberg
  unsure (1)..(506): unsure at all n locations
ttgcctggaatgcgagtattctctatgtttgcgttgtgttaccttcccatataaagtaaggtataagcatgatagtcattttctcacaatttgcgatgtgaaggaggcaagtgatgaactagactggtgtgacatttgtgaaggcaaaatagaagaagagaaagaaaaggaatataattgggatgatagagaaagagagctacgattctataaatgcaatgattgtagcactgctcttcatgttgattgtttgcttggtgtagacatgtacatgaaacctattacagactacatttctgtcatcacgctcacatctaagggtacgaaacggaaagatctttggattnttcttaacaactctctcactcgaccaatttgcactacatgcttaagtcgttgtccatttcccaatattttcaaagggcacaccaaaatcttctgttctttgtattgtagtgaggactgatcatcaaactagttatctcttttctctgtcaaatctagta

SEQ ID NO: 17784 - DNA, 857 bp, Arabidopsis thaliana landsberg
tgaatagtgcacaagggttcttaaccggttattcaaacaaccgaggtcctctgtgcaagacagccagcgcgggcgcattcccctctccgtgggcagtgttgggctggtttgagcccatcactgttcatccttttcctttttttctgccaggcttaggaaatttgtaggaaattataaaaaatgataaaaatatgggaccaattttactagactcctaaatttctctaatatttgataaaaataattccaagatttttaatcccaaccatgaattattcaacatttaagaaggcctaaacctagtcttttagaattttagaaattacttgattgctccaaaaatcaccaaactttttgggcaagcctaatattatatttagaactcttggatggagtttgacttgctttggacattgtttgattcctaaacccaaaaccctagctccttagggtaaaactgtgcaaccctactaaggtattgacctagaaaaccatagtctccctagtgcactgtgaaggaaaattgtattcaagacataacttgataaacccttattgtcattgcatttcaaaagcatcacatgcgcattcatggttatatatggttatgtatagagaacgaagaagaaatatgtagcggaaccgcccgaattattccagcttaagtgcccaagtcgcacccttaaaggcagcaacacacttaaactggaataactcgtcagtccctcggatctagtccgataaagccacttatccaggatcgaataccactagctcacccgaaggtgaggcacagagaaatacaataaagcataataccataaattaaggaagtatcattagtgattacattatcg

SEQ ID NO: 17785 - DNA, 1050 bp, Arabidopsis thaliana landsberg
taaaaatccaattttattagcaggttaagtcattacctgagtctagagttctttctaccctagttcacacacttgacctatactatccaatttcttatcaaccctttttattcactggaatgctacgtgtaggggagtgatcaagtcttcatgtccgagaagtaacggtgatccgaatcgattaatactcagctgaggatctccaatcacacgacatatgtagcacttaacccttgcatatgtcaactcgccaccagggttcttaagaccagatcaggttcacgccaactgagagcaccgatacaccaccatccggcctcttgccacagagggtacacactactctcgccatctctccactcccattgcgtgttatcttattctggtattagtctgccaaggcaaagcttacccatgatgaggcatgtgaccagttaaagggtcctcgatcatcaagcttacatcgagacggtccttaatcgactcagacggagacactacaccgagactctcttctcgtgcaagtcacccgcccggtctcagcttaatcatttcaaacccaaagttggtacctggcagaggtacatcttttccgatgttgaacccatcaaggcctttgatagatccaccatcaagttttattttcgaaaaaaacatcccacccacttttgccacatcatattttgtaaaaacaaaaccttttgtttttctaaagcaaagctaagcatcaaaaagcttttataaaacaggtgattaaggaaggtaatcaaattcaaggaaggtaatgcaggaatggttttatcaagcaactcctatcacctaatgcagcaatcaagtgagaaagattttgaaatagcaagggaggtggcaaatgcaccggggcttgccttcgtttacaggtgattcaggatcggatccacgaatgtcgaagtagaaactattcccggcctgagtgtcaaaggtggttgacttgccttcagtgactctactcttctctcgtctaatcatacatcatatgatagatggtgcatggatgcatgagatgaagca

SEQ ID NO: 17786 - DNA, 1979 bp, Arabidopsis thaliana landsberg
cttatcggtaacaatttatcgggtcggatccctgacgctctattcgggctgaagaatctcaccgagctttatctctttgcaaatgactaaaccggagaaatcccgaaatcaatttcggcgaagaactgggtacatcttgatctctccgctaacaatttaaacggttccattccggaatcaatcggaaatctaacgaatttagagcttttgtatctctttgtcaacgagttaaccggagaaatcccacgggctatcggaaaattaccggaactgaaggagctgaaactctttaccaacaagttaaccggagaaataccggcagagattgggtttatttcgaagctagagcggttcgaagtttcggagaatcagttaaccggaaagttaccggagaatttgtgtcacggaggtaaacttcaaagtgtgattgtgtactcgaacaatctcaccggagaaatcccagagtctctaggagattgtgagacactctcgtcggttctgttacagaacaatggcttctctggctcagttactatatcaaacaacctgatacgcgtgaatctttcgaacaacactttcaccggtttcaaaagattaacgaaatctaccgtgcaaccatctatgagtgacttgttaggctccaacaacaatttcactggaaagattccatctttcatatgtgagttgcactctctaatccttctcgatttatctaccaacaaattcaatggttcaatccctcgttgcatagcaaatctcagtactcttgaggttctaaatcttggaaagaatcatcttagtggaagtattccagagaatatatctacaagtgtaaagtcacttgacatcggtcataaccaactggcgggaaagcttccaagatctttggtccgtatctcttctcttgaagttctcaatgtggaaagcaacaaaatcaatgacacgtttcctttttggttggattctatgcaacaactacaagttcttgtccttcgctccaatgcattccatggatcgataaatcaaaacgggttttctaagttgcgaatcatcgacatatccggtaatcacttcaatggaactttgccattagatttttttgtcaattggactgcaatgttctcacttggaaaaattgaagatcagtacatgggcacaaactacatgcgtacaaactattacagtgattcaatagttgtgatgataaaaggcatagcattggagatggtacgtatcctaaatacctttactacaattgatttttctggaaacaaatttgaaggagagattccaaggtccgttggtctactaaaagagcttcatgtgctcaacttgtcaaacaatggtttcactggccacatcccatcatcaatgggaaacctgatagagctcgagtcactggatgtttctcaaaacaagctttcgggagaaattccaccagagctagggaaactctcataccttgcgtacatgaacttctcccaaaaccagtttgtaggtctagtaccagggggcactcagtttcaaacacagccttgctcttcttttgcggacaacccgagactctttggcctttcacttgaaagagtttgtgtagatatccacaagaaaacaccacaacaatccgaaatgccagagcctgaagaagatgaagaagaggtgatgaattggacagcagctgcaattggatccatacctggtatttccattggattgacgatgggatacatattggtttcttacaaaccagaatggttaatgaactctggccgaaacaaacgcagaattaaaccaatataaataaatatcttcaatacgcttttattgcaagaatgtgttctcatggccattaacttgggagctaggaacgcttacgaatttgaaatcaatgtatttgtctaacaaaatgtcaggggagagactctagcgagttttgaatctcttcagaaacaaactccacggggaaatatcggatttca

SEQ ID NO: 17787 - DNA, 577 bp, Arabidopsis thaliana landsberg
ttacttatgtttttgcccctgtgtttctgtttatttggcgcgcagtccagacatccattaaaaccaggaaattcatttagaaaatagtttttcaatataaattaattgcagaaacatattaaattcctagaaaatccatattaggtccaaattgacccatttcggttcctataattttataatattattgtttatcaattagtgccactgatttgacatgaaagccactttaaaatttatttcctaattaatcttatatgaaatacataaaaccttagaaaattcataactcctccgttttaactccgatttgatccgttcaagttgtgttagttttgtacaagtatttactacgcagtaacaacatttattgtaccatgtctcattcttttattagatctttatttaactaatgttggttagtctcgttaaaccgtttatcattatagactactagaatatgatctatggtcaatttataacttagattaaagatgagataataatttatagaataccctcttatatgatttttattaatcaaattataatatagtttaatattttaacacgcaga

SEQ ID NO: 17788 - DNA, 419 bp, Arabidopsis thaliana landsberg
acatctcgttctaattttagacccctaacattactagtattgttatattatataaatatttttattacatggtatggcgaatttgattccaaatcactatatgatcatgatcttgtttcctttttattcattagttcatatataaagtatactttcgtgtttgttttgtactgttttataattcaaaagcataattaacgtaggcatgtagccattttttgggttcatctcgttagtgtgaacattatttcggcacttggtttaaaaggttttttagactttatttttccaatttggtgttttaaaaaaaaaaaaaaaaggggaaatgggcccccccttttttttttttttataaaaaaaaagggggaaaaaaaaaaatattatgggggggttgctctttttgggggggaaaaaaaaaa

SEQ ID NO: 17789 - DNA, 1100 bp, Arabidopsis thaliana landsberg
aaaccattaaccacacgcttttcttatgccatcctgctcgtcagatttgggcactttcacacatacctacggtcccaagaaaatttccttatgcatctatatatgcaaatttggatcatttattttggcgcatacctttggaatttgattcatcttcatttccatggataatttggtatatttggaaagcacggaatgaaaaaatctttgataatgtggataaagatcctctagagatcttacatttcgcggaaaaagagtcagacttgtggaagtccgctcaacttgagtttcacaatgaaaattttggttctttcaatttggaagatcgtaatcgagtgcggcacttttctttagacaacaattattccgacaagttttcaggcttaggatggtactgtacatcatcaactggagaggcaccaactttgggagctgccaatctcagaagaagtctatctcctttacatgccgaggtggaagctctcctctgggcgatgaagtgtatgattggtgccgacaaccaaaatgtagtttttcttacagactgttcagatcttgggagatggtgtcttctccaaccgaatggccgactttctcagtgtatttggaagagttacagagcgacaaggatgagttcacaagcttttttttatctttcatctctcgtagtgcaaatgtcaaaccagatattttggcacgaaaaatttgtacccaaccgtatcatattacatatgtaaacaaaattcttcaggattggctcttttgagttctaattaattttcggatgacaaaaaaaacaaaaaaaatatttttacaattattaccataatttcgaaaaaacaatatgtattaaatttgggattaatgtggatttttggaattaaaagtgtggtaaagaaagaaaaagaaaaaggcaaaacaagattggtcgggaggaaattgaatcacgaccggatctaatttacttggccttaaaaattgacagactcttctttaaacgtcttttctcaaaactttgtctccctcctctatattcttctcttcgacctcgtcgtctggctagtaattcaatgtctctctctctctctctactgtaa

SEQ ID NO: 17790 - DNA, 805 bp, Arabidopsis thaliana landsberg
atacttgatccgattggtgttataatcaagaacaagacataattttgtttataatgaaagaatatgcggaattgtggcaaggagtaagagaattatgaagaacaagagagatggtatatgagtgagaatgaccaaatgatattgatagaattagttagtaacctttgggggtttacaaagtatgtaaagacacacaaggggaatatgaccggttacaattaacgtaagactgaaaaagacatgagagaagagggtccttgggcttgatggtgagagcgactggtccttgggggaccaggtcggtaaagacactcgcgagtcctcttggacgggctacaagagatatttgtgtgccttcactcattctagaagctccctataggcttctcaatgtgttcggcccgacaccttgtagcttacacacaacactcggcctcttttctttatttgtacggatggatgctttatattaggtcatgctcaatagtcacgaagggaacggtgaacaggttctttgagaaggtggaggtgtccgatcaccggaaaacctacaggatttggcggtaaattcttcttctgctaagatcggaaaacatacgccactgcaatgaatccggccatgagagcgagtagaaacaaatcaatcatctcacccagtcgtgaacacataattctggagactagtcgcatgattctggagagtagtcaaaaaaataccagaggtctcactattataatatacgagggagcgaaaaaaagaaaagaaagtgtacatagttctggagagcctagcaaaaaatatacg

SEQ ID NO: 17791 - DNA, 496 bp, Arabidopsis thaliana landsberg
gaccagttcattcttcttcttactagtctactgtttggtatttgtataacttaaatgatatgatgaccatctcgtccacagttttgccttctgttggcattggagcactttcttctagagaagccgatgggagagctaatgcctctgcgggtgaaaaggtacatatgcatttttttttttttttctaattgtgcattctgactttgcgttagaggtcttgaagttatagtttttttaatgctttccttggtttcttttgctggcttgttttgtttaaaaacttgaatggcatctgttcctgagatttctctgtaccattactaaaaagtaaatcctctttattatgatttcaggaggcccataaattactacaacccgcagacaaaactttaaggaccatggctattgaatttgctgaataccaggtataccaatatagatctatgtcggaaaaaattaaccattagtgttaccatctgcatatcaatcatctact

SEQ ID NO: 17792 - DNA, 2315 bp, Arabidopsis thaliana landsberg
  unsure (1)..(2315): unsure at all n locations
tccaaaggtattatcgaaaacttgagaaatgtgaaaacgctttggctccccaagctcattggtgggctgatgataggactatttattgaagcggccacgtttattgatcatgattacaataatatatatatgtatttattaataaaacacagtcccaagtaaaaattgtttttgctttgagtccaaagaaaaagttgcaagaagatcacctactttttgttttaagtctaaaggaaaacttgcaagaagaacataacacagtatatttgactaataatgagaaaagtgtcaagttctaaattttgttgtttaccttttaaagtttttttcaccaaatctgataaaataatgattttacctcttagatcacattgataatgtcaggttattattgtattaggcgatttgtgtaatcaaaaaacaaagattaattaagcttataagaagcttttaaggagttggaacatcacacagacacaacaatttttctaagtagccacattccagaaaacgcagggtcattttgatttaaaagcatcaacaaggtttgaatgattaacgcaggctcacatatcacatcaataattacgacactactgacgttttctaattccttttccatcaagaaacaaagtgaaataaaagaaacttagtgaaacatgaaacatcaatgacaacaagtctcttttacttctccaagtctattccaaaacaaaacgaaaaaacaaagagaccaaaacacccaataagatccaaacattaaacggcttacaacaactcaagtcatcaaccaacatcatcttaagaattcgaggagagcctccatgtctacacacttttgcttcatgtctttcaactcttcccgaatttcttgaatacgagtctcaccaacatctttcagtttcttctccaaccaatctaacttaaacccggcttttgtcacataagatagcgtagaatatgcgttggccaaatcatcattggaaatgttctcaggggactggcttagaatctcagtcaagcatagtaggctattcaagtatgttgttcttagatgtgggttctccagacggaagtttgatgcaatgtctgggtgcttttcaaagagattgttcacagattctacctgcaagggatacatggactaataaagtaaaaccctacatacattcatgcagcttgtacaagaaagtgaattatatagctacgagtacttttcttacctgtgaaggaagaatttgaaacccattgacattgatgctttcatgaactaataaagtttccactaacacatctgatttgccaacaacttcacgaacaccaacctcagcaacaattttgacttctccattcaccagaaaaccaccatttaggtcaagaagttcggtaaggggaagcattgctggtgaaccccagtagcgagacttctgatcaaaccagtatggtggtgtttctactgtaaagtcacgaaacataaaacttaagtcaaaacaaaaattgcacaactcagatgattaaacaagaattgcacaactcaaaggacttaagttgggagacttctaatcaaaccatttttgtattactggtaagtcacaaaagcgtagtcaaaatcagaattgcacaacacatacatagaatctcgcagcaacacaagtcccatttatgacaagnaaaactctaaatttgaacttttgttcccattaaaaactaatctagcgaatgtataaagaatcacctttctgtgcggagagtttctcctagatttgattaacaacggttaggcgatattttatgtgtcttttccaaccattaggcaaagattcagaatcagcaacttccagaaacagagacaaacttacattaacattttcagcatttcccttgggataggccccaagacgcctgcaagcaaaggacaaaatcacgtaaaccaaaaatgaacgaaaacattagagaacaaatannnnnnnnnnnnnnnnnnnccaactacgaaattatcagaataaactttatccgattccaaagaggagaaattcttgatcgtccattggatcttcttttcatattgcttttccattgatcttgatgagaatctcctagcaaccaaactaccagaaaataaaatatccgatgctagcaaaaaaacaaacaaataacaatgtaaagacaaaaccaaaagagggagaaagagggaaggttaagattactgttgaggattgaatctttgatgaaaactgcaaaagagaaaaagctatgaagaatagagaagaagctttcagcgtagaagaagtatatgagaagaagtgtcgtgaaag

SEQ ID NO: 17793 - DNA, 534 bp, Arabidopsis thaliana landsberg
aacaatatgtgccttaagtatggaccataagagctcacctcgtttgcgcggaaacactgttttttttcggccccagccttcttcttgccatacgtcatcaagaacaaccaaatgtctaccggtttctaacaatttagagagtctaccctggagtatatgctcgtgcatatgtgaaatgtccccattttgtggttgaagttcttgccagatactctgccaaacatgcttttgcgtaaactgctgcgaaacaaagacccatgcgaatccatcaaaatggcgttgcaccatgtcatgatgaaagactggtcttgcgagagtggttttaccaataccacccattccagatatagaaaccacttgaatgttatcattcttcaccaaatgaccagccaatgcttcaacactctgttccacccgcacaaggtcgctttcagaactgatagcagacgtttgccggatctacttttgctccctctggctttgttgcagcgactatcgaactagcgccatcgataatcttttgtattcctaaac

SEQ ID NO: 17794 - DNA, 570 bp, Arabidopsis thaliana landsberg
gatgaaatgtgatcatattttgatttaaaaacgacatagattacttatttttgttgaacggtttagattgttagggaattaattttattgaacggtttagattgaatcggatcataaaattttatgaaattgttaagaccaaattacccttaatgattttgaatagcaaaaaacaaaatcaaaaattgaaatcaaaattgaggaaaaattagacaaattttcaatttgtacttcccttttaataataaagggattaagtaaacattaaaaatgtagactataacggccccataaacggctcactttttctttgatttcataatcattaagctttcttaaattagggaaatgccgaaaggcagaaaggtagtcgtataatgtatttatgtctctcctttttaatcatatatgattcactttattttattttcaagttttgttttattattacctatgactcattttattattggtcaaagtccacaagaaacaaattacacatttacgaggattaaaaaaccaaaaactgtcatcaataaaaaatagagcagtggggagccacaagataaa

SEQ ID NO: 17795 - DNA, 570 bp, Arabidopsis thaliana landsberg
aaacggtcagttttaaacggttcttcttaccatgattaaagttaccattaaaaatatataaaatcattaaccggtatgatatgaactatctatatatgctcaagtaacaaatcgcctaatatcaatctccaaattaattataggttttgacaaataaaagccgtgtccttcttctctagcatacgccaaccagaataactcaaaaaaaatttgtttcataagaatttaaccatgaaaaacaaaccagattattcttctcctgagacaaatattgattctaatccattaaagaggactcgttttcagggaagtgaaacaccccaaagtcaaataactaatgcatcaattcctcttacttcagttttttctagagttttcagaaatattacaaaccttgggaatagctctattgacagctttttgacatcatctatcaatcaacaatcctattctgcaaaaaacatgcatttatcaaatcaagggtaacacatgtatacgtttttgggaatttatgtaattgtattggctcttatagttagaagagtgaacaaattacccgcaggttcaaat

SEQ ID NO: 17796 - DNA, 591 bp, Arabidopsis thaliana landsberg
  unsure (1)..(591): unsure at all n locations
tttgccattcttaacactatactacctcatgtcgcttaactcaatttttcatcaacaatacatttgagatttctatacacctccaaaatatatacaaaaatgaagctttcttgtggtacaagttttgcgttcttgattatgtttctctttgcggcacaatctatgcatgtctatgcgggtagcttccacaaagatgttcagatacattggggtgacggccgtggaaaggtgcgcgacagagatggaaagcttctatctctctcgctcgacaaatcctctggatccggttttcagtccaaccaggagtttctctatggcaaagccgaggttcaaatgaaacttgtccctggtaactcagctggaacagtaacaacattctatgtaagtcacatacaatctcaaagcagttcttttaacaaacatattttattcgtcctagattattgaatattttggtgtttatgatgactttgtgtagcttaagtctccgggaactacgtgggatgagattgatttcgagttcttaggaaacctaagtggtcatccgtatactctccatactaatgtttacacaaaaggctcangagacaa

SEQ ID NO: 17797 - DNA, 572 bp, Arabidopsis thaliana landsberg
tggctaatgtctctcaagttgttcctaatggcagttggacatttccgatagccgttttgctccgagcattcttacctattcagctgcgagacactagtcttcccaatctgatcaatttctttggaggaatcatttgatgctccaacaagtttgttctctacgtctcttacgtgccaaatctatataacatgtggcaaaataaattatctgttataggacagtaaggttctcacaaaaacatctgaaacatgcttatctctgttttaggacaattaccttccaagaaaccatcttcgtcgatggggtttggtggttcttatgtatcctttgtgacattaatttagaatgtcgaactcacccatttttaagctatatgagaaaagtcaaaatactaaatctctatagaagaagttacatgtagagattctttgagttaccttttccagaaatcggtttcttactctggttcttgccttctttctgtaacttcatatgttcaacacacgaagggattcattgatgtatatgtggatatgcaagaagctgataacaatcatagctcaagcttaaca

SEQ ID NO: 17798 - DNA, 622 bp, Arabidopsis thaliana landsberg
  unsure (1)..(622): unsure at all n locations
cgtgcacacacatgtttagcgtattcagatatgagtgtttgtagttgtcactgaaaattgtatcgatcttacttattttttctcaagataaacgtgtgataatgtgttattcaagttttcaatcgagaatccattgattttaaagagaaagattttacaattttcaaaagttatacgagtgttgggaaaagtgttgtctaccgacatactcataccacaccgttttcaacacctagctagtctaccaaaaacaaaagtgagcatgaaggccaaaatgatctaaaatggcattttgttactctcattattattttcccaattattagactctatctataaataattttttttttatatccgcagaaataatggtataagaacaatcgatataagtaaggaggtatagctccagnnnnnnnnnnnnnnnnnnnnnnnnnnnnnnnnnatgaaagaagaaaaaatgagagattttgttattagttcttttgtaattaaagttgtgaattgtagacaacattgatctaattcgattgtttatataagcgtaaaaaaaatataactatgcgtgcataatgacggtgtgcttcaaagaaaatagtatttaacgaacaatggtaatcat

SEQ ID NO: 17799 - DNA, 204 bp, Arabidopsis thaliana landsberg
tgaacaagatgtatataacattgacttgccatgaacgtagttccagaagacgattgagccgacttgactcagtttccttcgtgaagatcacaaccttgaatgtttcctggagatgctttagagacatggtgtggtttcccgctaacatctgatggaacttctcagcggcagctttgatccccacgtctgtctctagctctccca

SEQ ID NO: 17800 - DNA, 387 bp, Arabidopsis thaliana landsberg
  unsure (1)..(387): unsure at all n locations
ggtaaggacctgaaaaggagatgtacgaggagaaaatcaaacgattgaaccttatacatgttgtattccgtacaatgtggctcgcagctgaagattacccattgcttttaggttctgcagatcttggtgtctgcttacacacttcctcgtcgggtttagacctnnnnnnnnnnnnnnnnnnnnnnnnnnnnnagctcatatgtgtaataaggttgagaagactaaaacttgatttccattgtgtcaacttgctaccgatgtttggcgtttaaggttgtgatatgtttggatgtggcctaccagtttgcttcgtttcctactcatggtaatttaatcatngcctttcaatactttcacgaacaaagactataacgtataaacctttac

SEQ ID NO: 17801 - DNA, 920 bp, Arabidopsis thaliana landsberg
gctgacgtatcgctttatccacagcttccaagcctcgaactttgaacaatgtagccttgtcatgacctgcatcatctatagcctgcacgaataatttagaatcagaatgaaattttttatgttgtgttaaaagacagagacatgttttcaccttaatgtgaaggaacccgaaatcataaccatctgaccttcctggtttatgcccgtcctctcccggtacaaagacattagggcagggattcaaaggagctgagagagcattagctatagcagttgctttcgatgtcagaagcgtccggtaatctccagtagctcccggagcttctaaaatgtcaataccgagcgacataccaagtccagctataatctttgttggtgctaccatacatggccacaagccatgcttctcatgaaaaggaggtacctaaatacacaaaacccgtacatgaagcaattacattaattaacatcatttctacgaacgcaagtaaaatagtcaaacacacacctcgattcgaataccacaaccacgtaaaagaacgagatttgcaatattcttgccttgtgcagctctctctgcgttaaccgggtgagaaacaagaatacgcgatatctctcttgataattcgttaacaactttagcagtgtgagtagcttcttctgattcatctaaaggtttagcttcaagaagcaaacgattatctttcaacggatcagtgccagatatattcccactaagtcttggccctttaacaacaacaccacaccgatgttccgtcgcatatctatcgaaaaagaaacaaactttagccaaacaataaaccacacaaagccataaacactaagacaaacattttgcaacctgactctcactttatactcagggaaagattgaagctttaacccatcaagagctgcac

SEQ ID NO: 17802 - DNA, 1552 bp, Arabidopsis thaliana landsberg
  unsure (1)..(1552): unsure at all n locations
aaggctagttttgcaaatccatcccgccatataaatccgtcccgtgataactaaaaatcaaattattcttattttttttctttttaataatgtttttatttaagatacttcaagtcaatttacaatttcaatctaataagaaaattgtatactatttttatctattttttatatcgaattctttgaacaaaaaataacaaatttcttgttaaatattttgtatcttttaaattaataaatttcctatttgtatttattatcttcaatatatttgattttgatatattatatatatatatatatacacttattgtttatatttgttgttgagatctttttagtgtctatttttgtttaaagatatatatatatatatatatatatatatatatatatttaattttttttgattttgttcagaaaaagagcaaatatgtatttcaaaaatgttaactagataaaataaaactgttaagtagataaataaattaaaattatttttgtaacatggtattataattttctcaattaaaatttttgcaagtattattagattgacaaatagtgtaaataagtgtaatgtatgtatgtgacacttagggttctaatgaggattaaaatattgcatgaccatcagggcgtagtaactataaatcttttatcctaaattaatttgtaagtgcactagcaatcatagtagtatttagggatataatttacaaagataaagaagatacacaaaagacttccgaaaaacaaaaataagttaggataaaaaggaattacatgaactcaaggaggttttgcaggaagaaaataaaaataatattctcttcttaaggtgtgttttggtccatttcatcaccgaacgagcctctaaataaatattctcaccgaacgggtctctaaataaatattttcttcttaagctgtattttggtccatttcatccttatattgctcactttagtctcatgggtccaaaatcctaaaaagtcgtatttatagtaagaatgatttgttcttgaataaaagattcaataaaacaaataaaatattcaggaactttatgaccacatcggtcaagaaggtcgtgtctaggctgcctgctacagtcacttagcctctcacccttgtaaacagtcataaatcttgccacaatactgaacttaattaaagagaattgacacttttacccttaaacctagttggagcctataaatagtgaaacataagatgaaaaccctatgatcttttagagcttgttttcattaccttcttcacacaacctccaaggttgaagttgttgtcccttgaagatctactcttgatcgtcattgttttctcttctctattcttcaaatatttcataaactacctttcgggagacgagttatcttctgtgacaaaccttgatccaaggggttcagaactctacccggaacaacctaatttttgacataatgttaccaatccttggtgttgatccctgtgatagtngagtaacatgacttagagcacttagcgaatctgatcctaagtgtcgaactat

SEQ ID NO: 17803 - DNA, 1349 bp, Arabidopsis thaliana landsberg
  unsure (1)..(1349): unsure at all n locations
actttgaagactgaagatcatggttgtgatgtgatgaacaagttctaaaatatttaggtccttaagattttcccatggagcttggttgtgaaagtgctaactgagatttctccaacatgcacacattgatgcgaaagcttccccctgcattttattatacaaacaaacaaacaaaaatgtcaccataatggatgaatgtttgttcaccatgagtatgcgacttattaacatattacattttagcattactacatccaaatacttcaactatcatcatatattggaaatttggattgatggcttgagtcataaaaacctacaaaaggattggacgatacttttagtaaaatctcttaaaaatgtccgcagtgaccaaaatgctaaaaagctagaaggatatacagacttttatcttactttatgtatcagaaaatcaatatttcttaataaatatgataaaatgtttcagtttattttgagtttagaaaaagccaaatgaattggaatcaaaataatgtaggtaaaaaagagaagtggaattaaaataaaatcattctatccaatcaaaacggtaagtagttgtgcgttttagaggcaaaacaccacagcgtttcgaagcacgtggatgtgtcgtgtgatacagcagtagcgcactattgggcattgagaatacataatcataacccctgcaatctaacggtcaaccttttaataacccttgtaggttaaatctctaccgtttattcgaattacttttccaaggtaagaaaaaagcaaacacaaaagggaatatcaaacaacaaaaaagtaagaaagagcggtaagacagagacggagaagaaggagaagaagattgttaagacgaaaccctgttgctgtccgtacaatgccgccgaagaagagtaaggcagatggagaagaaaaggcgaaacctttaacgacgttggcgtcgtctagagtgactcggagcatggacagtcgaactcgaagtcagactcaacaaaacggtgctaaagcggctggatccgccactaagccggtgacgaagaaggctaagaggaagaattcagcgattgagactgggagagccaagaagggaaagaaggaagaggaagttgaagagccagaggaagccgttgaggaggaggttgagaaggaagagccagaggttgaggaccctacgagaccaagattgttatagaacactggtaatttttgcgtaaatgttttcgatttctttagagataatgtntggaatcataagagcanaaatgtaggtttttttctttgaaattgaatctagaagcctcnaactttggggtatgtgttgagacttgtgtgtccgtgtg

SEQ ID NO: 17804 - DNA, 1051 bp, Arabidopsis thaliana landsberg
acaatatagctctgggttttaactaatgggctttaactattaaagcccattacatattaaagagatttgttagggttagggttagggcccatcgattgtatatacgttttttttcttttatcttcctcctcaaggaaaaaatcaacattggattgaattgatacaaataagcatatctttcatgttatccatcactcagaacaaaattctctcaatagacagagaaataatgcaattgcttccccacgacaccgttgaggatattcttgagagagttccggtgaaatctctgctcagattcaagtctgcttgcaaacaatggaagttgacaatcgaatctcaatatttccaggcgaaacagttgatctgctcagctggcgggaaagatctaaatcttgtattggtgtctgaagtacccagtacgttggtgttgccccatcatgttactgctgattctcctccacttaaaactaacgtgttgttgatatcatcagaacgatatcatatttaccaacttttccacaatagttgtgacggtcttgtttgcctctttgattaccaaaccttaaacaacattgtttataatcccgccactcgatggcatcgacgtttccctgtttccaggttgcaacaaatctgtcttgagcagccaagttattttagtcacgttaaatttggatttggcaaagacaaaatcagtggcatatacaaaccggtttggttatgtataactcttccgaacttggcctagaaaacgctactacatgtgaagtttttgattttagcaccaacacttgcaggtatatcaatccttcttctccttatcggattaatacttcctcgtctcgggggcatgctctgtatgtagatggatcgctttattggttaaccgggaagaaagaaattaaagttttagcgttagatctccacaccgaaacttttcaagttatctctaaagctccttttgcggaagcagatcatagaaacattatcacacgcagcctgaaaaccggttgtgctaatgggtagtaaacctctccaacaatgatat

SEQ ID NO: 17805 - DNA, 601 bp, Arabidopsis thaliana landsberg
  unsure (1)..(601): unsure at all n locations
aacgttcatgcccaaaatctgacggttcggaacttgcaataaaagtgtacaagacatctgttctggtttttatttaagctattacgtgaataatgttgtttatcatttcttcaaaaactcttaacttaatcccagttttcaactttgatgatttcagggatcgagatcgatatgtacaaggtgattatcgttttagatatgggtactgtcgtcacaatccccggaagatggtgaagacatgggctgaaaaagaacagagaaatcttaagaggtaacctataattctttgtgggtgtgtgctggataattgaattgtacttaagtgaattagaataagaaatcttggaagtccctctctgcttactaatccatatgaaatctagttagtgtagtttgatttaccttgtttttcaaacagaagccagagatgtattcacttttttcaaatatatataacagtaattttggtgatttcttagttggttatatacatttttcactggcaggcttcatgcagctggaattaggtgtncagctgttatacttcttcgccttcatgtgctagtcatggagtttataaggtcgctctaatgcattatct

SEQ ID NO: 17806 - DNA, 1768 bp, Arabidopsis thaliana landsberg
atgtaaaactccgtaacggttatgcttcttatttctcaagttgtgttgatgttaaaagttaaaagttttcaggcttaaaaaccacgactgtcacgtgataatgagagatttgttttccgtcgcagttaagaatgcattgccaacagaagttgcatcagccattgtcgagctttgtcatttttctagggatatctctgcaaaggttctcgataacgatgagcttgatcaattacaagatcgtattgtttagacattatgtcgtatgaagatgctttttcctccatcatttttcactgtgttggtacatttagtagtacatctcacagtattggcaaaactcggtgggccagttctattttgttggatatatccgattgagtggtttttttttgtacattcttatgtttatatatttacacaactagaaacttacttaactcacttatctacaagactttgggatacttcaaatcatatgttcgaaatcgcgctaagcctgaaggttctatatgtgagcagtatttagcttatgagtgtgtaacatttttgctccatggatttgaatgatatagagacacgattcactcggtatggccgcattgatgatcgacctctagctcagacaagtataagaccaaattcagaacttccattaatttttccaaaccttggaagatttgttggagcgggtaaggtttatactcttaatcatgtagagaggcaccaagcacatcggcatatattggtcaactgtcaactacttgatcacttaagagagtacgtttttcttttttaaattttaacaatttttttaactatggttgatggaagttctgttcttattttatgataatcgtctatctagaaaatataaaagtgagttatggagtaaaccatttcgtcaaagcaagaggagtcgtgccattcacattgacagagaaatgcatctcaattttgcaaaatggatcaagcataaagtagaggtaaacgagttagatgggataaccgatgatttacgatgcttagctttgggtccatctgacaaagttgtgaagtatactgcctacaatgttaatggtttaaagtttcggacaatagagagagatactgacctaaaaacccaaaatagtggtgtttatgttgcagctgagactatgagttatgctagttctcgagatcctaaccctattacaggagttgtaccttactatggaaatctggttgaagttatagagttaaactattacgaggttttcaaagttgtattattcaagtgcaagtgggctgatactcgtacggaacgaggatataaaatggatgtaaatgatcaccatatggtgaatttttcacgtttgctacacactggagataatgaagaggatgagccatacatattggcgtctcaggcaaagatggtgtattatgtagctgatccttgcaaagaagaatggaatattgcagttcattttcaacctagagacgtgtatgacatgggtgatcaagatgattcagaacagtgtgatagtgaatctattcctggagtctccgttacttcttagaaatatcttcaccgtgttcaatatgttggctactggttttttatgagtttttgatcagacttttctcttcatttattttataatcggacttttgttagtttaagtggaacaattattgcttggtcaatttgtttttgttctctcttttttttaataatgtagtcgttaacagattacgtgaggagatacttcaatttagtctttatcgt

SEQ ID NO: 17807 - DNA, 2059 bp, Arabidopsis thaliana landsberg
  unsure (1)..(2059): unsure at all n locations
accatttttccgtgttgccattttgagatgagttttatttcgttcatgaactcttctgtaccctgcccagagctgctagaaaggcgtttaacggctatatccttcttgtctgacagtgttccctagaagcagagttgcaaacagtcatccacagaacaaactacaaagaatgacagagaagggcaaagaaaaccaaattctcttttaccttataaactggaccaaatccaccttgaccgagtttgtttgagacattgaagttattnnnnnnnnnnnnnnnnnnnnnnnnnnnnnnnnnnnnnnnnnnnnnnnnnncttgtggttccaaaccatttttccatgaatcttgtgaattgttgaagaatgcccaagttggcccaacaagtcacaaatgtctgtgaattagtatatgatttgaagaagtataacaagcttaagctcaaatagacaagcttctcttaaatatatatatgcaatacagaaacttctataagctaaaagaaaagggcaaccatagtctttatgagcagatgcaggtttatgtgtagatttgatcacgatatagagataacaacaaatcacaagaaaagaaagagcactactatgttattcggtgtctcaccattttgttttgctctgtatctccagtacttatatgagccaaaggccaaaatcacaaaaatggaaaggctgatactaccaacaataatcttggtcctcctgtttccagctgagagatttaccacaaaacaaaatttcaacaagttgagaccacactgcagttgaaataaatacgtaaacaaaaatgatgtgtctttatgggataatgtctttcagccctacccagttctgaacttgcaagacgaatgaagagaaactctccgctagacaaaaattgaacggtgtctgctagctccccattccataccaaacatccaattccactaatataggcgaaggctgtgcaagaacagttgcctagacaaccttgatagcactgttcggcattgagaaagcttgcaaattggagcagatccggagtctttacatctgccatacgatagaagatgtctgcgtctttgccttgtgttttcatacaagattttgcttggcaagataattttgtacgtctcacacacccacttgtccagtttccttttccccactcctcatcagactttggtacaaaccctttcaagcattcacactttgggggatcagatctcacacacaaaccataaggcccgcatctaccatatagatcacatgggttctctgggagagacaagtgaagcttccaattatttccatcatcccagaggatcttcattttcccttctggtgttagcgtaacatatgagagattatagtttcttaatgtggaataagagaaagatcctgtgccggctgctgtatcctggacaacgctgaatggacttacatatgatgcatcaattccagatatcccagagaatcttgtttttgcccaaggaccacatctccagtaaggtactgagcctcttcttataaggccttgtgtggggatttgtggtgtaatctccagtgagaactccccaggcgaaggatcgctgttacttttccatgtagtcaacacacgattctttccacggggaatatcatacatcacagaagactgaggcagcatagtattaccaagattctcgaagcttttccataaagtttttccggaaacatcatcaattacaacaagatttccggtgtctaaaagctcagcatgacacttgttggatgtgaaagcctctcctgttgaccaaataacatcttgcgtaccatcaagcaagatcagactcccattgctgctaatagttagattcgccgcagtttttgtgactggcttatctctgttagccacccagacaaccacttgaggagcgatgttcttgaaccagatcccaacatactgtttccgagaattattaggactgaagaagcctagctcataaactccatcaggggaactcagagtttgtcctattgacaaaggacttgatgtgtttatatctgcatagccaaaagt

SEQ ID NO: 17808 - DNA, 1712 bp, Arabidopsis thaliana landsberg
ctgggaccatacaccgttggaattcaggtggttgagttgcttctaatacttcctctagctcgtttagaaacatgacttctttggaactatttgtgacaggccaagacttgagtagtccccttataaccgtatcagcgagtttgcaatctttttccacaaactgtgtgatacaataagacaattgctgatgatacatttgcaagcttttcggtttgtgaagaggtaccaaagctctaaccaaaaacactttatgctcgtctttaagcggcagagcaaatccattgatgatacttcccaaaatctctagaaactcagcaatcccattgtgtttctcagtctcgaaaacaaaccgatagaaaatgttattaatggatttccttatgaaaggacgatgaaccataaatttaccgtagatgcgatgtagaacggtcttaagacaatctctttctctaggatcctctgaatcaaataaatcaagtaaccttgagacaaaagattggtcaatgtatttcttagccagcttggtgtctgtctctggtgaagcaataagccgcaggagaatttcatagacaagctgcaagtgaggccaagtaggatccatagaaggctcttcttcctccaagtctaacgcatcaataactttattctcgcgcggttgaggattcaaggttctgaatatgttaacagaaaccattctaaccacttcttgaatcacagtttcactaaactttccattaggagaagctacataatccacaagctcaagcaatgtctgccgcttaatatccttttccttaacgttcttcgttggatccgagaaatcgaaaacaacacaggacaagctgagttttctcacaaacaagttctgtttctctgcattaggaacatctttgaaacctggcaatgcttcatatggagtgaaaccgttaccatttcctttcaaattcccttctttaaaccctgaatcagcagaaggttttacaggaggagcgttcttggtttgagaattacccgatttaccggcgccattatcactactttttgaagtggaactagatgaagaagaatggttcttagaagaagacttcttaggaagcttactcagaatctgtttccacatagtgtattaaactcagattcttctttgttcatatccccaaaacaaacatctagaagaacaatttcatcaactccatctgaataacagaacaaaaaaacaagaaaaacagattaagaacctgaaatgttgaagatatgatactaaaacacacacaaagttagttatatcaagaacctgaaatggagataaatcccaaaatttaccaaatttattacaacaaaaccattttttcttcttctttattcactcacgaaactcagaaacagaaaaaaatcaccactacaaaccataaaaatcgaaactttcgattctgattctgaaacaaacgcaatcacaaaattaaaaatcaagagaaattgcacattacaagaggctgcgattgcacaaaaaaaaggtcaacagtaggaaaaaaaaaacgatgaataatgaaataaaaaaagcttacaaaaattcacattcaagtgcttcttccaaaaaaaaacctccttcgatgttgatgattgaacttgaaattaagaattcgcaccctttagatttggctcaaatcattgcgaattggtgttattgttcttgatattggttttctttcttt

SEQ ID NO: 17809 - DNA, 1556 bp, Arabidopsis thaliana landsberg
  unsure (1)..(1556): unsure at all n locations
taacaacaacggcagagatttttcttcagtttccgacggagccttccggtcaatttcaaacgcagtcagtgacgtttgtccatgtgaatcagaaggaaacaacgaaaaagaagaagatgaaccagagcgtctcgacgaagatgacggagacgaggattccgacggagattcgaggtatctatcgactccatagacggaagaagcgacatggagattctcatggtagatcggcgggaacacaacgccatcgtccttgnnnnnnnnnnnnnnnnnnnnnnnnnnnnnnnnnnnnnnnnnnnnnnnnnnnnnnnnnntcaggtgttgttcacaataatgatcttcatcttcagccatcttcagttggatttgctggaggaattatctcgctagggtttgcttgtgagaaagaaacagttggaggaagaagaagaaggacaaatccatgaaagtttcaaacttttgggatccaagaagaacacgtgattgttgcttttcgctgattcgtttaagaaaatctggtcatacacacgtgccatctcattttctcgcgcaattttcttttgtattaattagtttatcacacgtgccgtctcattgtctgaactgaatcctaaaaagaacattgatgttaaggtatacaaagttacacactaaatagacaaaatgctctacatctctcactctctctacctgaaacctatacaacattccaatctatcaaaaattcctctaatcaggaaataaaaaacaggaaagaattctaatttacaagttagaattaaatcaatgtggagtcaatcatgttaaacgtgagtggcgaaaagacctgtctcttaatctttcgatggttcctcgatagcccccgccaggcgaaaccgctccccataggacccgagcctgtttttttaaccgcactaagcatccaatgccgctttgcggaaaggtttacttgaacagcaccaccgcctctttgctggcttacaagactagctcagttctcttgagaggttgaggcggattttgcaaattgatacttaagtttttcgtcagctatcatcaactggtttctttgtgaggttgactcgttcttcgtcttctccatttctgcttccttaagagctttcttcttctccaactccgcttgtttgacattctcttggtgtgctgctgtcgtaaacaaccttacaaaactcaagagggtcgcggtaactgcaggcaatatcgataatcatgtattgttattagctacgtaaaaacaatgagccagccactttttatgtatattagcacaaatgaggatgatgaagttcatcgtataccttgttcaaatggataatcgttcggatcctcgccaaaatagtgtacaagtgcatcagtgtttcctccctgtggtccaccatcataagattcaaaaacaaaagtaattaatttcaggatcaaacacatttttaaatgtaaggtacttggaatctagtagaggttgacaaaaattaccactgaggagtaaagacaaagatacagtagatacttgagtttcagcaacaaatatgaagtcc

SEQ ID NO: 17810 - DNA, 787 bp, Arabidopsis thaliana landsberg
agatgctcaacaaatagcttgtgaatgaatatgcatatatcctggaggctcatacacatcttctcatacttcacattcttgtggtctagtaccagcatgttcaattctgccaactcattcaaaaggaatgatactttattgaggtgctcaacttcgagttcgtgatcgatactgtatgactgactaatgttttgtagtttaccctttgcctccaaagctggaaatgcaatctcatcttctgcatctgaatgtatctgatacaagaactttataagatgaaaccgctgttgaaattctccaaggaagctataatctgttgcgagccgagctgaaccacgtacaaggtagtctagatctttcttcattgccttgtggaagtagaaaatcagatcgattggtttcaagtccatagttaagtgttcaccaatagtcttgtcaccaaaaagatcaggaagatgcagaagtggcctgagctttcctgggataagtatttgctgattcatcgcacttgagtaaggtgtctcattcatgtaaccagcaggtggatccatagaatagggatcggactactttgaatagtttctgcggtgattgttgaaagaaagatccagaagcttcttcagtgagttcctcttcaaaagaacatcttggtttgaacataaaggacagctcattccagaaactttcaactggtgttttgcctgaataaccgaagcgaaaccactgcaacaagaggtgcgcaaaaggtttgttgggaagggatcttcagagcttaagtagtgaataa

SEQ ID NO: 17811 - DNA, 640 bp, Arabidopsis thaliana landsberg
gcgtacacctcactcattagtcaatagtcactgcagtctgaatcttccaaaaaacatacactaagtttttatctatgatccctgtaattattaaactttcatatatgctcccaatatgattagttcttaacacattaaacctaattgaaaattttccaggaactggatttcccaggaggcaaagtcggttacacatcggagatgaaattcataccggaatcatcttcaaggaggattccatgttaccgggttcttgacgaagacggacgaatcatccccgatagcgattttattccggtacagaaatttcgagaatgtatatcaaaattgatatgagtttggtttagttctaaccgataataatttatgactgggaaggtgagtgagaaactcgctgttagaatgtacgaacaaatggcgacgctacaagtaatggatcacatcttctacgaagctcaacgtcaaggaagaatctctttttatcttacttccgtcggagaagaagccattaacatcgcttctgcagctgctctcagtcctgacgacgtcgttttacctcaaggaaaccgttgcgttcacctccactaatctcatttgcttctgtttgattgaacccggaagttcaatgtttggtacagta

SEQ ID NO: 17812 - DNA, 648 bp, Arabidopsis thaliana landsberg
tgaagtccatcaagaatgtattttcgctgcgaaagagtaagcccttagacgtccgatgagcttctagaccaagaaaatagttgagatcttcagggtctttgatggagaagcgagctgcgagtgcatcaagaacttgttgaatgcttcctttgtgactacccgtgattagtatatcgtcgacatacaccaatagatagacaaattctttgccacgttgcagaataaacagagaagtgtcagccaacgagttttaaatcccaaggtgaggagataagtcttcaattccgtataccaagcacgcggagcctgttttaacccgtaaatcgctttacgtagtcgacaaacgaatgatggattgtcgggatcaataaacccaggaggttgctccatgtaaacttcttctttcaaggtgccttgaagaaaggcgttgttgacgtctaattgttggattggccacgatcgggttaccgcaacatcaagaacaagacgtaaggtggtcgacttgatcacaggactgaaagtgtctgtataatcacgaccaagttgttgattataccctttttgccacaaggccttgattttgcagcctggccaaggaggaacccatttaggggaaggaaatttttggttttttaaaaataaccccca

SEQ ID NO: 17813 - DNA, 1195 bp, Arabidopsis thaliana landsberg
acccctgaaaaaccgaatgcttacataataaattataaccgcgagagtttttcaccaaatattctatacctaaagtccatgcaaagcaaaaacataataataataataccaattaacaaaccttagtcatgcattttaactagtaacagttaaacaaatgacatacctcagagaagcatcaaattctaatgacatatcacgatgaccaagactattacctttatgacgctaaccagtcaaaacctgcattctaaattcaaacacataaggcatgtatgtatgcacacatgaacacatacaaaacctgtattctaaattcaaacaaataaggcatgtatgtatgcacacatgaacacatacataattaaaaattacaaggcttacaataatgtgaagccattatgtctcaccgaaaacacctaaatcttttcattcgcctctgtaattatggataaagaagatgtaaaaccaaaaaagaaaaacgattgaattcaattaagagtaaaaattctaggcttgatttcatacctttgaaaacttgagtgccctctcgtaatccagcggaagtacaaaaccctcaataccacagaagaaaggaagaaaaacacatttgatagaaatccacagatgaggattgccaatgtttctttccttttaaaagtagggttccctcttgtaaaccccaatgccatagaagagaggccaaaacaaaaaaatcagaatgatgagaaagacggatttgataaagattagagagaagaagaaataaacatgaagaaatatctttcaaagagggacttacaaaaaaaaggagtaccttgtttcatggtcctcaggaattcatgaggctcttgcttcagaaactggttgcaagaaattgcaaacgaaattaaaatctggaaatgtacaaatgagatcaccttgtacattagtataagccatggacatatacatataaaagccccacaatcacctgatcaacgaggacgtaaagagagaagatgatcatagacctttattattgtataactggaatcgtgtgaaaccgttgatagacgctcaatagtcttccatctatactattattgtcaaacagagacctagaactatctaaataaacaagattaacaagctaaagaaaaagttttgagtaagtgaatgaatacttaagaagattaagaaaatgaagtaaaaa

SEQ ID NO: 17814 - DNA, 301 bp, Arabidopsis thaliana landsberg
gtatacgtctgtcacatccatctgcgatagggtttagcaccggctcccaagtttgggtttttatactaaaacttccatccaattggaggaattggagtctctgctgcctactgcaacatatatcttcccatcaataacattggctgcatgtgaatatcgctccaccagcatgtttggagcatcacgccacgtgtgataccggccgtccaatatcgagacactagaggagtgaacatagcctagtggttccaccagtgtaacccatcttacaatcaccagcggtgggaccacaataccgcac

SEQ ID NO: 17815 - DNA, 1035 bp, Arabidopsis thaliana landsberg
tttgggattttgagaaaattagggggttatattcgaaactggtgacttttacaataggtgagagagagagataacttttgattgaagatctagagaattctcagagaacattcacgagagatatgggcggagagagatatagatcagaagagagattttgaaatcgatggagaggacgaaagagagacgacgggagactcatgaacacttacgaaattacggaattagacatttcgctttttctcttaaaagcggatgatttattacgtgtcactatattattcgccattacgctctgttttttctttttgggctgactgacacgagtatcgattttaattcgttaaaataataaattgaaattttattttgtcttacaatcttttcaaattccatcagagatttatgtattagtaactaacaaagttttttcaaatcttttaaaaataataataattaaatctacaaactgttttgaataataataaaagtagatttttaaatcattagtttaataacactaaattttatttaaaaaatttaacttcataattaaataatatatgatttgtaaattttacacaaattacttaaaatattatattgaatacatcatctaaaaaataaagtcatggttttatttcctctatgtggatctctactttcatatctgtattttatttcaattcatatttagattttgtactttatttttgagttctttagttatgaggttgtgaagtttttgtttagttttaatgttttcctttattctagattttttccatttgtatctatttttgtttacggaaaatatgtttgtttgtcggtttagcttatagaaatgtatttttttttgccggcatatgtattgtaatcggaaaacggtctattttcccatgataactatgacatcatgccagatagagcccgaacaatgaccacaatccagatgtccacgaaaagatacttctcgatctatatctcccaaaatcgatagtttcatctatttccccatatatttgggtttaatcg

SEQ ID NO: 17816 - DNA, 1090 bp, Arabidopsis thaliana landsberg
  unsure (1)..(1090): unsure at all n locations
attggaagctagcatcatatcgccggtccttttgtctttgaattgtggtgatcctgtttatcattatctgttctcttttgtattaaataaaattctggagttggttaaaggcaaaagactcaccgagacatctcgaatgacgcctacttcgctgttgtgtacggtaaccaaaatatcaggcatgaaccgcacttcaacatcctcatctatggcaaatacgaaaagctaagaaaatagccatagatgtgaaacatcttgcgtatgaaacgttgaccaacataaaggagatgcatggaattcaacaatactaaaaggaattcacacctaactatttaattgctaagactgatcatgcaattaaaaaaaaacaaaatctagcacgtagagtgttgaatatattacctgaatattcttcggcacatgaatgatgatccatattatttgaagttatttttaccttcccaaatctagtgtttttaccggaaacttgatcagacatgtttgtctctcaggttttggttcctcgaactgatctctcttaattatcgaatgatttgatgtgactatctatctaggattatgaaacccaagtccaattaggtttacaaattacaacatggattaagcttggaagaaagcttaagaataaaagtaatcttaaaccgagttatggtttagatcctaaccgagttatggtttaggaagtgataagctcaaatctctttaggagttatctaaataagtgttttcctaataggattaggactagagtttttatataaatagaggtgctaagttatgggataaaccaaaccccactttctaatccaattaggtttacaaattacaacacgttgactttcaaactaacttacgtgggctaaaagcaaacccacttcctaatccaatttctattctctctttttctcctctttctctcctctcctctatcactcgatctagttttctttcatctccaaatctcggctttggttatgtcttgactcttgacaccgtgatttttccaaattttaattgaaaccctaattattgtttactgggcagattagtgttgggcttgcanatatga

SEQ ID NO: 17817 - DNA, 765 bp, Arabidopsis thaliana landsberg
catggtaaacaacaaaagaaaacatcatgctaataagtcaatagagaattagagatatacaactctcgatcccaagttagacttctttaataatggttaggctcagaccatcgattgctttaggcctgggtaaataaacctaaccaaatggatactaaaattctataaccgaatgaaccgaaactaaattagtattgaaccgaaatatttatttataaaattcgagctcagactcgcacttaacatctaacccgaacttaaacagaacaaatcggttgtgacgtcaggtaaaaaccagtccgcccgaaagctgagctcgaagcttgcagatgacttataatttagtcgatctaaaaacctaatttcaagattaggaatccgatcaggttaatacataatcaaccgacaaaggttaacataaaacataaacttgttcttaaagacaaaaaccttttaagatataaaagtgtttaatatggataaaagtctgaaaaataagatataaaagtgcttaatatggataaaagtccgaaagataagagtggtcgacataagtcaacagttgtagttcgcctacctaacagatcgtctgcagtgttcctagctccagttcgtctgtagttttcctagctcacagttcgtctagtaaacggcttgtctgcagcttttgtggctcgcaattcgcctagctaacagctcgtctcatgttttcccagctcgaagtttgtttagcaaacggtttcgctacaccttacatacctcgca

SEQ ID NO: 17818 - DNA, 564 bp, Arabidopsis thaliana landsberg
  unsure (1)..(564): unsure at all n locations
agttcttgtcgcatctctctatccagtgtactctgtcaatttatttaacatgtttttagcgaggccaagttctacaggagagattatcgaagtttatcagccaagtgcagaaagagtgcagcaaacagacaagaaaagtcacgaccaaaaggcgcttgctgagatgtatcttttgagtttaaccgataacattgtcacaagcggatggtctacatttggatatgtttcatacagtcttggaggattaaagccatggttactttatcagccagtaaatttcaccactcctaatccaccgtgtgttcgatccaagtcgatggagccatgttaccatactcctccttcgcatggatgtgaagctgactggggaactaactcggggaagattcttccttttgttaggcattgtgaggatatgatgtatggggggcttaagctatatgatgactnttagttctattttatcacatttgattattgagttcttaaaatcaaaagagaaattctatctctctttacagtttacacttgtatctttattaatatgttagattttttttaacg

SEQ ID NO: 17819 - DNA, 908 bp, Arabidopsis thaliana landsberg
atcgccttgtcaagtgaaggtgctacatatttcagggtatcaaggtacatgtagagagctgaaacagatgaggtttttcttgggaaatttgaaatgtcttgaaactgtcaatgttggtgttgaaatgaatcaccgagaagacaacgatgttgacaacaaatacttcagaatcactgatgctcttatgaagcttcccagagtttcatcaaactgtagaatccatttcttctgatttatcttctcctcatctatttacttgttagactttgtttatttacgtgatgcaaaacatgtgtatcaaattctaattttaatttataaaaaaacttgatttgaactcaagtctaggacgagcacactatacaaatgatacatcaatcaaaccaacaaaattgttttgacgaaacaaatgaaactgtactcaaaaccaccctttcacattccatacagttagaacatcacaaggttagaagaacattgcacaacgaaaacttcaagcaacaaccgcgccaaaaagtaaaacacaacacctaacatgatcgatacaggaagagctggtaaagccttctgatacacagacaatagcatcaatgtgatccctaaaccagctatgatcgccaagtaacaagcgtaaaccgtcatcagatcatacattgcagctcttccaaccaaaacactatagaagatgaaatccccaagccctaacttgatagcacctgatgatcccaacccaattccttcaagaaaagtctctgaattctcagcttgctcaggtcttctatcaatcaacggcacagatatctctgctctttcacttgaaccaacatgttcttcttctacttctgctgattcaaccacccttacttcatttcgattagcgttgttctggctagatctttgttctctcc

SEQ ID NO: 17820 - DNA, 572 bp, Arabidopsis thaliana landsberg
cttcggcccattttaattaaggaagcttccctattttccttgattccataaatattcgttttggagttattcttttaatgcatgaggatgggagggacgtgaatgcttccgcgaatcaccctggctttgaatggaatcgcgtctttgaaagttatgaatccttctataaattgtttctctatgttttctttatttttcatctaaccttcgtttttccttttgtgcattatggcttttaaccttcgatgctcggagtccatgccagacttttccagggttgggatgattgatgaggatatcccgaatgttccggacagaggacgctctccactttgcaacttcagatcccagattcgagctccatgtgcattaatcaaggatctttcaagcagagatcaagaaattgcaatggccttcatcaaagctcttgtggcttaacaccaaaagtgttcatcagaaaagaagaaacttcgaaagaaaatgaacaaagatgctgcggagagtcaccgtgatatcaagggagctacacacccttaactctcatcccgggactggatcgaacttgtgagtcg

SEQ ID NO: 17821 - DNA, 625 bp, Arabidopsis thaliana landsberg
  unsure (1)..(625): unsure at all n locations
aatacacaactgcacaaagctagaagttgttccaactctcatcaacttggcatctcttgatttctttaacattcatggttgcttccaactgaaaaaatttccaggtatttctacacacatctcaagactcgttatagatgacacactggtagaagaacttcctacatcaataatactttgcactcggcttagaactctcatgataagcggcagtggaaactttaagacattaacatatctccctctgagtctaacgtatctagacctaaggtgtacgggtattgagaagattccagattggatcaaagatcttcatgagctaagtttccttcatatagggggctgtagaaacctaaaatcgctgccacagcttcctctttcgatcaggtggttaaatgcatgtgactgcgaatcactcgagagtgttgcttgcgtttcaagcttaaattcatttgtggacctaaatttcaccaattgcttcaaactgaaccaagaaacacgaagagatcttatccaacaatcattctttcgcagtttgagaattntaccaggaagagaagtgcccgaaacgttcaatcaccaagctaaaggaaatgtcttgactattcgtccggagagtgatagt

SEQ ID NO: 17822 - DNA, 1776 bp, Arabidopsis thaliana landsberg
tgcaagtgtgtcacgaaagacagttggtctaatcttgggttgaatgatgtctttccttttggttcaacttatgaattggatactgaatttgtaagttggaatgaggtagaacaaaagaaagaataaatgattaattaacaaaaataatttcctccgaatttgggactaaagtaaaatcttgaggccactacaaacaaagatcactagggtccacttctctcattcacatgttttatatcttaattattaagagcatggttataggtgatactaacaaactatcattaaaaaattttagtattatttataatatttgtttaatagataaatatttttttcttatttttgacaaatgcgaccaatcaggagatgccacgtaaatgatagtaatatcaaaaaaatcattggaatgatactaatcaagctcattctaattgtttggttaatataaaaataatttttaaactgatgatactctaaaaatatcacccatgtacatggtctaagtctccctccattcaaagtttatacaaacagattagagagaggtgagaccctgaaactttaatttggcaccgaattgtgcgttgcgtactaatgtacatggtaaatgactgataggtggaaataaaaaatatagtatcagtgaaaagaggaagcaacgcaaaggatgagagatagggagaagaagacagggcatgtgcttaacatggccaaccaaactccaaaaatatctcctgaattctgccacgtggatccctctccgaccgtttaggttccaagttagcgaaaccaccgggaacttcacatcgccgtcggttttgtttcccctccgattgcctccatatcatgtgactggtgcgtttaatcaattttacactcaaagtcgtcgagtcgcatcaaagtttccttatatttaatctcccgaaaaatatattaaccggttcttataaaacatgcaaaccgcaataaatattgggaaagcaaacaataaatgggtaccaaattgtatataacctaaccctcctcattaaatccatctctatccatcaacataatgtgagttacattaaacaaacttatatgtctaacaccataaacaaatcatagttaacaaaatattctatatataatgttcttctttagctatacgtttagagtaattaactagtatatgacgaattaatcagtcttggcgacaagttggaccctactatagctagagctcatcatgtacacgtacgttgataataagccgccggaccaacgaagactcgctaaagaactagatcttcaagcctgaactcccactaacttacatgttagtgtgcgatctatacatcaccaccaagagataatcccaatatattttttccgctttatgtgaaaagggagaaaaagcagcactactactaagttggatgaaaaaattggtgttgttaattattgtcgcaaactgtttgttctgttgttcacatcgcttaacactctctcactcgcacagcagcatgcgtttcgtcacgtcaacatcgttataaagttaaaaaaactgatggtcgatcgagttctaatgaatttgatgatacgtgatatacaacatttattttatttgaaagcctatcatttgaaagaaagaaaagaccacaagtcactgcattgcgctttccgtaggcatggagaaggatccatgcaccatatgtgcacgatgagtgaaaaaactagaaaatgacaagacaggggaaaaacacaaaaggaaggagaaaacagtcattttcg

SEQ ID NO: 17823 - DNA, 3111 bp, Arabidopsis thaliana landsberg
gggtggattctccaaattaaaacctttatacgatcagaggaataattatgaaataggaggtaactcaattggagagtgagagaaattacagaaactcaccggagaggaatgaatccgactaaagttcacgacgcctgtgatgtgaaactaaatgccatctaatttcttcttttgatgattttagtaaatttaatcaactttggggttaattagaaaagatgacgtattttaaagtaattgcatatcaaaccttcaattttagttagaattaagactcctccgtatgacgcagatgtattctaaacgaatcatcatcaaatcaaattcaagttgggaaagaaaaaatcaaaatggaaagtgaagtacaaagaaacgaagcccatgtgatgtgaatgtggatagagagagagcaataaacgctatggttgagaatcagatctgaatcattttttaattctttgctggttgagattttgaatcaatcaataatggaaacatgaaactgaaagaaaaaaaagaagaaaaaagcttactttggtgagagaagacgaggagacggtggagagaaatgtgagctgcccgcgaaaataagacagagaaaactgaatcgaaagttcttttgtgagattttataatccattttcaatttggcgggttaaactgtaattcctatatttgctctatttgctttggcgggaatcaaataattcgttcgtgcgaaattaataaatctcgaaatccgatgcgttttctttcggttttttaataatatcaaattacgaaatttacgaaattttcaattttgagtttcaaatcaagctttcattacagaagaacagtatttagaacaccgattcatagttggtgtagttcttttttgggtatattggcaaaatagtcactttttcaaacttaattaggaaagtagtcactttactattcataatttgtaaagtacgcatctatgtactggtgggtgattaacttacctagaagtcaatgcatactgaagatgcagcatcaatgcgtaggttctagaaaggcgggagatattaaaattgagtggtattaatataagtaaatattaattttagttaaacattgacattatatttttcaacttagaaaaaaaatgctaagtagactaattggtcatggagaatttggtcttctaagaatatgattttaatacaataacatatactaacaataattaagacacaatgatggccaatgttggattctaattatttttttcgttaagagtatgtgatttttcatgaacaaacaaaattgaatgttttaaactcataataatcaaacgtatgtgagaatgagtctatttattgaaaacagggaataaattgttgatatttctaatgattttctctgtcaagtgcacaagagatacccaagaaaaacttatgtcaatagtagcaaagcgaaaagatttaaacaagtcaaaagataccatatttcttgaaattgattatatttgcttttttaaaaatataaaattgtaagaaaatataatatttttgaatttatatttttatatttttgttaaaatcgaatgttaataaatcatgcattataccaaattaaagagaaaatacataactttataccgatatttcttataaattaaatttgtttaaaaacaaaattatgcaaccagtgacttcaaacacctagtctatattaatagaaaggtctttgttttcagtgggaagttagttcgcgctttatcatcgtcttctctatcatcccattcaacaacaatgacgaacccaaacttaatcattgaagtgaacctgatgctttacgagatgtttctccttgagactaaggtatggatctgttactagtgcaatttttttttttcgattttgcttacattatagtataactcctttattttggattttttttcaattgttttgttttcgttcgatttaggtttggacataaaaaccgtacccgaatacccgaactggaaccgaaccgaaaaaattggttcggggcgggtacgtgtatatcgattttacactgatgggtcttatattagtgtacatgtgggtatcagttcgtgttcgggtattacccgatacccgaaagggttaaccgaaaacccgaaccaaatctcaatattcttaatcccttatacacagtcgattttaagttctttaggcttttaaatcgacaaagatcaaaactaattcttatgtatattcgcctagatttcgaataacgtttacttagaacgatggaatgtgaaaccttgaagctaacacgaactgcgtttgattctgtcaaatttgggcattttcgagttgacgacttaaactttggagacttgtgattctggagtactaagaatgatgaaatgtgaaacctcgattctaaataagtatttatgtgcgattgattctgtaatcagttggaattcgtggtgtttgatgctcttgccttttgaatttggtttacgtagaacgattgaatgagaaatgcgaacttttgtgcgattgattttgtaatctattcgaatttgttgtgtttgattctctttccttgtggtttggattactcagtgacagagctagaaaatatttttacaggagtgataatttaaataaaatattagtaaatttcttaaaataaaatacccgcaaaataactgttacataatatattagagactaacatgttgatttaaattttattaataataaaccaactaaataaaaatagtattcgaaatttacatgttgttttaaaacttttcaaaaggaaaccaagctaaaaaaagttatatattgcaaaaatttaaagcatttagttgttatcgtataaaaagttgaaatgcaaaagagaaaaaaagaaatagaatcaataacaaaaataaaaccagctacatacaagtaaagaaaacaactatttcttgaaaaatgggctaaagtatgtaataagtggaatcgaacacagaggacagggggtcaatagtagacaaataagccacctgatctattactcaacaacgtaaaagctatacaaatctttgaggaggttcaggtggcactgccttgtggattttgagtacttagaccgatt

SEQ ID NO: 17824 - DNA, 1102 bp, Arabidopsis thaliana landsberg
cgatccgacaagttaatgggagcagaacctttgaaagccgtttgctttggcatacaatatacagatctccatccatggcaatgcatcttgaaacccgttaagatatcctccgtgaccgagccataaatccacccaatctgtgtagtattatatcatccaaaagtataatcagctttcacattaagtacagagaagataacagagtaaatagctccgcttacctcttttccccattcggttttctcttcgtagccacagctaataacctgaatggattccctcaataaagacgctgggttcacattgctaggcactccaccatttagcaaaagagtagaagcaacaaaaaccggtgattgaccaaatttcttctccagtttcagttgggctgtctcagagttattctcagcatttttcactgcaaataaaaaccacatcatcaaccataacagcatggcatcaacagttttaaatctacaagcaaaaaatgttaccttggatgccttcctctatgtgctcaagagcatgtatctgctttgaagtctctcgaggcttctttcttttattatctttggccttacctgtcttcttctttctcataccgcaacacagacagcaccattttggccaacagttgcaggttctgcctggtggtttcttcttctttggtgcgtcaaatccataaagtgcttgccttctgaagacacaacctgtccctacatatatcggtccttgtatgccatctaaacctttcatgttgatctgtttataatcatagagaaaccaatgagaagggagctgtaacataaatagaacaacgcaaagacaaattccatggaaatcatacatcgaagaaaaccacattgcgatttgagtatcgatcgtgtctatcaatcccatcaaacctctgaggaaactgaacataacagattttctttccggattgtgggtccgtcatgaaacacatagcttctctaattgccttgctgttgttgatgtaatgatcacagtccacattaagaaggtaaggagaatttgagagaacagcagagacccggatcttcaagagaggttaatgagtttagtttacgaaatttgggaa

SEQ ID NO: 17825 - DNA, 1447 bp, Arabidopsis thaliana landsberg
cccctttttgttaatagtgcactctggacaaaaccatggcctttctggtatatacatttggaccacaccaatgcatcttgagtggtatgctaaaggacatccatcacaacaaagcaaggttccatccattccacaaatcctacattcatcactgtttccatctagatctgagctaacttcatttgaaccgccattagtacatcttgagtccaaatctttagactcgtttgttgagctatcagtaacctctttttccttgtaagctgaggttttagcgaatctggggtggacccgtctaggtacattttcaagaagacctgtggcaactctatcaggatcaaatccaatttcagattcttcgcgagcatctatttcatctcttagatcagctacatcaaagatgtcatcacagagaatttgtagaatcttcaatttcatcccaatgggtaacgagtagtattctatttccacaacaaatttgttaaaaatgttccactgaggcccactagcatgccccatggcagtaaagtactgaaccaaataaacaggccaagttagcacatcgagcaagctccaatcaatgcacctgcagatagcaaagcaacaaaatctgtgaagtcctctcagctaaagaggtaaaccatcctaaaataagctctttcgaccattttcactggcagaagacaaattttgcattaactagaattcatgtagttcagaaacctaacccaatgacctaatctgctagttcgtaatatgatttatacactatgaaaccagaaaaggctcaagaaatgagaacatatggtgtgaacatccggaaagcaaaacagaaacttccaaaataaaatttatctgcacttacctcaagcattttgaggctaggacagacttggagtaggaaagtctctctagatgacccttcaatgcccgcaacaaggccacatgaacagcatccaacaaagaatttggtcccgagaaatacaacgctcccacaaaatcattgagttcaaatgggcagatataaagctgaaaactaaatgaccttaagaacccatatacagataagagatgtgccacagcctcctctgggataccaattgtccctgatgaaggaggtaaatccactggtggaacaagaggagcctcaatttcaagatctgaacctctcttatctccactctcagacgactctgagtcactatatgaatcaccatcttcggagttcgtaactgctggtgcctgcactccatttacttgatttggcaactcaactgctttgttctccggcgaatttcgtttctttttctcctccttcttcagtatacagtttatctaatttcttccttctaacacgtaactcatcgtctaagtaactatccgaaataattaaacgacgaagatcaccactcttccaatcctcacaatcaccatccttatatatcac

SEQ ID NO: 17826 - DNA, 655 bp, Arabidopsis thaliana landsberg
attcagtaattaaacgagttgaaaaagaaaattcaatgaaaacgatacaacgaaaacaaaagtagtactataatatttttggccaagtctatatttcgcaggtttgaatggtatttgaaaaaaagaagaagaagagaaaaactattttttgcaacattatcatacaaatgttacgttcgtcattatattatgctacaaaactattgtcggattcaccagtttactgaactaagatacattcgagattagtactctttcacgtgaacttcataccataaagagaactcatttttatcattatccatttgatgcttttaattccaaatactccataaaattacatttattttctgagttcttacatagtttacttaattgaaggttgaaatttgagtccttggaacttgaacactggttgtaattgtactaaatgttccaaggttgttggccatgagttcaatatttgaattcattaacaatttcgatttgccatattttatacattaactcttatatatggatacagaattgcgttaaccaataaagttattcgtacacaacattttctaaatgtttttggaactaaaatagtccgcacttataccattccaattatgggtaagtatgaactatgctaatatacggcttatgaatt

SEQ ID NO: 17827 - DNA, 2756 bp, Arabidopsis thaliana landsberg
tttctcaacttatgcctttaaaaaagcagttgagtttagtttttatctctcttatttatgtgcctcagaatttcagatttagcttcttattatataattttcatctgattgttagaatgtgcagattatggtgtaaatttgtaaacaaagctaagcacagataatatgtatattaaaattttatttgttcttgtaggtcgaaacaaagaaagtggtatatcagcaagatacaaccgctgtttctccgttctccattctactttttggcggcttagtgaatgttcatcatcaggtacttatttttaataatgtagctttttaacggtgcatgttggatactctatatatatgtcgcttttggtttgtcatatgtgctctttacctgaaaaccttaccattcattgcagagtggatcagtcaccactgatgggtggttaaagctaatagcaccagctcaaaccgcggttttgttcaaagagctccgcttaaccctccattccattctcaaagatctcatccgaaaacctgaggttacatgttcaatcctttgttttatctacttagcttggcgaagtaaaagtagctcaggactaaactctcctctctcttcacgtttgtgtttttcagaaattatgtattgtccacaacgaaatcgtcaaagctatggtccatcttcttatagaagaaggcaaaccgcaacacacatgaactaaatattacgccaggaaatgaagatcaaactgtgtgtaaattagaaaacaactctttattttagtaactactattttatagcggtggattcagatcaccggtggtcaactgtctaactatttcctcaattgtaaattaagtgtcctcataggattgtttttgtatcacaaatagttttgttgaaattttttgatacaattaaaagttagttagaagataattctaattttacattttcaatgaatttggaggaatagagagttggaaatacaaagataatcaacaacaaattcgtaaaatgcaattttctgtagatacggtcctaagtgttgtatgtgtaagggtgatgaagaagaagaatttgcagagtactacgagcgagttagggaggtggctgaccgtatgatcctccaaagatatacgattaaaattttgattgaattgtacacaaaggttgaggtttaaatgtgagtagagggattcattgatgtaacatgaatcatctagaggttacggagaaggatgtcacattgtcctctaaaaatgaacccttgaactttagttttggatatcacatattcacatgcctaatctctcatctcccttcacgtttgtttgtttttcttccataaattacgtatagcccatactccatctttcttatctaagaaggcaaaatgcaacacacacatgaactagaaactgctcgaggaaatgaagatcaaatcgtttgtaaattccataaaaaaaattcactcatgttatattgcggaataaacacttactcaaaaacgtaaaaatgcaaaattttcgatcttcttacgttttttggtagatttatatcaaaccggtaaaacttttcctatgcagcggaaaaggcaaagattggtccaagaaaagttggaaaggatgacgaaatggcaagaaacacgtcgaaattattgacccaaattaatcgggatggtcatcaaattcggataacgttttgtcagtggctcgttttctcacgctacaataatttctcttctttcctaaattttaaatcattttcttcatctttctacttcattacgcaaacacaagtccttctccttccttcctcaatcaaacaacaccttctttaatccacaacaaaaaaaaaaaaaaactacaaaaaaaatataatctctgcccgcttctccgatctcggggtagcgtcaaaattgaaccaaattgatcaaaacctacccagaaatcatttttggtcacaggggatataggcgggcagatttaaaattttcttctttttttcttctgtaagaatcgttttagattcgggaaattgtgtgtgtttgatgggttttttggtggatacgcaaaaggaaggaggtggacattcatggggttacgttagaagtttggttagaaggaaacaagtcgactctgctaatggccaatctcatggtcaccaactcgctagagccctcactgttcctcatctagttgcaattggtaacctcatttctcaatttatttctctagtgtttcttataaacactcccaagtttgattcttgtgtgctcatttcatgtggattcaggtgaaaaagtttggttttttattgtgaaattcatataatttaaagtttgttttttttattgtgaaatacatataatttaaagtttgattctttttgagatcaatttatggggatataggtgagaaagtttggttttttattgtgaaatcaatatataactgttgacttttgtataaatatataggtgttggagcaacaataggagctggagtttatattcttgtaggaacagttgcgagagagcattcaggattctttcttgctttgtcttttcttattgctggaattgctgctggtctttctgcgttttgttatgctgaactctctagtcgttgcccttcagctgggagtgcgtatcactattcttacatttgtgttggcgaagggtaatcaatgattactgtacttgcttattgcgtctatctctaagcaaattctatggctctttattcttattgagtcatgg

SEQ ID NO: 17828 - DNA, 1801 bp, Arabidopsis thaliana landsberg
gaagagaatgactcgaacgccattgttgcatgtctcagtatcctttttcgctttctttgcggcttcgcgcgggctatggcttttccttccttttttttattacaaacggccaaaaatgttgttagatgggccgtttcaaagcccaaactattatgggcttacttctaagattcatatctctaatgttaattataaacaaaatagccactagtttactgaagatctaaaatatgattagcactaatttaatgatgataggttttccttatggtatgggtcctaaagagtaaagagagacactaaaaaaatggccaatgggagacaaaagccttagtgcgagttctttgtctttaaatttttgtttttaatttcttgttatttaaaaaactattagattttaaaatgtttttggttagattaccaacagagaatctttcccacttttgttaattgtctaataataagctcattttgataagtttgtataaataaagttagtgttgcttttgctttaacccaaagcgtatctttgggaaacttgtgtcccctgcgtaaaacatgtgagctacatatagcagagagatttaacgatttaaaatagttgtaagtgctaagataaactaaagattttaataaatatggatgataattaagaagattaattatcgtatttaaactttatattataagatcaatcttttattaatccgtgatccggtcgacagtcgacattaattagacaagatgattacgaactaaggctgggcaaaatattcgttcgatccgcttcgattcggtatttgatttgatttgattcgaaaaatccgaatatctgtaagatttttgagtaaagcaaataggaaaatgtagtattcgtaaaaaccgaatcaaataataaatattattttttaaaaagtcgaatatccgcttcgatccgtatttttttataaatattaaaaaatatagttatatctatatatagatatcataaatagtttatgtattgtagccattttatgtttttatgttaagatgtttgtttgatcatttttttttcatgttatgttttgatcaatggcataaaaaattatcgggttttagtttttggaattagtttgataacattttgttgaccggtgataccaacaacggttacgtttggtatttataacttattttgaaagtatgttaaataaaaattttgaatatctgatatgtttatatagtttatatatttttttaatatttatacgtatcaaagtagatatccgcaaatatcacaaaaaaattcggatatttgaaattctggatatccggaaagtttcgaatcaaagcaaatcataaaagcaagtattcggttaaaacgaatcaaataacaaatatcacaatttttccggatatttgcttcgtgtccaggcctagcctttataggcccatagacagtatgtgttaaattataatccaatattgtacggatgattatactatatagttccgaatatatatcattgtgttacagctgggaatgaatcaaattaacgtaatgtacggaagaagaactatagaagctttgttttttgtgggcttcaaatttcaatatgtcaattatgagaataatcaagtaaatattgtaaatacatactctaataagaaaataaggccttaagctaggatatgagaatgttagagtgcaattaagaaaatgtccggtgcaacgcgacatctgcgttgttttcacatccatgcatgcgtactatatgtatccccgcatcttagtcaaaatcaaatattcaaacgagag

SEQ ID NO: 17829 - DNA, 1612 bp, Arabidopsis thaliana landsberg
cctatcttttggaagttgataattgctaaatcatgttcataattaactgattactactatcttagatttaactttagtgaatatgcattagacaataacaaattttcagttgattttcaatatttaaatttgtcatgttatattgagagagagagaaaagaagataggtgagaaagagagatttagaaaaaggtaagcgagagagagagaaaggtgagaaagagatattcggaaagagagaaaggtaagagagagagatagaagaagaacataagcttagatatcaacaataacgaaaaacaattaagatggactcttttatgctccgaatgacaatgtaaaagcatcttatgatcattgagttaggaaaagagtgttacggggaaccttaatttgtattcgaccacaatttatataaagtacataataattttaagttcaaaatgatatttgttcaaacatgatcacacacaaacgcattcacctccccataaccctttttcgttgtctcacttgggtgtgaaagcctgtaaaaaaaacacacacacaaaagctagtcaattaaacgagtcgaggttatgaacatttagtaaagatatgttttgatttggatcacacttacagcgaagattgtggcgtgaccaggatcagcaagatgtgcaaaaaggttatcaataggaccagtgccagtgtagatgtgttggaaccaagcacccatcactgccaacatagccaaccttccgttcttgatctccttggtcctcaactccttgagcttagccgggctaccggatccccaacccaacgggtcgaaccataacccacctgggtaaccaacgtctgtgcccgtcagtttgttgtttgggaagactgggtcagtgttgacgctaccgggcttgatgatatcggcccatctacgtccttctgcccatccgatcaaaatgagctcaacgacaaagagtgtggttttgtccgtgaaatactcttgctctcccgccgtgtaccatgacggagtgttgaggattccgatcttcgttaggaactctgggatgaatatcccggcggctcctagcatagcccatcggcagtggactatctcggcttgtacgttccattttagactgtccgggtccgatgctgacatgtgtctaaattttgtcagaaaattataaatatagtctaattttgtttataaaacttgttaaaaagcatgcaaggaggaacacaaaaaatatactcacaaagaccaagaggatcaaatccgaagtcaccagggaggctaccgtctagccactctggaggagtgcttcccgggaaccagattggtctatctggatcagctgcgacggcgcgcaccgacgcatctggcctggacacagctggaacagtcaacttcttcttcagcctcagtttcttaccacccaagaaactgcacatatatcatagccctaaaaatttagtcacaacttcaataacaccaatcatacataaattcatagtattacatagggcagatcggtgtttggatctcacatacgatagtcgctcaacgtgtaatctaaatggatgatggacacttattttcaaccgcaacacattctcggatatagat

SEQ ID NO: 17830 - DNA, 2526 bp, Arabidopsis thaliana landsberg
  unsure (1)..(2526): unsure at all n locations
taatataaactgatgtggtttggttagtgttcaatgaaaccaaaagctactattaccaacacacaccttaattgattgtgcccggacaagtactattgcagtcagattctagacaaatttctccatttagtagagagagaactaaacatgtaaaaaactttaaaataaaaaagaaccaaacttgttgctaagagatccaaactaaaagcttaagaagaagacgatagatagctcagtcttcgtagtcgccttgggcatacttgtcttcggggtaatacacagccactacttggtttcctccaaattttcttccattcatccccgatctggcctttgatgagccatccacatccgcatactctaagaaaacctgcattagtattaccattagagtatgcaatttatatatgaatttggtagacatttgtatctgaggactgaaatctaaccttcccaactcctggtgttgggtcatgatctggattaggcctcggaatcacaacattcactaagttacctacacacacaacaatgatgtatcaaagttcattttagaccatgagcctcagtaatgtgctattggtataatgtcagaacagacaataagaaaatctaattgcttaccgaattttccaccttcttgtcgcatgtcctccattatctctgcatattcttcatcgtctctaagatcatcagctgtaaccacttgagtcaaacagacaatcttggtgggagtaccttctggtttggaacataagccctctgcaacaaagtttgagacagatttagcattactgatcatttagatagagtgaatcagaatcctttacctgcaaagcaatctgttgttgggcataaagtaagacttcttcttgctcgggtttaggttgaattgcaccctggattgcacgcctaactgtaagtgtcttatcacccatcttaatcccgtttagagcggcacatgcaatatctgttactgacggatcttggtaaacacagaatgcatatcccttcgaatttccagtctccctgtctttgaccaagttgaaacctcttaggggcccaaaagactccaagagctccctgatctgtacctctgtgaagtaatagggaagtccgcccacaaaaatgcggtcgggaccctcaagcccaccagtagaccctgaagacaatccaacagcccctaagttgaggttgggattaggctggctcggaccaagagttgcagcaagagacgggttatagtcagttggcctcctcacctttacaggaactccctagagatgaaaaaagctatgatttcagataggtttcaatactcataatacagattgtaactaataaaaaccaaacatctaaagtgtagaagagctaataaatcacctctgatataatgccgtctaatgccattgcgttactagcctcctcaacagatctcatctctacaaaagcaaacttcttttcgtggtttatataaacattgaccaccgcatcacctatgaattaataatccaaaaaaaggatgagaattcgtatagacttgcggccaatatgacaaaaatataatgaacttttcagtacctggcccagcagtgtttcccccaatggccgacatcacttggctaaagaacgttgacaccgactaggacatgaaaacccattctcagtaggcatacaatggatattgaaatgtggtttaaatagacaataataaacaaaaagtcacaaaaccttaaacaaaacaaaagtaacaaacctgttcattagcagttggtggaaggccaccaacatagactcgccgagcatgcctagttgcctgcgactacatattttaggaagggaatcgtgacaaaaggtgaagaacctaagaataagatagattgatagatcgtacctgttgagtcattgcctgaactggcagtacaggaagcgcacctagttgctatgtgagaaaaaagattgagaagttctgagcatgttcgcataaaacaaaagaaaagaggaacataagagacacaaaaatacaaatttttatacctgaccagggaccattggaaacatgtttgagaacatccctggaatagtagcagtagttggcacactaggaacctggcctgctaggtaaagtagtatgcgtcataaaaatgtttgttagatacattattatgtttcccggaggagcagacctaccaacaagtacaaagctacagataacaccttgctacttacaaaacccacaagtagaaagtataccaacaacttatgaatattaaaatgaaaagttgtgatgtaatattcgttttagttgtcagagattgtaaggctcgaaaacaggcatatagttgccagtcgaagatgaaaaatacccatgacaaccgttgcactgattcctccttgtacaattaaagctagagaggtcggctcattgtcagcacagtggggcaactaacccaacatagccttcttactancaaaagacatgacacagaaacaaacaaacaccactcaaaaaacacagacaaaaaa

SEQ ID NO: 17831 - DNA, 849 bp, Arabidopsis thaliana landsberg
aatatttgcatgaagtgtcaaatttaataaacaatcgactgcttcctccgaactcagaaaatgcatgcgtcgaggacgcaacaggccaacatggtcgcaagactgcatttaacaaaaaaaaaaacaataacttatcaaacgtgcggtcccggttacgttgagccacaataacaaattgtcctaaaattttccaaaggattggaaaaaaagaaaagaaaaaagagagactaaccagcctttcaagaatccatcagcagcttcacctttagactttgtctcgacaggagccaccgtagcatgagtcgtgtcgttcgttgggtaaccgagcggtggcggtgccacgtatggaccggtagacactggcggcgtaggataagctcctaattatacatatttgacattagttttgttaccataaaactctagaaatatgatgtatgacgagattgatgaacgatgatacatgatcatgatgcttaatttgtagggactcaaaaaacaaacaaacctgcatattggttttgactgtattggctcatattcgaacagattatgatttttctttgaaaatgtagatgaaaatggtatgtagatgtgtatgatatatggattgatatttgcaaacgaagatatatagtcatgtaagggaagaaccaaataaggtcggttttagaagaaccgcgtgagcgcagataacagtcattgttagtctccagaaatttattattccaacgactaaagaaaacggcaaagaaccattatttttaaatgttataagaataagtagatgatgccagtggcggacccagccaagcaatttagtaggtgcaaaatgtaacaaaatgagaa

SEQ ID NO: 17832 - DNA, 975 bp, Arabidopsis thaliana landsberg
  unsure (1)..(975): unsure at all n locations
ttagtggagggcgaggccaattattccctcaaatatttataacttccactatgaaacaattagggtttctaagatgagtttgagacaacttttattgttttctgggctttcttgaagcatcttggtttgagacaattttcaatctcatggttttgtggtatttcatgtcttacggctccaaaagcaatatatatttatttaagttaatttaatgatcgaaatctttaattatgaaggtcaaacgaagatgttagtaacaatgggctgaagaagaaggttctcactattgctgaccttacatcaagccttttggaaataataatgtcttatcttgtgttaaaagataacattcgtgcatccgcggtctgccgagcatgtcgtaaagccgctgaatatgttcgggttgtggagaagcatccatgggttatcagctttccgagacattacggcgtgactattctcttcgatccattggaacggaagaggtacacactgaatttacccgagttagttggaaccgatgtttgttactcgaaagacggatggttgcttatgcgaagatccagtttagtggacatgttcttcttcaacccgtatactagggagcttataaacttgccaaagtgtgagttgtcctttcaagcgattgctttctcttcggcccctacatcaggtacttgtgtggtgttagcgttaagaccttttacaagatatatcatccgtataagcatttgctgtcctggagcaactgnnnnnnnnnnnnnnnnnnnnnnnnnnnnnnnnnnnnnnnncccatacatgcatagcaaccttgtctatgccaacgatcacttttattgttttagctcgggaggtgttttagttgactttgatggaccttctggcacaatgagtgaacaagcatggaatgaacatagatgcgcttatatgcgtaatgataatgcagaatggtttaatcttccgaagagaatttac

SEQ ID NO: 17833 - DNA, 1100 bp, Arabidopsis thaliana landsberg
ttgattttaactccgaaactctagaccgagtgttgtggttcctttaaggatcgcaagtactgttttattgctgctccatgtgactcctttggactttgcatacaccttctcaatacacctacacaaaaagataagtccggtcttgtgtgaagtagatatcgaagacatccaacattcctcctgtcacttgtagcatcaatgtctttctctttcggggctttagacaagttcaaaccagcttccattggcgtgtgaaccaagttacattcagccattcccgcttcttctagtatctttagtgcgtaccgtcgttgacttagtgttattccttctttgttttgacaaacttcaatcccgagatagtaagtcactcttccaaggtcactcatctcaaattttagtgccatctccgtcttaaaatttagtacttgttctaccacgcttttgaatttcttgaattttccgaaggtttcatttttttcttttaacatgatagtccacatgtatcttgtgaagtcatcgatgagtacaaacacatacttgtttcctgccaatgtgtttggtgtgattggtccacaaagatctccatgacttaattctaatgccttggtagcccggaacatggtagcttgtggaaatacttgccttgtttgttttccaagtaaacatgagccacacacatttgactcaaagttagcaagtgtaatttccacgacaagctctcttttaaccattgacttcatagtctcgtgattaatgtgaactagcctcgcatgccatctagaagaatcgattggagttgttgaataaagacacattgtgtctttgatccccatactcaccttgtataatcgattttttgatctaactgccttgacaagtagctttccatctcgatcatgcatagttaggtcttctgctttcatcctcacatcacatcctgcttttgtagcttgaccaagactaattatgttactctttagttcaggaataaaataaacatcaaccatttttctttgttcttcgtttcgatcgataaactcgatcataccctttcctttgatgtctattcgagagtcatcgtcgaacctcactttttc

SEQ ID NO: 17834 - DNA, 511 bp, Arabidopsis thaliana landsberg
cgcaggtcagacaagtgtacgtcaagaaaacaaatctatagtgtcatcttgctcaaacatcagcaagtgtggttctcagtgacatgatgtggtgctttgatagtggatgctccagacacatgactggaacaatatacaatctcgctgggtatgaggatgtgacatctagaaaagtcaaatttggagatgccttggtaaaaaaaaagggacacacttcaggacaagcactgcctcatctaacaggtgtataccatgtcgatggactcaaagcgaatctgatcaatatcagtcaactcttcgatgttagtttaagtgtcatttttacacaaacaaaatgtagagctgttgacaaacaaggatttgtgaagatggaaggacaacatgctgcaaataactgttacatgtggaatctagaggaatcatgttgcactgcatcattggttgatgaatctgattcagaagatcaaacgctagggtctctaccagataaatctgatgaatctgatcagat

SEQ ID NO: 17835 - DNA, 602 bp, Arabidopsis thaliana landsberg
  unsure (1)..(602): unsure at all n locations
cattgtaagtcttccagaccttttaaacctatttatttcctctgtatttataacagaaaaagggtagttttagagaaccacataacttgtctgtctccttatctttggataatgatgaaccctaaaaaaaacaataacacctttctgagctactttgtttgtttgtttttgttgctcgaggttggtttaggacaaaaccaaataagtgaaatcaaagtaggagtagttcttgatctcaatacaacattttcgaagatctgtctcacttctattaacctggcgttgtctgatttctataaagaccatcctaattaccgcacaagacttgcgcttcacgttagagattccatgaaagacactgtgcaggcttcagctgcaggtttgttacttttatgtcttttgcttctccgctacttgtaagggatcatttggatttattaattattagttgcagtcggatgaaatatattacgtaggatcgtctttggtaagagcaatctcttcattntctttattttctagaaagtcttactactattcctagtagcctctttaaatatttattcatggagtatatagtatattagaataaatactagcat

SEQ ID NO: 17836 - DNA, 787 bp, Arabidopsis thaliana landsberg
tcatgcctgcaggtcgactctagaggatcccccataatggagaagatcctccatattcttcctaaagatacttttgagacatcttttgccttactcaacaggtatgtcaagcgagttgttgacaatggaattagctcacataaagctaagctgcttaccagagacattagtgcaatcatgctgcctaaggaaagaaggagaaggcatagagagtagacatagctgagtacatccgcaccattactcctggtcagaccattgcgaacgttcctgatccaggtagctttgttcttgattgctctatctccacaagcagattcagtcgctctttgtgtgatctgggatcaagcatcaacctcatgcctaagtttgttgctgagagactaggaatgactcactacaggcctactcgcatcacttttctcttcgcggatcgttccaagcgaatccctgaaggaatccttgaagattttcctgttaaggttggtaactctgttatccctgctgattttgtggtcatggactatgagaaggaacccaaggatcctcttatccttggaagagcatttctaaggtttgtgaagagagggagaatctctctcaaggtttgtgattcggagatggagtttggcatggatggttcagagcttattaaacctatcagttgcattgctttcagcaaagacacacctcctcagactgatcaaaatcccaccacagagccacacacaacgctccaacacgtccagctcaccaatgacagttggagagcaacgatgtcgatcga

SEQ ID NO: 17837 - DNA, 1834 bp, Arabidopsis thaliana landsberg
aaacgttttggtaaaatcaaatgaaaaacatgtcatcttaatctatatgacaggtcgggtgttacaaattaggttaaccatttaaggttagaccaaattaaaactaagcatttaatgcgtcaaccttcaaatttcgttgaatacaaacctcaactttcttcgatgaaatatatacccaacttttattgacttatcaatttaatcgctaacttatgttgacttcacgaaatcgttaagtcgcgtactacaagaaaaaatagacattttaactcaagataaacgctattgtatgtgtttaatagcgttttcataaactttgatggattaacgagttactagaataatctgaatataagaaccgagtgcttttggtttttttagttagttagtttttattatggtttttaattggtttagtctatccgagtggaattgttttctttttaattaggtttttggtatgtctttataaacactatttatgcaaacacttggaaagtgtgcttatttctaaccaactcagttaaatgcggaacttggaggcaaaaatccgaattagaaccaatctggctgacatcatatccattgatgaggtaaagacaagaaataaaattgataagacaaatttgggaacaattaaggggaagatggatatcaatttgaatcctaatgacaaagacatgatagcttttacatggacccatgtttctggattgagacatattaatttggcaacaaataataaggacaaagacttgagatgatcaaaatgataatgacaatataatgattgtcgctaagtaaaatttaattaaaaggctgtgactggttaaacatatagaataaatggaaaaatagaataatcacatcaggaagaaaaataatttttatttgctttgaagatggaagaattcatgtgatttagttactttttgatatttttcgaagaaacaattttcttccaatttcttttgttggactaatacatgtaattttttccctttctttttgttttcttctattaaagtcaactagtcacacgactcacaccctcaatgatatgacaagtatgtgtcatgtggattagttagtgtggaagcaagtcttttaacatccaatgttttctcaattcttacctaacacggtaacaccttttttttcccacaacacatggtactaaccggttgactattccctggtactgcggttgaggctgaggcaatggctgttgaaccatcatgccttctccagccaccgtatagtacacatgcggcttcccatctgcgaatacggttcttgtaaccccattggagctggaccaacactagtgtatatataccattaagtaatttgaagaaatatataaaatattaatcaaaacgcgtaaaaagagtaaagtgatctttgatgattagatctacaaatcgacgtcaaaaggaaaaaaaaaaaaaaaaaagctacaaaataaacattgaaaaagttcgagtccctaatccctatatagtttatacacatatcaacaccaaataatcacaagagaaaaaaaattataaacaaggttgcatatgggatcgtttttctttcccaattagttaaattagatagagatagcgaccaaaaaaaacaagattagaggtattaatccaaataggatttagctaactttaaacaattacactcccaaagtgattgaacccgtatggccgtattagggaatatcgtaatttagagtttgtctagataatcgaattcgaaaaaaaactactaaatcgatctgtttgataatacgtgaaaaactgatacgtaaccataagatccatactttctctgaaat

SEQ ID NO: 17838 - DNA, 1558 bp, Arabidopsis thaliana landsberg
  unsure (1)..(1558): unsure at all n locations
acatgtgctgagatctgggtaacgctttccttttcttttgttaatccgagttgggctcatgtggggcaattgggtcagcagctcaaacaatggacaaaaggaaccaagtccattgtcacctattttcagggttttacaacccgctttgatcatcttgcgctacttggaaaggctcctgtacgtgaagaacaaattgagcttattcttggtggcctcccnnnnnnnnnnnnnnnnnnnnnnnnnnnnnnnnnnnnnnnnnnnnnnnnnnnnnnnnncaccgaagtccttgagaagcttattaatcatgaagtgaagctggcagccaaagcagaagccacctccgtccctgtcactgcaaatgctgtcaactatcgtggtaacaacaacaacaacaacaactctcggagtaacggtcgcaacaactctcgtggtaacacttcatggcagaatagtcagtccacctcaaaccgccaacaatacacaccacgtccctatcaaggcaagtgtcagatctgtagcgtccatggtcatagcgcacgtcgttgtccacaacttcaacaacatgctggttcatacgcctctaatcagtcgtcatctgcctcttatgcgccatggcagcctcgtgctaacatggtttctgcgacaccatacaactccggcaattggctattggatagtggagcgacgcatcacctcacttctaacctgaataatctcgctttacaccaaccgtacaatggtgatgaagaggttaccattgctgatggttcgggtttgccaatctctcactctggttctgccttactccctactccaactcgctctcttgctttaaaagatgtcttatatgttccagatattcagaaaaatcttatctctgtttatcgaatgtgtaatactaatggagtatctgtggaattctttcctgcacactttcaggtgaaggatctcagcacgggggcccgattactccaaggcaagactaaaaatgagctgtatgagtggccggtcaattcttccattgctacctccatgtttgcttcacccacaccaaaaacagaccttccatcatggcatgcaagacttggccatccctctttacctattttaaaagcacttatttcaaaattttctttacccatttctcattctttgcaaaaccagttgttatgttctgattgctctatcaataaaagccataaattgccattttactcaaacactattgtctctcatcatcctcttgaatatgtctatactgacgtttggacgtctccaatggtatcagttgataatttcaaatactatcttgttcttgttgaccacttcacaagatacacatggctatatcctctaaagcaaaagtcccaagtcaaagaggtttttgtagctttcaaagctgttgttgaaaatcggtttcaaagacgcatacgtaggttgtattccgataatggtggtgagttcatagcactacggtcattcctcgtcgccaatggtattagtcatctcacatctccaccacatacaccggaacacaacggtatctccgagagaaagc

SEQ ID NO: 17839 - DNA, 1307 bp, Arabidopsis thaliana landsberg
  unsure (1)..(1307): unsure at all n locations
acttcgatatgtaaattattatttagttcactatacgatttaaaatcgagtattgagtgacacaaggttctttttcattttctcccanaaatgatgatatgattaacattggacttttcaacaaatgcaaaaataaggaaagaaagccaagncttagaaagtcaatatgttttcattgcatgcattgacgtatacatatcagtatcacaccaactgtaatgagaacgaccctgatatatataatctctgcctaacagtctaacactagctaatttatagtttataagatgttatatacatatatacccgggaagaaagaggaagaaagaaaaatgagtctcaagttcattcttatagctttgcttctacttttatgcatcacattttccaattcgaccgtcgttcctttttccaaaaaccggaaaattagtaagtcttcataactgcataagtgcaaatattgttattatatggtgttaaaatgaggtttgtaatatagttttaacgtgtaacaagccaatgaagaagaagaagaagaaggtagagagattgacattcacaaaggaaagaagatcaccgtaaaagtcagccgttcgcctcctgcaaaaggctggatttgttgcaatgattaactaaaaggagctatgtgaacattttcataagatcccatccttcaatttctatgaagataatatcgaccaagatcaaacttcaaagcttgaaattagaaacgtgtatttgctatatctcaaccactaatttaaggggctttcggcccattacacgcatgggaagattcaattatgttgattttgtaagttttggggctaaagtgtaaattattgaaacttgtaggcttgatttcattattccaagtttccactttttctcctccgccgtagccggtgcttcttcttcgtgaaaatctttcgtctgagattttttctttactagttgaataaaattgaagatttcgaagactacccaaaacccgcgttttacaaaaagccagatactttnttttttttttttttttttataatnncattaaaactacccaatgggcttgggccgaaacttacaaacaattcggtccagttacaaaattagggttttctgacacatcgccaggaaaaagaaaaaagctcgccgcctgttgaccgtcgctagcagagcgaccaaaacctagatccggcggactcaagtcccacagctttgtggcccgctccgagaatcgtccaccaccgacgaaagattccggttttcgtctgtagagacttaacttcaacgcaccaacccaccacaag

SEQ ID NO: 17840 - DNA, 2390 bp, Arabidopsis thaliana landsberg
  unsure (1)..(2390): unsure at all n locations
gcgtggtaacacctaaaagccagcaaaaataagttttaagagaattacccactgttaaatagtagttgtagttcaaagcaccccttctgccctagagtttgataattttgtctagagaaaactattcaccttctgatccccaaattttgagacagagcnacacacaccagtaacaagccactgtaagttttgcagaatttttggaattttataaaagcaacttgtagttcaaacctactccaaaacattagaagaataaaagaaaaaggaaagaagaaataaaccccacctcaataagtctaacttgagtacttatcaattctccctaagacttaaaaataattcagtggaaacccaaaaataaacctaccacttaccttagctaagtttaacataatttaccaagtataccacccaagggtattacataagcaaagctaaccttgtttaactcaagaaaatcatacatcgtccaaagttgtaatttctaaaagtacgtatcatatcatgcatgtatcttacgcattgcattcattagatcgtaatcttgccgacggagagtatgtgctcatccccgagcaaggacctgtccaagaggaggaccaggagcaggcttcagaggctgctattgaggatctccccgcagccccagcaattgaaggcaagccccggttatatgcataaccgtttatatatgctattttactacacttaatgtttgtaggtttgtaatgtgcacttaagtgtaggagttgcttgaaacctctagctgcatgaacttaggattcctttttgagatgaatactagtatgctaggtcgagtagctgctttgctaatcaggatctcggtagaagtcgagtgatttttctagcactcgcgcgaggtcaggaattgattgtattcatttttatatcataatgatgatggtctgtggacaacgatccatggggatgcgttgtctacgagatgagaaattggaataaggattaacgtgcggatacatgtgtcaagcgttcgaacgtactaagcacatgccaaaaaatatggtaaatcggtaagcctaatacctgagttaacctgcccacagactttatccctcacgtgactgagacatggtatcccattccggttatatgggtacaagtgcggtcttgcaaacgcagtcggggttagtaggcattgtcaccaagcggtgagccctgatctgctgcggggaatcgatgggacggttatgtgtgtgggccggagtgcccctacatgtcgtgtgtctaggtttaccttgcaaggattaaaactcgattcgaatcgtctgcttctcgcagctaatgagactgcttgaccccttgtactgcattgagtaaaaagtgaaatgaggttttacttgagataacatgttgattgtattaaatgattgttacaatggatgcttataaaggagcaaacctagctaaattaaatatactagaactggaaaagctaaaactgtttttagactcagctagtgcttatgacaaaccaaacccctcagccaaacagctgcatggtctagaggtagaggagtagactcctcacaccgggtaagtctagttgagtattagtatactcagccttgcttgtggcataatttttgcaggtacgattcagaatatggttgatggtgtgacttggccttccaccctgccaccgggttggacagtcgagtgggatgctgctctagcaggagaggagcaggaggagtagtggctaggccttgccttacttctcagccttcaacgttaatgatgatccgctgcatttcatttatgaacttatttcagttcatttaaaaactctgatttatgtaataactccagtactttaaattgaggttcctgctttattgtatcttctctgtgactcaccttcgtgtgagctagtggtattcgatcctggataagtggctttatcggactagatccgagggactgacgggttattctggtttaagtgtgttgctgcctttaagggtgcgacttgggcacttaagctggaataattcgggcggttccgccacagctggtatcggagcgaataccagtacagagaagtcaataagtcatgattaccaaccttttctaaagtaaaacttgcttagaaaccaaagttggatagatatcaggacgataaggatagacctaggacgtgaagccttaggaaatagatgggtagctaggtggctatttatataggccataaaggctactactactattagaagggatgctgtagaagcacccgaaaaattagttaggtctgagaagacgactagaatgagcatgcatcatgattgtcgcattattattgtctcttgtgcatcaacatgcttctctcaccttcattcanataataa

SEQ ID NO: 17841 - DNA, 788 bp, Arabidopsis thaliana landsberg
ttttaaaaatctgtgcagaatccctaaaactattggcatggcaataccgatgaaagcaaccttctttattacatatataatggttgatggttgggcaggagttgcaggagagattcttatgttgaaacctctcattatataccacctcaaaaacgcattcttggtgaaaacagagaaagacagagaggaagcaatgaacccgggaagcatcggtttcaacactggagagcctcagatacagctttacttccttcttggtcttgtctatgctcctgtgacaccaatgcttcttccttttatcttagtctttttcgctcttgcttatgtcgtataccgccatcaggtaaatgtagtttctttctcgcctaaatttgatgaaactggctagtttgataacttgaaccttctgtttatttgttttcttattctcagatcataaatgtgtataatcaagagtatgagagcgctgctgcgttttggccggatgttcatggacgggttataacggcattgatcatatctcagttgcttctgatgggtttgctaggtacaaaacatgccgcttcagctgctccgattgtcattgctcttcctgtgattactatcggttttcaccggttctgtaaaggtcgattcgaacctgcctttgctcgctaccccttacaggtcagcttcttgtacggtatctagattgattatttttgtttagctcgatttttggcactgtttggagtcgggtttacgagccccataaatggcaaaatgttgatttttttacaggaagcttt

SEQ ID NO: 17842 - DNA, 769 bp, Arabidopsis thaliana landsberg
atcttttgtggataaaatgcgatgtcttgctgcttgcagacacaagggctgtaatccattgctgcctaattggttgcaaatcttatcactgaagctggcgcagatcgagttcttgcatgtgatcttcattcaggacagtcgatgggttattttgacattccagtcgaccatgtgtactgccaggttcacctctaaagccacgttcttgatacccctctttatgcattgtgtgtatgctcctttgtgtataatacctttatctgcttaattgtttcagccggtgatacttgattatcttgctagcaagtcaattccctcagaggatttggtagtggtttctcctgatgttggtggagtagccagggcccgcgcttttgcaaagaaattatcagatgcaccacttgccattgtcgataaaaggcgttctggacacaatgttgctgaggtatccctttctttcagagtcagagtttgctcaccaacaccgcttgcttccccttaagttcacatttgttatactttcctttcaggtcatgaacctaattggtgatgtaagagggaaggtggcaataatggtggatgatatgattgatactgctggttagtaaaacgtcatggagttgtcattttaccgacaaaccaagtttcctatctctctctattccccatcaacttctccttttccaggctgaatcatctatgaaccattcttgtttcaggaaccattgtaaaaggagcagttttgttacaccaggaaggtgctcgggag

SEQ ID NO: 17843 - DNA, 344 bp, Arabidopsis thaliana landsberg
  unsure (1)..(344): unsure at all n locations
aaaactaaaagttaaatttaatataaaatttatttatttaaaaagaaaaaggatattttgaaaacacaaacctagggttgtggtgatgatgatcgatgaaacacaaattcgtcttcttcctccggaggcgactcgtactctaaaaccatcaaacaacgaatctgctaactgatcgtcaatttcactatcactctctttgccgtcgaagaatcctccggtacgtgaaagcgtttcggnnnnnnnnnnnnnnnnnnnnnnnnnnnnnnnagacataattcgaactcgattgatataagaagatgttgtcacgagagatcgaaagcacatcagtgatcagtcgcaaa

SEQ ID NO: 17844 - DNA, 729 bp, Arabidopsis thaliana landsberg
ataagaggaaccatgagaatggtgacatttgtccatgcatctagcaaattaattccaaatactcatgtgcatcttcatgtgtctcatattcttgcatttctaagacccctagttaagcaatatatgataagttacaattataatttattttactatattaattttgaatccacacaatgtgtgggacaccccctagtaaactattctagagtgctcaaagcggctcacgctaagttatataatacttatacctattctccagaatcctaaacctaggatctccgagaatcttctttaaggaatctttcttgttttcaaagccttattctttgagatgatatcttccatatcttctcgatgtatcttgtcttcgataccgcgccacgtcagcttccctccttggctctccacaaaattcgtctcagcttgccacgtctgctcttgcatccatgtcaacaactcaagcgtctgatgtgatttgatgtagcttcctgaatcccaacagcgtcctgatcgccatcagctggttgattggaatttgcatcttcaaaaaccataacacagcttccatccattctatacccccaacccttccttttcgccttctctccggcataattgatagcacatatattgtgcaacagtagcgctgaatctaatcaccatataatgagaattaatcttgtaaaccatagggagcgtacatacaacgatccacaaccagagtaa

SEQ ID NO: 17845 - DNA, 553 bp, Arabidopsis thaliana landsberg
tggtggttgtggtggtcgtggaagaaaagaaaaaagaaaagagaaaatgttcacacataagaattaagaagaggatataattgtatttattacatataatatacataatatcaccatatagtttttgaagtgttagtttccaaattattaaaaaattttaggttttacttgcaaatttcccttacgggtatagctagatatatccagtatttgatctgatctgaacggataaaaataaatttctatcatccgtattttgtttgaaagattaatatcagcaaatagtggctggtctttcgatactatattattattattcttcttattattgttaattaaacaaaaaaaaaagagagaactatcttattattaatatcagcaaatagtggctggtccataataatatagttcatctccaaatcgttttaattccttaaaaaaaagcatatgaactatcttattattgggtgttttaaatacgggtttaatgctggaaataagcagttacctgaaaatatgtattttctataaaaatactaacttacacgaatgc

SEQ ID NO: 17846 - DNA, 1381 bp, Arabidopsis thaliana landsberg
ctgattgagtcatggggcaaattcttctcccagataaaattgatttcaaaacgtatactcagaactctacgttcaaggactacgcgaaaaccggagtcgaatttgcgaaatataaccggagtagtctcggtggtggcaaaacggtaaataagtgggtggagcctggcaagttctttagagagtcgatgcttaaagaaggtacattgatttggatgcctgacattaaggataaaatgccgaaaaggtcgtttctacctcgtagcattgtctcgaaactaccgttttctacatcgaaaatcgcggaaatcaagcgtgttttccacgctaacgataactcgacgatggaagggataattactgatgcggtaagggaatgtgagagaccgccgacagtcagcgagactaaacgatgtgtcggatcagcggaggatatgatcgatttcgcgacatctgtgcttggtcgaagtgtggtactccggacgacagagagtgtagccggatcaaaggagaaagtcatgatcggtacagtcaatggaatcaacggtggagatgtaacaagagcagtttcgtgtcaccagagtttgtacccgtatttactgtattattgtcactcggttcctcgggtacgtgtttatgaaacggatctacttgacccgaagagtttagagaagattaaccatggtgttgccatctgtcacattgatacgtcagcttggagtccgagtcatggagcgtttttggctttaggttctggtccgggtcagattgaagtttgccattggatctttgagaatgatatgacgtggaatattattgattaaggtttaggtcatttttggaccttttgtggtacattttttcttttttagtttgagatttgcttcatcgggtttttttattttctgcaaaatatgtcactctctcccattttgttcatatataatatgtttgaagtttgatcaacttagtatgcgtttctttttctctctagttcctctgtttcttggtcgatttagtttcgttatggcggacgcactgctcaaagcaaaagacgaagtaataatctcacgttatctgaagcctatgatcgtcaacagagtatgatggcctgatctcttcatcgaagacgcagacgtgttcaacaagaatccatatgtgaagttccatgctgagatccctagcttcgtgatcgttaaaccacgaacagaggcttgtggtaaaaccgatggatgtgattcgggttgctggaggatcattggtgataagctgataaagtcggaggagactggtaagattatagggttcaaaaagatactccagttctgcctaaagtggaaacctacagaatacaggacaagttgggtaaaatagagtatggctt

SEQ ID NO: 17847 - DNA, 1252 bp, Arabidopsis thaliana landsberg
  unsure (1)..(1252): unsure at all n locations
tttctcttcttcgagatctgatcgccgaatctcataatctcccatcgaagcaggtattgttcttcgtttccgcttctcgtttctctctcgatgtattgttcatttttgttttccagttgattttcaagtctgacgtgcgtattttttccgatttgacgatggaagtagatttaagggactattgactgtatctatggtttttaattagatttcagctactctttaaccattttgttattggatcagcagcgatttcgttatagattctcaaaaatattctcagatgtgtgggatttgagtagagtttatgttgcgttggcatgatttgaatagtatgcaagatttttgagattttgaattcgttcatgtgtgtatgtgtgattgtagcttgatatgatttaacctgttagttaaatgtgcatagacaataagtaacatacgaagcgagtcactaagcataagagtcaacttgttttgctgaaaagatatcacttatgattttcgaatcattttagcttttttgtcacttgagcttaatgattcttctgaaattcgattctttgtttggtttatgtcacattctttagaattgagaatctaagaaaagcttacaggatatggtgaaactattcttttaagatagcatgatgcttcttttatgattctacagtggctaagtcattttttttttgttctattctttgtagcagaatggagacttttctattcacatctgagtctgtaaacgagggacacccagacaagctctgtgaccagatctctgatgcagtcctcgatgcctgccttgaacaagaccctgacagcaaagttgcttgtgagacatgcaccaagaccaacatggtcatggtctttggtgagatcactaccaaggctactgttgactacgagaagattgtccgtgacacctgtcgcgccattggatttgtctctgatgatgttggtcttgatgctgacaaatgcaaagtcctagtcaacattgagcaacagagcccagacattgctcaaggagttcacggtcacttcaccaaatgtcctgaagaaattggagccggtgaccaagggcacatgtttggttatgccactgatgaaacccctgagttaatgcccctgagccatgttcttgccaccaagctcggtgctcgcctaacagaagtcagaaagaatggtacttgcgcctggctaagacctgacggcataacccaagtcactgttgagtactacaantgacagg

SEQ ID NO: 17848 - DNA, 345 bp, Arabidopsis thaliana landsberg
  unsure (1)..(345): unsure at all n locations
tccgtatacatatgatgcatgattgcataaccgcttctcacgtgtcacagagtcctaagaccatcttaactatattctatttgtggctttaattacaagatatcgatgcagatttctgagagaggaatggcactatctaaatcaagatgctccattggatttaccaatttcagcaaaagtatggtgagacctttccaatatgatcaacgaagctgaagtgtaggctagtctttatacctcaagttgcaaatcataatgtttgacgacaaattatagatttctcctacaatattcatcaccttttcaggttccacaacannnnnnnnnnnnnnnnnnnnnnnnntt

SEQ ID NO: 17849 - DNA, 433 bp, Arabidopsis thaliana landsberg
  unsure (1)..(433): unsure at all n locations
aaagacactnatnggngtcttttgagcaacgagtatcccttataaacgctaactggaggatcataaacctgccattgaaaacttctgttattattatcccatctaagaaaagtatttatattagcaagagattgtgttaaggttaagatgaattcaccgaagatccaacttgagcttgacaatcgatcaaatccttataaattccaacaatgtcaccctttcgaacaacgaataaggcgtctttctctttatccgaatccgaaacagaaacagagctttttgacatctttgatctagcagtctttgatcttgaggaatagcaatgaacactagatacactcacacttgcaggctntaaactagattttaaagatgtatagaagcactgattccatggattgtgggaagtgacatagcttgacatcttaaacag

SEQ ID NO: 17850 - DNA, 1382 bp, Arabidopsis thaliana landsberg
aacactaaaaaactcttgaaatcgttttaaaaccttttataaaattttacaactcatatgagttttaaaatggttcaaaaattattaaagagtttacaaagatttttaaaagatctggtttacaaaggcttttaaaagattttaaaaaatttacaagagttttaaaacttttaaaaaactcttgtaaagttttataaaaccttttgtaagggttcacaagagttttaaaatatttttaatttttgttaaaatttaaatcagaatgttgcacaagactcactagccatatacgacaactaagttgcattttttgcgaaataataaatcatgcatgtcaactctttctatgtcaacatttcttcacttctcatgttagttagtggttccatactattgtagcctatattttttagttattagtagtttcgttgtgataaaactacaccacttggatattatatcacgtatactaacaaaaaacttgcttattgttcactacaaacatattttaaattattctttgcatcttagtcatgttctcacgttttctagcaacttgggaaagtcttttcttgaaatgtcgaaaaatagttgtgttctccactgcttatatcatcatagatattgttcagaacttagggagttagggcagtgcaagtcttttgcctcggcactaagagaatatggagaatccccatgtacttttgttgctaccacttatatcatctttatctattaatattccctttgttcaagctcaagctcaagttaacgatggtacctattttggttttatctatttcagtttgaaattatttgatttttccttcgtttttatgcctgaaaatagttagaaaatcgtacctaccgatgtcgaagtcatataattgatttagtcactagctcaatgggttggaccaactggaccgtgcctggatcgcttgttaatcatcaatcttcctaattcagttcttgatatcgtaaaaacaaaacatcgttgttaacacattgtttgctaatttgtatcatttttcaaaactatagtctattcaaacaccattgacatcttaaaatcaacagggttaataagtctccaaattccagttctcgaaattccaataaaattcgttgttcttgctgctgctattgtgatcattctcgtggtattggttctcatttgtgtgtgcagaaagaaaaaagcaccaagtcatgtctaaggtagttgaagagacactcatcaacaaaattatacgttaagtgttttgtttttatactaacaatttctttttacagatatacccccttcaccagtttcatctactactagtaaatttgaagactcgataaagacaaaaaggaaaaagtttactttttcgaggtta

SEQ ID NO: 17851 - DNA, 1944 bp, Arabidopsis thaliana landsberg
caaaaaaaggtcacaaccggtttctttgtgcggatgaagaacacactcttgcgtagacggttagtgtctggctatgatccttgtacggagagttatgcagagaagtattttaaccgtcccgatgttcagagagccatgcacgctaatgttactggaattcgctataaatggacagcttgcaggtaaacagttcgcttcaccacctaatgatgactatgtaatgacactttgcatataactgatcctgaaagaaatggtttcttgtttgggttgaggcagtgatgttctgatcaagacctggaaagattcggacaagaccatgttgcccatatacaaggaacttgcagcgtccggtttgaggatctggattttcaggtaaactatggtccaatgtaactcgggatcatagacataggcggattcctaaccgtggatcaacatataaaccacagagccaaatcaggatcgaacctaaaccctaaaataatcaaatatagactaaatcagggtctagcttaatatggccaattattctttaggcttgtaatgaacctagcaaaactcaagactcactattttgggatttggctactaaccaaactgtggtttacactatcatatgcagcggtgatacagactcggtggttccagtgaccgcgacacggttttccctcagccatcttaatctcccggtgaaaactcgttggtatccttggtacactgataaccaggtacgatatacatacacatactgcatatatatatgtacatggatatgtattatgtaaaaggtattgatgtttacctgtggtcacaggtgggaggatggacagaggtttacaagggactgacctttgcaacggtacgaggggcaggccacgaggtgcctttatttgaaccaaagcgtgctctcattcttttcagatcattcttggccgggaaggaactcccaagatcttattagctactttaataacctaaacatagagtaagagaaaatgtcccgaaggacaatttggctaccagattaggaacctattccgagtaaactcggtattcttctacttttttttctgttaaaagctcgattcatttccacaatttggaaactacaaaactatttgggagagcatttgagtaattgttgataatcaaaagaagacaaaggttcaaatatctctctctgattcagtagaacagagctctatttctctctgcctgatcgatatacaacaaaaagaactggacttctcatacctataagttgaaagaaatcacaaaaaaaattaagttttgttactttaatccatcaaggcctggtggcatccctaagctctgcgcaagatcactcattctttctttcatagcctgtgaaattcaaaaggttctataagcaagagatgaaagaaaatgaacacttatagttgtatcgtaaaatatagtatgcgaagtctttaccagtacactctttgaatgtgcgtctttgtatgcttctgtgaccagcagtgaaagtttctgccaaaggaaaacaagaaacatgagaagctgaacatagctttgatcattcctatgtagaagcaagtgcaagagaaagtaaaggtgaaggttactcacttcagaacctaactccattgctgcatcagtgatatcagtgcgaattggttgctggttacctgataatgtaacctgatacacaagttcaaagcttttggtcacttaactagtaagagatagaaaaacaaactaaaaatagcatcattgtgtaaattatccacagtagtattgaatcagacagcacatgtctcacatccatgaaacatgatcccgagtcagtaatctaataataccttgacaagctcgccttgacaataaccatcaaattcagcactgaaaaaaagagaatcaaaacattgatgaatgaaactcataaagatagaataaact

SEQ ID NO: 17852 - DNA, 835 bp, Arabidopsis thaliana landsberg
aatacccttcactttattgtgctattttcataattgatcatacttttctgacccattttgtggttgtgtgtcaattacactcttacttcattactttttttttcttttttttctttctaataactgccttttattaaaattaggatacccacaaatttgggattgggctttggtttacaatgaaaaacaaagataaaggcaaatcagaaaaaaatttatcggaaaagaggatcttgccctggtgacaccgtggcgcagagagtccgaccattggcaccggcggatgcaagaaccacagctttgcagcggatcgaagtatctagtaaacagagatgaagcatccgactcccgattctgttccttttcccttgatcaactgttcccaccacagatctcttggtatggtcaaccctccgacatcacgacacgccgttgtcagctcccgaacctagcaagtcgagaatctcaagcataacccctccttttcaatccggcgaatctttgatttacctaacaaaaaaccttcaattcggccaggaggaagcagatcacggtggtgtcagaggtcgatggctcaatcggaaacccaaacacattgaatccgctataggcaacaagatccaggaggatccatcattaaccatcatggcgattcggcaccacccaccttctccacatcgacttccgccgtagttgcagagaccgatacgacggctgaaccacgagaagaatccgttacaccagccgacgtccacaaccaaaagaaacagtaatgaatctctacttccaacatgttggatccgcaaccacatcgaaagggacaaaatcacaccac

SEQ ID NO: 17853 - DNA, 1242 bp, Arabidopsis thaliana landsberg
  unsure (1)..(1242): unsure at all n locations
gtagtattcaaaatatataattagttagtgggaataagcaagcaacaaacatatccttgcaattgattgctaaaaatcttgagtagacccatatagagaatagaatcgtgttacacttttcctttggtgtttcatcaccaatttccatttcatctttatatcaatgtccaaagacagtataccactaagtgtccccatgctaatcacatcattatcgataatcactattagactcttaataattatttacgttatcagcttactgtataattgagactatcacaagaaaagtgtaaagtgacaaaaagtaacaagattagaaaatggtaaatgaaagggaacaatatctacaaagaaaataaaagcttgaaaatcctaagaactatttccataattgtcttcaattgcggcaatgacggccccatggaaatacccgagaacttgaccccgatgcgatccgggtcttgacccgttcgaaatctgaatacagacaaggaatagtgatacctccttcgtggcaaaatccgtactctttttcggcttctcgaagcagctcaccgaacaaaggatggttaaagtaaacgatgggtaccaaaactctatgacagtcgccgtctttttgacccacgtagatagctaagtgtccccttggaaccgggtcggctttcttatgatcaacgggtatgtatgcggatcttctcgtagacctgcgtctgaaactttgcttgagacgttggccccaacttttgagtttggctaatggtctcatcagcatgcaagcttgctgggtcgagtgtatccggttgtatcctgaacgttggatccgggttttgcgaaagatccatcttgagactcgtctcccgattctaaaccctatgatcttcctcatcttcttatagctaactttaaaaaacagtttttgtcacaaaactacactttttgagagatctgagaggaaatagagattaagagagtgagacgagacatggactaacgagtcaaataaagagtgattcatttgaacgagaataaataaatatatcaatcttttttacattttcttgattttctctataagaaagaaaaaaaaaaagacaatttctagggaaaacacaaattcgaaaatgatgtgaacggacaaagaagaaatgcttccgatgtatataaagtntacacgttaaagaagaagagatcaagagaagaatgagtgaaagacaagaggtctttaaaggaattatatgg

SEQ ID NO: 17854 - DNA, 583 bp, Arabidopsis thaliana landsberg
cttcgtgaacttgcacaaacgatttctgactggatatatttctgtggggaccaagaccgccacgatcggagtttctgaactgtgaagcactttcactcctcaccgttgcacgactagtgttccaatgaacccacatctgatcctaaagtttaccacgaatccaaagagattgtacaccactccgcttagcttgactaacaatgcccttcatccatttctgggatatcacttcgaacccctctctaacagcctcagtaagctcatgatcccaatagaacatcagctacatagtacaaattaaagagataagttagcacggatacttagtaaatgagtaacaataaaaatttgaaagataaattgaaaatattactgcaaaactccttaaatatctctctcggatgttaacatgagtaactttccaactgaagtatgaaccatcaaattttctcctaaatactctagcaatcgctgagataagttacctttatgcatgttaaacctgttaaaaaaacagagaactagtctctataaagagtcaaacttttgcaatgcacaatcacaaatacaagaaaaatatgca

SEQ ID NO: 17855 - DNA, 1918 bp, Arabidopsis thaliana landsberg
gaccccgcatacggactaaaattatgtatttgcacttcacacaatcacaatataaagacatgcaagtacataaagaagtaaacacacacacccacaccaacatgaaaatcatttactatgtgcaaatacaaattctttttgttaaagccacgtcaacatgcaaaatccctatgtaaaaaaaaaaaaaacatgcaaaaccatttactacaattatggggcaataatacattgctacataatcgtttatatgtgttcgggtggtctttcgggtttgtttgacaacgtggatgcgagtgccgagggcgaggggtatcagatctagaaaaatagtttcaaaagacacattatttatatttatattatgaacatttagacgaatctctacaaaacaaaatagggtttcgtgtcacttaaattttaatattcacatcatctataatagatgtaaatgaattttacattatgcacgtggtggcaaatggtatccatcagttgaaaaaactattttcatgattattattttttagttattactttttaaaaataaatatttgcaggattattatatcaatgttatcatcagataaaaacgatgatgctaattttatattagttaatataaataatgttagtatttgctacgtttatggtaactgtatatattaattgtgaataactgatgttaagtacagtaaagcttctataaattaataatggtaggaccgagaaaatttattaatctcgaaaaatattaatttatcgataaattaataattataaatctatagagagattttcaaattttgtaatttcttacaaatatttgatctaaaaagtagtttttctttataattaatcatttttttatatcaattacaagtaaaaataattattaagtttaaaaacaaaacaaactttttcagcgtactaaaaatattagaaataaactctacaaagaattaacacaagttgaagaaaacagtactagagtcatattttactaaatgttttatatgtatatatatgtataatggtaactttatacaattattaatttataatattgatgggaccatatatttatataggattttcgaaaaacattattatcttattaatttatcgatttgtatcaatttttacactggtcccaactcgggaccggaagaatttattaatttatagaggttattaatttatagaatattaatttatggaggttatactgtagtattaacaaatcatcaaatacgatttcacacaaaattttgaaaaaaagacaaaattaataatctaacaacacaagattataattgcatttccaatacacaaatcaacaactcttcattctcaacaaccattcaatatctaaatcaaaattttctacaaaacccatagaaaagcaatcactttttccaccacaataaaatcgaaaacaaacattttgtatgtatatgtaaaagttaatgcaaacattaatttaaaactatatggaaagctccattaatttatttttaatctcccaactaattcactacaccaattttgtatgagagtaggcgacgaaaccacaagtacctatatcagagaatcagagaccaacgtcacttatttacacacttctgttttcttttttttggttgcttcttctctgatctttctttcattttttttttttgaaagaatcaatttccctctcaaatcagaaatctaaaaatgggaacaacgatcttggttctctccaagatcctaactttcttactaacaacaatgctgattggatccagtgtgatccagtgtagtagtgtaacctacgataagaaagctatcgtcatcaatggccaccgtagaatcctcctctgtggttctattcactacccaagaagcactcctgaggtaagaaaaatcgaatctttat

SEQ ID NO: 17856 - DNA, 2119 bp, Arabidopsis thaliana landsberg
ggacataccctagtactacatatgacaaacattcattatcaacatagcacatgtctcagacaataactaatctggcttttatttgtttattattcaatgatttagactttaaagaacatcacaaaaacaaagatgcgaagaggtaatagtcataggttttagatggagacttttagattatccagtgataaactcagctttctcataaccatctccattctctctgggatacaaaatgccaaattgtattcaaataacaataaaaattcaacctaactgaaaatattatgtgtccataaccaaatttcacaaccgattagattaaaaacattaccactacgtgatttgattattattattattatttttgtgttaaaatatatatatattatatatttttttaaaagctctataaattaataaaagaattaattaatttaaaaatattagagtctgacattattaatttacatagattttactgtattagatgatttggttaaaatgaaaacagtggggaaatatagatcatatcaaattaagattgcaaaaactctctttatctaaagaacaaaaattaagattgcaagattcttaaataatgcataaagaaagcaactcataatgaaaatgtacatgtaaagagataaggcttcaaaatggggtttaacgatcaatcttcactttgctaaacaaagccttttgaaactctctatgcagtccagagaacaaaagtatggatctgaggttccaatcttctttaagataatagggggaatgcaatgcgacttacagtgcctgcaaattgggcgagaaatactattattgagcaccacttcatatgatatgttccatagctctattgtgctttttggtatgagccccataaagtctccaagcacacaccatgtatgcaaacttgcccgatgatctttacatgtgtagaaccatgtgtttggattggtttccttttcacaaatgtcacaccaatattttccacttgccttttcaccatagcatagagaaagaggttggtcttcaattctatgctttaccacttgtggaaaagtggcgcaaccaaaatccaagataaacccacaattgtcttcaatgcatctaagcacatgatagctcctctcgttacagccactgcatacttcatcatcctcaggtgaaatgcaatataacggatgatgaggatgacttggatggataaatggctcagaaaatgaaccacaaaggacatctaattttgtatcctcatgctcgtatctaaaaccattgaaaattttgtgacaagcactacacccgaaaatattaacctcgctagtgactaaagcaagccgttcattgtgtagcacatgccatttccttctaggaaatccagcgcaattttggtggaggatgaaatcgcaatccatacagccatagaaggattgaggagagatgggatggttgcatgcattgcaccgcttgttcacctcacacataaggccattaacattgagcctcatgtaatgctctttgtggctgaaatgttgtattgtgttgtcatctattaccacatatggctctatatcttctatttcttcaggtactccttcaagttccttcccattccacacatcttctctagtagcacattttgaatgagcgatatagtcggggcaccgttgacaagaaaaacccccacaagtccagtccaccttttgacgacatactccacagacagagttcacaataccaagaacagaagttctagaaatacgatgatcatgccgattgatgtttatgaggcgtggaaggccaagacaatcttgatggatcatgaaaccacattgaaaacatacgtaagggcttcgatctcccttcagcccgcaagcattacatgtaaaagaatcgagtcttgggagaagagtgagttggtgatcatgagctttcaagttcagtagagacggttgtggtggttttaaaatacaacacaaccccaaggtgaagttacaagaagaacaatgataaaacaacctatcatcaatcttagttccacaaagacgacattttccatcagaataatccggaaatctagcagttaagggcttaagagggtgtaaggcatggt

SEQ ID NO: 17857 - DNA, 1311 bp, Arabidopsis thaliana landsberg
  unsure (1)..(1311): unsure at all n locations
ttattacaagtagatgaactttttgtaatttaattttctttttagttcccaaacacacattttaattgccaagggaataaacattttcccaagaaatatagaaagacatcgaatatgaactttttgtgatttaattatctttttagttcctaaacacacattttaattcccaaaaaaaacatcttcccaagaaatatagaaagacatcgaatacaaactttgaccagaatataaattcagaaaaataaaacgacgtttgagcactctcttattttccattatatatacggaaataaccttgtcggtagaaaatatctcacccccaccccaaccttccacaatatcaattgcttttgcaccgttttctctctaattatttactctgtttttgtcgctctcggtgtttctgtccacaaaaaaaaaaaaatcctgaaattttcaagatatggaaaagatcaattctgatgacttgctggtgaagattttatcatttcttccaacaaaagttgctgtgaccactagcattttgtctaaacgatgggagtctctttggaagtgggtgcctaaacttgagtgcgattgtactgagcctgcacttcgggattttattctcaagaatctgccgttacaagctcggatcatagaaagcttgtacctcannnnnnnnnnnnnnnnnnnnnngtttcaggatatcaaactctggggtggaattgcaatttctcactgcttgcgtgagctacgtatcgactttttttctcactatgccaatccatatgttatattgcccagaagcttgtatacctgcaaatctctggtgaccttgaaactcctaggcttgggtattcgtgtggatgttcctcgagatgtttgtctcccttctttaaaaactttgctacttcaatgtgtggcatactcagaagaagatcctcttcgactgcttctttcctgttgccctgttcttgaagatctggttattgaactagatgatgcaaaccaaaatgtgaaagcgctagttgttattgtcccaactttgcagtgtctatccttgaagatacctgcttcatgttctgatgaacggtatttgattgttaccccttctttgaagtatttcaaagttgaggatgacagagaaattttcaatgctttgattgagaatatgccagagctggaagaagcggatatctatgttacgcaacatattgagacgcttctcgaatcagttacatctgtcaaacgacttacactacngccattgtacaacagcatagatgaggtaatttgtttctgtctatcaactntaagctctcaatc

SEQ ID NO: 17858 - DNA, 593 bp, Arabidopsis thaliana landsberg
gatgcatgtcccgatgcgcggcatgccgccgctcggcgtgctggagaacacgccggaggtgcacaacctggtggtctgcacgctgtgcagttgctacccgcgcgccgtgctcggctacccgccattctggtacaaatccgccgcctaccgcgcccgcgcggtgcgcaacccgcgcggcatgctgaaggaatggggcaccgacatccccgactcggtcaagctccgcgtcgtcgacagcaccgccgattaccgctggatggtgctgccgatgcgccccgccggcaccgaaggctgggatgtcgaacggctcgccggcctgctgcacgaaggcgacatgatcggggtcaccatcccgaccgcctgaccctaccggcgaaggatccccgcgcatgcttcgcctcgtcctgctcctggccctgctgctgcccgccgcctcccgcgccgcctcgctgccggcgcaggaggccgcgcacggcatggtggtcagcgcgcaacacctggccaccgaagccggcgtggccatgctcaaggccggcggcaatgcggtggatgccgcggtcgcggtcggctatgcgctggccgtggtccacccg

SEQ ID NO: 17859 - DNA, 2296 bp, Arabidopsis thaliana landsberg
gacctgctgcgcagatgacagcaaaggtagacatattgttggatcgatgtgcccatcgatatgctttccttcggaatcccaactgccactctcgatcagaggatagagaaaatcaaagagaaacccaacggccaagcttttcttatactcagaatatgaggtatctatgctgggaactatgatccctttaagtaacctcacagcttcatataaaacactgtggctgagtattttacccgtcaagaaatcctcaacttccctcgccctgatggaatgatacccaccataagaaccaaatgccaaccggcatttatccacaatgatgccgcttgatgatgcatcgtgagagactactgctaagaaagcagcgttgatataaggcaatgcacttccaatagggcgaagtgcagcccgataggtttcgaaaagcaaaccagtagtggaagaagcaatccacctaggaatatgaacctttaaaagaacagttttagtgtctaatattggaggcgacacaagatactctcccatcctaagcttctcgtgtctcccagcatttatcatatgcacagatgcatctgcagcgagcaaaagtgtggttatgtcagaaggaaaacttttgctctgtgccatcactagattaccaccgatactccctgagtttctgataaaatggttagccaccttctccatatggacaccgattttcttgaaaacataagcagatgtattttcctccatcaaagcatcaataactttagatatggtaacaactgctccaatttcaatttctctgtcatctttcttgatcattgacatctctggaatgtggctaatatcaatatatctaccatattgtttctcttctttgtagtaacctgttcccgtgttgccaacaactaattttatcaaacctctatctttgccagggttggttgttgccaatatttcctgaagctctgcgacgctaccaggagtgctccaatgatacctcgtctgatccaaaacattgtgttgacacttaatcttttccttcaagaaatccggaaaagtgataagatctttctcagggttgtaaggaggcaatttctttaacatctcttctctgctttctcctttcctccaaaaagagttgaagcccaaatcctctatatcgacatcagaagcaaaactcttacaagcatcgacaatgggacgataaccagtacatcgacaaagattacccgaaacagatttctcagcttcagaaaccgtaaaatctttagagctgttattctcagcatttgcaagagatgagtagagagaaatacacatccctggtgtacaaaacccgcattgagaggcgtgaaaacccgcgaaccgcttatgaatcggatgaaatcctttcttcgtgtttccaagaccttcagatgtagtaatggaacatccatttacactacagagaagagtgagacaagagtttatacaacattccttcacttgatctaactctggatcatatttagataacactacaagacaagcaccacaccctcctgcactaaccaaatacacacacattttcaatcaaacattaaaaatctatctcaatacacagaactcagatttggattctaaatttaagtcaacttcactaattcttctggtaagaagtaagacataacacaaggcttcaacaacacatatagattgtttccggacataaaggaatctcttttataacagttggtgagaaataaaattaaaactaaaacataaaaacagagaagagagatagagattttgccttcgccacagccgagcttgacactcttgaaaggagtgttcaatcgcaagaactcaagtaaggtcgttgatggatcaacagaatcaatcttgaatctttccccattaactgcaaactccaaatccatttttttcccagagcagtgacaccagaatttttccaattataaggttagatttttgagaaaccgaggaaacgaatcaagaaaacacgaagtgggtgtggagatttaaccaattaaagagagaaataagtttgagggagatgtgatgaagagtttcatatcagcttctcttatagttgcgcctctttcacgcacatctataagtttgagtttcagacataactcataagtcataagtcattgactgtgcgccacgagtcagtcttatgggaaaagaatatttgactttggaagaaatctcaacctgatccaatcaaaatcttactaaattgaaatgaaatgtttttttttttttttaatttgaatttattgctaaacaaataaatttt

SEQ ID NO: 17860 - DNA, 3743 bp, Arabidopsis thaliana landsberg
cacatctcaaaacaatgaagctttaaaggcaaagaaaagcaaagttagttaccttgtcgactaaatgattagcttccttatacacaagtgacacttggactaaccagtctcttgtaaaaatgctttgatataaacgtatcaagaagaacagaggatgagcattgctgatcccaaaatccaccaccaattctgaatccaaatctaactccacttgtcggaagcccttatctcaagcaataagcaacccataactaatgtcgagttaaccattatggaactctaaaaaaaaaatttcatttactaaaatctttgtggttaccaatcattatccaaatataaccaagtttgaaatccattttttctctactatataaacaccaactaccacttgttcataatcccacagagccaaattccgatacaatcaaataatataaataccataaattgaacttctaattggggttccttctacaaatttatttatttgatttattggaaaaaataataataatatcgggatgtcaaaaagtatcaaggttattgtatctcttgctctcatactatttttggcccttgcagcaaccaaggttgaagccacaagatacataagttatcgtggtatgaatcatggagatcatgctatacattgtgacaaagcccaccctaacacctgcaagaagcaagtagcaaatccttacaggagaggatgcggaacaatcgaacgttgccgtcgtgatacaggtagaaaatgaatcaaccaacccacccaagagcataaaatattacatcaacacctttggttaagaatgtgttaacatgtttctcattggaataccttcgttatctgtatacacacttcacatcctcatattcatttgtttttggctttgtaattgattgtaattatattatgttatgatcaatcatatttaaatatattatatccaacatctcgagcttttgtctctttctcatatgcatttgagcaattatcatacttcttgccacaataatatacaaagaactatgggaatatacaacaattatatattgatccctaggatgggattcaaaacagtatacccaatttgagacacaatatatcgagcttttgtctctttcttatatacattgaattccatctcttctttggaagttagcaagttagaagattcacatttggaagcaactctcctccttctcttcttatgaaatatcaatcttaaatcattttgttaccggtgacaaggtaaagcgttttcctttctttgttatttacatttgattaaagctccatatgagctatctcattttcaatcttatatttctctttcaataaactcaatgaacacaattctcatttctttagaaatgtcaacatcatgctctagattctcatacaaaattaaaaaagtcttagtaaaacatattgaaaattgtggaaacggctgcatatagacgttgtctatgactatgatatcaatcaattgtattcattttactagaatttgtgcaaaaaaaccaaaaccattaaatgttttaatatgttatttactgataacatattttaaagtgtaattataagaataaatggcctaaaaaggaagcaaacaatcgtataacttaattatttgagactgaactttagaaatacaccaataatatattcaattttggagaatttaatactaacaaaaaaaaaaattgatattccttttttccgtaaaaattccaatttttgtgtatgaattggtccgaatatctaacaaattaacgtggaaataagctcccacatttttagttcgtctaagttgtaaatatcatatgatgataaaaaaacaaaacaaaaagtagaaatatgccctagttcctcctcatgttatatatataactgcctccaactccgaagaggcgccgcaagaagaaatatagccttagttcctcctcatgttataaccatacgatgtcatcgctttcttcgttgcccgacgatgttgttttgaaatgcttagtccgcgtcccgagacgctattatcaaaacatctcttgcgtctccaaaaggctcaggtccctagtgcgctcgcctgagctccaccgattgcgatctctcttccacaagaattccatctatctctactgcctcgagacgatgaagtttaactggttcactctctctcggagtgagaagaagactgcgattgagtatcaattagtccgctaattacattcccttcttcccactcaatgttatcttctaccaacgtggtggtgggatcaaagatctattccattattggcagatccgcaaaaccttgctcagatttatggatcctcgatactcgaactggaaagctaaccaatggaccaagcatgaaggttcccttcccgcgtgaagcagctgtttaattggtcgaagggaagatatacgtgacgggactaggtcaaggagagaaccaaattcaagtgtttgatcccgaatcgcaaaaatggacattcgcgtcggaggagaaagtgcgatcgctggaggagaaagttttataatggataatgagagtagacgctatttctataatgtgagagaaggtaggttaaaggggactatgtggatggaaagtgatagaataagctctctgtgtgttgtagacggtgtgctctatggttattttaggtggggtaattaccgtgaattaatgtgggctgatacaaagctcaatgcatggagaagattgaacactcgtgatgggaagacacttgaagaagacgtatcttataccattgcaatgccgggatacaatgggaagctagcggttttttggtcagtgaatgagtctgattacacgaagaagaacaatgaggttatgtttaaattgatcgtgttggatagggttggggatgtgatttgtgggacggtcgagtggtctggtgttgtaggcacagttaaagcatttgattttctgcgttgcttagttgtttctcactgattagctcatatgattttatgtgccgttcccttcttcttaccccaacataactttttatttttattttttttgaacaaactattcaatgcaatgtctttatcatattcatggaacgaaattagaatcctggtttaagatgttagggattctgatgatgctaacttaaattgtttgtcgttgtggaatcttccttagcttaaaatggtcttattcctaaactccatttaataacaaaaacgtcgatggaatgatgctgctgtatatatacttagatatgacattgctgaaaatgaacaattcttgggtttactttagggctgaacatttgtattcacactttttagtttaacctaatcattatgtcatgtcatacaatcagctttaaaaaatgcattaggcgataagggggcgatagattcaatgtttagcgcctaaaccgatagacacctaaagcatttataatatataatactataaataatgatattatgcataaatattataaaagtatatataaaccgcctagaacacttattagaacattgcatacaacaaataattaaatagaaattaaaaattaaacaaacaaataaaatatattgagaacataactccttaacaaaatgattaattaatcctatgttctcctttcaattgaccaaatcgaaatttactatataatctagttaaaacaattagtagtattatctataaaaaaaaaaaaattcactaaaacctcataaattgaattagttggaa

SEQ ID NO: 17861 - DNA, 268 bp, Arabidopsis thaliana landsberg
cacccgaaccgcagggggggcttttttaactcgctgcctgttttcatcctgatcaggttgaaagagtcccccaactgttcgacgaattccctcataggtataataattatcactcctgattaaatctcttacggcttgttgattaagtcgtattgtgactctggtaagcctgcaaaagctatggagattatgagagatctggaggccaaaggtgtggtagctactatcattgctttcactaccattttaggatcttcgtataagaatg

SEQ ID NO: 17862 - DNA, 409 bp, Arabidopsis thaliana landsberg
  unsure (1)..(409): unsure at all n locations
attgaaaaaaccatttttagctaagatcaccagcctcngttcaagctctcatactanatctctaggatttcttttttcttttccatagcaaagatctcccccgtctgagcctcaatgcgcttattggctgcttcctgatccttcttcatctcaattgtctcctcttttatcatgtcaaactcgtcacacaatgcaacagtccaccatctcttgaaaccgcagcctcgaccgagacccttaaaaataagaggttgattcctagggatacaaaaataaaagaaataaaataaagaatcataactcaacaaaagatgcttacatctgatatttcatacggacaactgaaataaagttttctgcttgtaataggatcccgagaagtggcaacgacaaccttagcattgcaatc

SEQ ID NO: 17863 - DNA, 363 bp, Arabidopsis thaliana landsberg
actagacctaaagttacgagagatggttttgaaaccattgcaggttggtacgacattcattacctgatctttgttgggcaatcagacgagtctagatggaacttatagaatcctattagataaatgaaaacatttaatgattcaaaacctcaataaaagataagctcgcatgttgctgaagctcgggaagaacgtgtcaactccgttatcatctcgagttttgtaaacaaacgtgtatcagaatcgattgttgcagtccttaagcgacaagcgtttttcaagatgtaaaccgcaatatctctgtcttttggtcttcctaaatattctgtccaggtgaacttttgtagactcgacatcatgcat

SEQ ID NO: 17864 - DNA, 1177 bp, Arabidopsis thaliana landsberg
aaaaataaattatcttcattgctttaaaaagcttaaccattattctatttacatagttaagcacatttgtacacaacttggtgatgttcacactatagcgagcatagaataaaataaaaatacattcttcgatttaatagtagactttacttgatccattcaggtcttatcaatgaaaacaaagactacagagagcttgttggtacataataattagcgtagatgaagggtaatattccaaataaacatgatcttcaagaattatttcaataaatcaatttcataagagattacataccatttttttttaccatgttcactagaagtctagaatccaaaaaatagacttgcgcgaaagaagagtctctaatcagtaaccacaccatatagttacttagcatataaacggagcattcacaaagcggtcattgcaatacaatcctggtctctgaataaacatctgtttcttcagaatctctcttgccctcaataccatttccttgtttgtaatcttatctttatgatcagtctctgacaaaaccatttggatggcattactaaacgctccaaacgcttctcctttcttcttaacatctgctgatgtctcatctgtttgacatccactcaacagaatccctcggtcaggaaacaatccgttgcttgatcttcctccataaatctcacgatcgctcttcacatgtgcctgcattgcgggtttcatgtagtgttcatcgttcagcgtctcttctatataccctcgagcactttcttcgatcttaccaagtagcgtactttggtcatttgttttccttagcttggtaagaatcactttcatgaacttctttatcttcgggctcgaatcttcaccaaagacatcaaaaagggtgggtctgattttcccaatctcgatattgtcttgcccagtttgttgtttgagaagttcaataaacctctccaacggcagataccttgatctgacaacttcatctccctcgcctacttctacgatctcgcgcgtctctacatgagaacttccgattccacaaaaagcaagcagtttcacaaaaatgctatgcaaacacgtttttaactcgaattcaaaagaagaaactttggattctcgatttggcttcgtcgtggtactctcgccgatctgttccttagctttatcaatgag

SEQ ID NO: 17865 - DNA, 1146 bp, Arabidopsis thaliana landsberg
tcgacattcagaaggtaaggagcatttgatagaaccttagagatttgtatcttcaacaaaagttttgtagatgaaatgaagagtcaggaaccatttcaataaatggcaagacgtaatttacaaagaagaaggtttagagctttaaaaagtatatcatttaccagggaattcatagctccagccttcttatggtgatcaaatccgggtctcttctcacgagaaacgtaaactaatcgaggcaactcgttgttttcgacatcacgaacaccgtcacttccaaggaagacctttaacaagaaaacaaagtataattaaattttgaaggacaacacataagaaggcttttcagaaataagaagcatttgaaactcacctgaatcatgccaggatgatctcgcacactattaccaggccaaggtgtaccgtcttgcatagtccaaccatcctcaggcactttctgtgctgttgctactaaagcattgatctttactttgaattcttcataatctctctgtcaaaatcagtaaaaacacacaaccttataaatcaattttcaaagtcaccatcttctttcataagagcccatataacaaaaggttgataacttttctcatgaaaaataaatttctaaagcaagaatcaattagaccaaaacttttctcatcaaatcaaatttataaaaaaagtaagaactagtaaccttcatggctcgtcgctccctgacaaatgcgggatgaactttattcttcaagtagtccattttatggcagaaataccattcgggagcacgaggctcaatacaatatttcttgcagaaaggaacccatttccttgcgaattccgcggtctcagaaagagcttcgaaagtaagcatagcagcaccatcatcagatacgtaacaagcaaccttatcgacaggataatcaacagcaagaatagacaagacagtatttgcagtaataagcggaggctctttcaacggatccactgtactaacaaatacatccacaggggatagtcccgacggtttcccttctttctcatatctgcaaacaaaaaaataaggattatatttatatccccaaaacaaagttttaacatttccaaatctaataacccacaagatataagtaccttaatgagagt

SEQ ID NO: 17866 - DNA, 730 bp, Arabidopsis thaliana landsberg
  unsure (1)..(730): unsure at all n locations
gcccaatcacctatggttacgtttacatcacaagcccagcttggttcttctcgtgttgactttcctctttgtcgatggcttcttttcacgacaacttcgtcttctcccatgcgtattcttcttttgcttgagcttcttctttttactatgttctcattgaagcattctctcttgcatatttaatcaagaactcaatctcaacaaaaatacaccgtccaatttattttgaccaatattcacttgtgtatggagtatggacattatcataattatataatggatccatatccagcgatgacacattaatggtaaacaaatgcaacattgtccattgatgtgtgtccaagatgtgcaatctatatggttgtttataccaacacataagttatacatatatagaacaagatgatgaataagtcataacgctctctcagtcgccaccaacaactcgatcgcctccaccaaccaacagacacttcatcaccatataaaagacaaccgtcgcaagaaaccataacaaatccgttggagaaacaactaagaagagacatcgaataaagtaatgacttttagatctagacccaaatctcctgtcgcgaatcactggctgtttcttccgtcgttgaatgtactcgctttcgtcatttacacacctgccgtttttgtactccancagtgccaaaacttgactaatgaagcgagtacattcaattagccgaaactgaatctc

SEQ ID NO: 17867 - DNA, 494 bp, Arabidopsis thaliana landsberg
tacgaccattaaatgcccaagagaaagtctatagagaggaactttatagtagcttgggcgtatatccaaaacacacatatacaagagatgataatttatagtggtagagacaaattagcgctcttgtcaaacaacagacgagatgaatattctgttatggtctctatatcagacacgaattcccaaaaaaatattaaccatcgaaatttgggcttagtttcggcattcaaagtccaaactaagcccaaaacgaaattattttacaaaattactcaaaaagaaaatagaaaaaaaaaacacttgtttcattataaatactttacataaaacgagtgtgggcgatcaaagtccgagaaccctaatttatatttgaaacaatgacgatgatgagcgatctttcggaggatttggtagaggagatattgtgtaggggttcgatcccttctttaggggaccatatattcctggtccatgaaatgcgccaaaaccgaagc

SEQ ID NO: 17868 - DNA, 2283 bp, Arabidopsis thaliana landsberg
gacatcgaagataacacttggagatcagatttaattgtttggattgtagaggttagtttagtttatagttagttaataatttgaacagctccaaaggctgttgataattagttaccattgattctgtaacttttttttgtcatcattcattgtaactttggttaccttttactttggagctgttttttttttctttctttctcagtgattattttcttgggtcattttggatcctaatggctgaaataatttattcccaccttaatacaaaatctcaaatatatactattccttaactaaaattctagaacaatgccaaatggatatgtttgaaatacctttaataacaactaggatttaacctgtggtgtaccacggacaaatgttttattcatatataataatattaaattttacggtttttaatttagtatttaagttatataattttatattaatgttataactaaaacaaatggtgatgataaaataataaaataaatatttaacatgtgttatatcaatccaaacccgtcccactatatttcatatcaattcaaacacgtcccgctatatttctcatcatatcttatatttttttataagtttaaataataataatgttttataaagttaaaatatatctataatatttaaaaataataattattttttacttaagttggaaagatttttggaaacgtttgttgagcgcaatataaagtatttaaattttcaaatctgaataattaataccaattatatatcttgagagatttttggcaactattgttgaatataatatcttgtatttaattatcgacagaaaatatttaatgtcaatggcatgacattgtaaatacaagtacaaaatttatttgctaaaatgactgcaaaaatgtatatgtagatttacttctaattttaatgtttcaaaggacaaaactaggcatgaccataaaatccgaagcccgaaaaacctagttcgctttggttcgagtggatctaaagtgtttattttgggattttggtttggttcgtgtaggatctgaaacctgaacagatacctgaaatatcgaaactcaaacggatacatgtaactcgaaataatacgtatacataatttgtcggtaaattcaggttcaatatcaggtttcaattaaatttgagaaccagcccgaacccgaatagacctcaaccgatattttcagtttctaaatgtattttcaatctctttaccaaagtaacccaaaaacccaatctaaacagacccgaaaatccgaatgtccagacctaactaaaatcgtgagtcaaactcaaaaaatgattgattaacactatattatacttttatttagattctataaattggacacatgtatgggtgttattaagggttggaaacataaatttaagccatgaccttatttttggttggaaaattcttgttcttttttttgttagtaaagggctgttaataagggttttaatgggttagctaaacgataccgtttataataaatatgtttgcttaacgacatcgtttgaccttagggtttattgtttaacatgaaagaacgtcgtttcaccaacgtttcttcttcctcgcaagtctcaaagccaggaacgatctcgccgtatgagcaacttccgacattaacactgtattgctctgccgtattttcctcttttcccttcgtactcgtcttcacatctgaattccgacaagatattgcgtctgctctcctctcttccctcattcttgtcttctcattaccaaaaacctcttcttctcgtagctaactcaatccaattccaatctccattcaaatcgagcaccagataattttttctcctaaattctaacataagccctaaaattcaaaactgaaatatctatagaatctccttccgattcagacggataatcgccatcaacagcgtgtgaattcgatcaaaaatctgaactttccacaaagaaattcgaaagctcagatttttcgatttcgaaaattttgaaaactcagtaaatggcggattttcagacatcaacacaacgggccaagtggattttcactccccagaaactggtaatccccttctccttctgatcactacaatgaggctttataattatattttgttcatctttggattttctttgctttgattgcttcatagagagtcggattaatcgagcatttggaactctttgtacttagtaatgtgtgttgttgttgttattatcttacttgttgtgtagagcatatgtattgcaactct

SEQ ID NO: 17869 - DNA, 612 bp, Arabidopsis thaliana landsberg
  unsure (1)..(612): unsure at all n locations
cggttccatattgacttcaatcattatgaaggactttgattttatcatttgaatttacacagannnnnnnnnnnnnnnnnnatgggaagcgaaacacctatgcatccttcacggactccacttcatccttatatgactccaatgcgggactctggaggtttgttttttagatccaatatctgtttatttttaatgttatataacacctcctctgtaatatgttctcaagttccttggtgattttatgtaatttcagctacaccaatccatgatggaatgaggacacccatgcgtgatagagcttggaatccttacacgcctatgagtccacctaggtaagtttgtgttgcgtttctattttcaaaagttgatttcctctttaatctcctcttggttctcttaaatgctgttgtaatttttgcatcaatgtgaggttatctgttatgtttacaaacatggctattgtctctcaaattattctcagaaattcttaacacatgtctgagaattgtaaatcttgattgaagaataaacttggatatctctcaaattatggttgttatggcatcagggataactgggaagatggaaatccggatcttggggacgagt

SEQ ID NO: 17870 - DNA, 1194 bp, Arabidopsis thaliana landsberg
gaaattttcaataaccaaatgcaccaattctcttatataaacacgatccctaactactccttagtcatataacatcatacggtaacaatgggtttggctaaagtctcttgctttctcttagcgattatgtttttcatcaatggtggttcctccaccacgttcaccatcgttaaccagtgtaactacaccgtctggccgggacttctctccggcgccggcaccgctccattacctaccactggtttctccctcaactcctttgagtcacgactcatctccatacccgccgcttggtccggccgcatatggggacgcacgctctgcaaccaaaacgaaatcagtggaatattcacttgcgtcaccggcgactgcggctcatcccaaatcgaatgctctggcgcaggagcaatccctccagctacactagccgaattcacactcaacggcgccgaaaatctagatttctacgacgttagcctcgtcgacggttacaacatcccaatgacgatcgtccctaacggcggagctatcggagtcggtaagtgtaacgcaacgggttgcgcggcggatctcaacggcttatgtccggagcagctgaaagtaacggttgaagcggctggaacggctgctgtggcgtgcaagagcgcttgtgaggcgtttggaacgccggagttttgttgtaacggcgcgtttggaacgccggacacgtgtcagccgagtgagtactctgttttctttaagaaaacttgtccgacggcttatagttacgcttacgacgacggcacaagcacttttacttgctccggtgctgattacgtcatcactttctgtccttctcctccaaggtaatatttttgctactgaatttactaaataaggaaagtaatattcgaaaaaagttaattttagtgttttttggtaattttaatgaatcttagattattcaaaattcatattttggaagttttgttaactgttttatatatttttgttgttgttgttctgttttgaattagtgaagactttgagaagagtgcatctccgcctctgcaaccggaagcagttagcgtctctaacgcgtcaagcagaatctcagttgcgttatcattggtcgttttggctgttgcggtttcttgggtgtggagtggactttggtgatattcaatacggcgccgaccttttttttaattattg

SEQ ID NO: 17871 - DNA, 675 bp, Arabidopsis thaliana landsberg
  unsure (1)..(675): unsure at all n locations
tctgacaagctctcatcgctgcttcagcttccttaaacgtgacctaatcaaataaaaaaactgattttttcagagaaaaagagaaactttatcatcaaagaaacgaaaaagagagagagaagaaggaacatacaaatccatatcctttagatcttccagtgttcttatcagtaatgacaacagcttcaacgatttcaccaaactgttcaaagtaacgtctcattgtatctctctgagtctcccaagctaatcctccaacaaagattttcgtcaacttggtatctgttgtattattattaccaccttccatctgaaattgtctctgttgagccatctctggattgctttttccccaattcacaaaaccctaaattcacatccaaagtttcaatctttctctctctctctgttgctttcttaacacaaccaaaaaaacgaaattttgatccaaaacagaggaaaaaactgtaacttttcccctcccaaacaaagaagaaaaaagagtgaatttgtgtgtaccctaaagagtgaaacaagagaggaagaggcaaaaacctctgttttagtagaatgaaggaaaagaaaatgaggaagacaagaaagctgctagtgggaacccacgacaatggggcctatagaagnnagagaagagagaagcaattggaaaaatatgga

SEQ ID NO: 17872 - DNA, 974 bp, Arabidopsis thaliana landsberg
tcaatgataatatactagacttatgaatcaacgatcatttcttatttgacttttacttggtttatggtttaatgtttattatggttttttatttttcaactgagcttatttggttttgatgtaacaggaacaagtcatggagaatctatcatgtttggatgttgctttggatttgaacttctttctttactttgaatgctttggatttgattctgaacgatggttttatgtcttgctttggatttgaacttctttcttctattttgatggttttatttggatgttttgaatcttgctttttggcttgaacgtgtgaaacttttattatgtcatgctttattgattttacttcaagtttttttttattacaaatttacaggttttatggtatatgtggttagtatcaagtatgttcgggtatattatagtagttatgaactagtatccaataatattcggttactttttggattttcaatggaagtaccaatacctacccaaacccaaaatgtaccggatcgaacctgaaccgaagttttcaaatacccgaacggggtctaaaattatagttccgaaaaatccgaacccaaaagaaccgatccgaacccgaaccgaatacccaaacgcccaggactacttatccctatggattctttgtctaggaaaatataacctaaaatgtggttaattaaagagtaatactccacctgttccacagtaagtgtcatttaaaattttcacatattttttttttctttctaaaacaaactttggattttaccccttattaagttattattatattttttttttttcattattcatacattaaaacgatagttttatcaaaaatctatattgaaaacctaagctatacttgtagcaaacaaaatttaagttaatataaaacaacatttgaattaaaggtaaagaggatacataacattataaaaaacacttgttgaaaagtttta

SEQ ID NO: 17873 - DNA, 765 bp, Arabidopsis thaliana landsberg
tatgatgattatcacattatttctgttttagtgtatcactacagtagccatctaatattcttgtgcatttacttctcttgtctgctacgtgcagttttctccataacagtgtgatagaaaaggttttgcttctcactcgaagaaaggaaaaaaccctagtggctgcagctgttcgatttgtccgcactctcctctctgtccatgtaagtaaagtagtcttcgatcagcattttttcttataggctcatctgtgcattctctcttgagaatgaatttgactagacaattgattctataatggctagaaaatgttctcggatgacaataagtctttaggtaagttatgcaatttctaaaatattgttctatttcagaatgataatgtccagagttacattgttgagaacaacacgctgaaaccgattatcgaagtttttgttgctaatcgtcatcgggacaacctgatgactgctgctgtgttggagcttcttgagcacatacgcaaggttcctattatttcatccttttcttcactgtttctttggggtgttcctctgtacataatacatattactgttttgtgtgcaggaatatgcagtgttggtcaaatacgtaggtgatacattttgggaccagctagctccatttgagaacctgcgttccatcaaggatttgaaaacgaaatatgagaaggtatcattcttcgatctaacttctactttgaaaagttttcctaaactattctttgtttaacaatgtgtcaat

SEQ ID NO: 17874 - DNA, 967 bp, Arabidopsis thaliana landsberg
ttgtatatgaaacttcattttctttcctgagttctttaattatattctttttctatggtttatattttcttgttgactcaaacctttttcttgctacttgatattcaaagcgggatgtccttgtccattagcccagtccaataatatccatttcgatattggacaaatagtgtctatgtccactaaggttcatgtccattaacgttcatgcttattaaagctcatgtccaaatgggctgtccaatgagcataacataaccaaattttaacacaatagtatttacttcatatttcaaccaaattatcaaattcaaaagcaaatttaaacaacaaagtattaaataatttaagtattaaatccaaaagcaaatttaaacacaattcaagtatttaacaaagtatcaaatccaaaaacaaattaaaagcaaatttaaacttcttcttcttctctctcgccatctttgtctttattaaggaattcaatattatcacctaagtactacagaaaagaagaactcaatatgcattaagattcaaattgattgaaatatgacaaaagaaaagaagtcaaaagcttaccaatctcttcaaagttgcatagccaattcctcgcacatatcaaagcttgaactgtagaaggaagaagacaactccgatacttgtttaaaacccgacttcctatgctgaatgaagactctgaagctacagttgtaatggatgaaacacgcccacagaccgcccatccattttgagagctctattgttttataaaaatggatgaaactttagtagtataatagtatctctcaatgttattgactaacccaataaatttatatacaaagatataacaataaatttttactttcttttcaatcgatctcgttaactctatgatatcctaaaattatttcaggtattgaccaatcatttggaaccagaacccaaaaaaacttggatactggga

SEQ ID NO: 17875 - DNA, 1223 bp, Arabidopsis thaliana landsberg
gaaattttataatttaatacacacaacaatcaattgttgttattttcatactcacgatctcacattttttttaaaattccaattttacccttaccatggtgcaattaactatttgttttggataatatgatattaattttataattttgaaaaaaaatgaattttattaacatttttgtgtatggtctctaaaatttaaattttcatttttattattattatattattctaaaatttaacataaaaattatagaaaatcaaaaatattttaaaatagtcattattacaatcttcttctatcgtcgcaatatcaaagaatcgttttctctttaagaaaatttagaatcaaagattaatctacttcgttgagatttgggttgagattagctattttgctactaaaaacaaaattagccatttttatgaattgataaatcttgaaaaatacgatgagattcgggttgagattttgtcgaaaatagtttgattcttgaagaatatacaatcgaaaagagagtttctcactacaaagaatgtttaccggccattttaaaatatttttgattttttataatttttatgttaaattttagaataatataataataataaaaattagagaccataaactaaaatgttaataaaattaatttttatataaaattataaaatttaatatcatattataaaaaaattaatagttaattgagatggtaagggtaaaattggaattttatttttgttacgagatcgtgagtatgaaaataacaacaattacttgtttgtgtattaaattgctcgattttattactttgtgtatttacttttcaaccaaaaacaattgggtattaaacgttcaaataaaaaataaaaattaattgcagttttttttttgttttttcccctttataaaatatataaattgaaaatggaacaaaaaattatcgtaaagtttacacttcaccgtcaaaacacagctacttatgtcagtgactcttcttctatcaccactacacgacaccaaagaaaaacactaacacactctctctcataactctcgcgtgactctcctccttcaactctaactggatcgtacccttcacgcgacattaccggcaacgcgcttatcgtgtggcacactcacccgcaccgtacccgtcgtcggtcttttcgccaaattatcgtatttttccgcgaaagagaataatataatacaacctttc

SEQ ID NO: 17876 - DNA, 1249 bp, Arabidopsis thaliana landsberg
ttgacattgaaatttgatttgttgagatgcatctggttttccagttaaaattctaataccttttttgctttatttccagcccatagatacgtagttgatcttcaagaactttggctaccaataactttgtgtttaatccctttctagctcaaaactgttagggaagatgtgatatttggtcttattggagctatcgtttcccaacatatacatctttcggatctagaaatgatgtgtttagatcacacacctatacacacctctgtatccatatgatttttatccattttgtggctgtccgcataatacgtcaaatcagacatgactttatggccaactattctttggtattactaagcagataagcagtgtaatacataagatttctaattgataatctgatttcttagtttgactattaaacgtttatcttggttttgatacatgagcctttgactattcttgcaactagcactccagtttgatgttggtataaaagacaagaatgtgaagaagcgagcttgagagcttgaagttccctacgaggaagcggaggtggtggttggtaaagatagtttgattaacgtttttgatgaaacatatcgtttaaagtctttttctctcttctttgacactttctttctctctctcttggtcattagttcacatcgaacaaaaatacagttgtccattagttactgtttaagtggtgtagttgatatggctatcatgtgattcatgccttgtggtcgtttcatatcgatacagaagttttttacattagatacaatcaccaatttcacagacatcatccattttgttttgacaatttgttcacatgtatatggatactcttatcattgcatagcatttggctactttgttgaagtttatgacgttaaactgatcatatgattattggctttttagatttcagattttgtttgtttatggaatgttgtatcttagttctaacaatgtggatgacgcatcatgaaatgtttatatggatgacacattgtggatgacgcatcgtggattgtgcattatggattgttatgatgagagtttgtgattcttttggtcttacatgttaagaattggaaaagttatatgtggtgtttttgttatgattattgtccacaaagttccatccatccgattattttgcttgtttacagaatgtttgtatctaagttctaacaatgtgtggatgacgcatcatagaatgtttatatggatgacacat

SEQ ID NO: 17877 - DNA, 1331 bp, Arabidopsis thaliana landsberg
  unsure (1)..(1331): unsure at all n locations
tttttaaaaacttaataattattacaactcataaattttgttatatataggatataaaattttaaacaggggtgagctacaattagatttaatatttactttatctaagaattaagattaattgaattaaaacattatatttaatatctaatttatctaagaattaacctaagaaatattagatttgactcttatataagagccatttttaacaattaattgaattataatattaaatttaagatttattttatctaagaactaacctaagaaactatcaataatgatggttttatagtgcttgagatgacaagtggtcgactgaatcctagagatattatttcattaataaatgagacttttaaacttgttgattctttcgcctccacggaaaaaacggatctctaaccaatcaactttgacaattataatacaaatttaaggtaaaaaagtctttccatcctaaaaaaaagaaagtctttccaaacaacttgatccccaagtaagtgaattgcataaagaccgacacaacctctaaggataactttaatatactcatatcttttgtgaatagatgttatccttattagtttgtgacaactttcggaagccctagctaaggtagtcggcttatttcacatctatattaggtgcagcctctagtctcctcaattcaataacacaatcttcttctaaatcattttttgtcatctatcacttctaatttctaaacaacaaaccatgtctccttctcctctgcttggtccacctgagctcagagatcccaactctctcctcccaaaacccaccacaacttctggtcccagcgaccctttcatggacgctatggtttcaaatttcaacaactcagctagagtcaacaacgtcaactctcctccgatgggctacaccgagaataaatccgccacttacctctcctcaggcaacccctgcctcgacttcttcttccacgttgttccaagcacgcctaaacactctctcgagcagtggttacaaggtgcttgggaccacgacgccttgaccacactcaagcttatctgtaatcttcgtggagtccgtggcaccggaaaatccgacaaggaagggttttacacggcggctttatggctccatggtcgtcatcccaaaaccctagcttgtaacctcgagtctctttctcaatttggatactttannnnnnnnnnnnnnnnnntttaccggattctacaaggatctgaaatccggaagatccagaaatcagaaagggtcaagaggaaaagtgaagctctagatagaagagctccttatgatggtcattggtatcatggtcg

SEQ ID NO: 17878 - DNA, 549 bp, Arabidopsis thaliana landsberg
ttgtcgtttggaatccgctttcacgtgaaaccaggtggatgaggatccaacccggaaagtgttacacggcaatcatattttttgctcttggttacaataacaaatcttcctgttatacaatcttgagaatgtatccattaaacgatgaattccaatctggatataagtacgaagtctatgattttacctctaattcgtggagggttgttggtgtgaaaccggctggttcataccactgattcagtccagaagtggcatgtctatgaagggaaatacttactggtttgatgaagaacatgggcgttcttttttactatgttttgattacacaagtgagacattccaatgtttgtctctttcggaggatgctaatactcattatcattatttggttttatcagtgactagagaagaacaacaactttgtatgttaactagatatacatgtatggatagcaactaagattcagagtaccggagccttgtcatgggcaaagttcctaacagtaacgagaagcgggatctactatcgacgttgttttgggatga

SEQ ID NO: 17879 - DNA, 1749 bp, Arabidopsis thaliana landsberg
attacccaaacaaacaaaaatttattgaatatccaataatggaatttaacaatatttatataaaacattgggattgaggagttttgatagacaaaccctttaacaaaaaaaaaaaagaatattttgtagaccagaccatttagattataaaacgaatcaaatcatcttcctgccaatttattcacgtaatgaaacagaaatttaaagaatgggaaaacagaaggatcacagttcccaatgagagtatgccacgtgacaaatccacgtagacgtcgcgaaacttctaacacaaacacgtcaaagagtcaaaagagacgatataaaatctaccttaatcgctatttggaggataattaattgatctctggagatttgctgttgacgaataagaagaagaacccagaattctactttaatggcgtaagaaacacaaaatcttatatttttcggcaaaaccacaaaatcatattttttcgtcaaaacccaaaaaaataatttatatgttcaaaataataatttgaaaaatatttagttgtaaatatatttaaagcagtaattaaattaatatagctaagactaaaattaaaattaaaagttgattaaagtatagatattttaaacattttctggttaaaattatctaaatagagatgaaaatttataaaaattactcaaacaaacaaaaatttattgaatatccaaaaatggaaacgaacaatatttatataaaacatttggattgaatattttgatagacaaaccctttaacaaaaaaaaaaaaagaatattttgtagaccagaccatttagattataaaacgaatcaaatcatcttcctgccaatttattcacgtaatgaaacagaaatttaaagaatgggaaaacagaaggatcacagttcccaatgagagtatgccacgtgacaaatccacgtagacgtcgcgaaacttctaacacaaacacgtcaaagagtcaaaagagacgatataaaatctaccttaatcgctatttggaggataattaattgatctctggagattttctgttgacgaataagaagaagaacccagaattctactttaatggcgtacgtcgaaggaggtatgagattctcttctctctctctgtatcttttcgatttctggatttcttttttggcatcaatttggttaaattcgatctgattgttcgtttttcaatcaaacctgtaattgttctttccttgagcatagattcataactattaagctttgattgttacagaatttgtgaatttgatgtatatgtaaaagttaggttttatattcctgaatttggattgatcatgaatctttaaattaggtcaattagattcataactatagtaatgctatattcattgtctctacagaatttttgctttagtatatctatgaagttaggttttatgtgtcagaattcggattgagcatgaatgtttagagggttttgaggttttatacgggatgatgtgtcaccattatgggaaactttataggtttatggaagatggaaattagataaggtcaataatcattccattattatatgattctcagaaaactgatatgaatacaaagctcgatgagcattccatagcaggagacatttctagactttgaatatctaaatggctaagcttaaacgaagttaaaacttttgagatttatagtgggaaaagttagtgaaagagtgttgattatggctgagtaattgttaaagtgacattgtt

SEQ ID NO: 17880 - DNA, 918 bp, Arabidopsis thaliana landsberg
caaacatttaaatctttagccttggaagttaaactagcattttcagttctaaggctagaaattgattcattcaatttatcaatcttagaaattaaactagcattctcatttctaagattggtaattgaatcatgacacatgctaagttctttagacaagtttttatttttctctacttcctgagcataagcattttttactttaacatgctttttattttccttaataaggaattcctcttggctatccaagagttcatccttctcatgaatagcacctattaattcattcaatttttctttttgttgcatgttaaggttgccaaaaagcgtaaacaaatcatcttcatcatcactagaactaccctcatcactagatgtagtatacttggtgcggttctagtttgtaccttcttctttttgccatcctttgtcatgaagcacttgtgcccgacgttggggaagagaagtcccttgttgacggcgacgttggcggcgtcctcgtcggaggaggagtcggtggagctctcgtcgaagtcccactcgcggtacacatgggcatcgccacccttcttcttgtagtatctcttcttttctctcctcttgcccttcttgtcgtcacccctgtcactgtcacttgataatggacattttgcaataaagtgaccgggcttaccacacttgtagcacactttcttagagcgggatttgtagtcctttcctctcctttgcttgaggatttggcggaagctcttgatgatgagtgccatctcctcattgtcgagcttggaggcgtcaatggggagtctacttgatgtagactcttccttcttctcctccgtcgccttgaatgcgactggttgtgcttcgggcgtggaggggccatcttgctcgatgattttctttgagcctttgatca

SEQ ID NO: 17881 - DNA, 515 bp, Arabidopsis thaliana landsberg
agtgtttcctttgatcacatttgaagttgtagttaatgtgtttgtgttctagtgaaacaagaatagatggtgtggcgcagtagctagtgtacgtgcgggtatctctaagggttataaagttttaaattaggcgatgccaatgccttcatacatacacgcaaatagatgagggtaaatatattaaattgacttggttttcgaccatttcttttactttcgtgggaaattttggcggttatcgatgcaagttaccaaagtcacaaatactaatgaaatttattttcccttgaaagaaaggtactctctggtgttaatgtatgtgttgctagcacgaggggatgatgtgagtgcgtgtgactaattcactgaactctgtttgcatgaaataaccttaaggacaaggaaatgcaaagatggaattgtttttaaatgagtttttattagaaacaagaactaatggtgtagtagatctatattcaggttaaggctttaaatggaggagtatttatatcact

SEQ ID NO: 17882 - DNA, 525 bp, Arabidopsis thaliana landsberg
  unsure (1)..(525): unsure at all n locations
aaagaatatacaccagcatttcagtttcatttcatttcggttatttcacactaagattattagtttaccaacaactctctgcttgacttgacttaatgcattccaatcatatctgatctgtttgcatcacaccagattggatgacaacctaatatactccaacgacatgatagtactttaggaattgataccaaaaaatctattatcaataccccttaaatttgtctcgcatatatcgtcccccaacacgttttgatgaatttgtcccccccccgcaagaccgtctacaattgtcaatgaatttttcctcgaatccttccaaggatcccaatcaggcgagtactctgtatctatcaacttcctcatattttcaaaatcatagtctcctgaatcttccccctcacttaacattttgtcttctcagtcagatgcccatcctccactatccgtgtccaatgcttcaaccagttcttcttctcgtncccgctttgctcttaagatgcccatcctncattttgtcttccc

SEQ ID NO: 17883 - DNA, 2009 bp, Arabidopsis thaliana landsberg
gttcgagaatctctgtaattgttaaggttttggtatgacttatatttctattggctgatttcttcacagttgcaaagatcaaacagtgacaaattgacatggtggaagacatactttgattaggtcaagctttactctgttcttgttgagacaattttctcacaaatgatcgcttctagaattacattgtatgattcttttacattcaatcacagagtttatattgctcctatgattatacattgttcaagtctctctattcaatggatctcactatatatacgaaattcagcttttagaaacaaagagaggttcacactcaaagattgcgtgttcaagcattggtccaagcctcagcaactttggtatgacaatattgtctctaacggaacacactagaggattgtctgattgcagaagttttccgactaggtttgcaagtactgtcaaccggaatacctgagaccatctctcactcctatatgattccatcgccctttcaactgattcggtccctccatttattgctctggcaagtttatttgccagaagaactgaatcttccaaggcacagcaagcaccttgtccaagatttggagtcattgggtgccaagcatctccaacaagaacaaccctaccttttgatgctgaaggagcaatgccaggccaaagccaccggtccgcaagaggagttctactgattgcttcatcaggtgttagatcaatgaggttttgcagatcgtctggccaggtactaaccagttccttggcttcttttcttaggatagctggatccatcatttgaggccctgcatgtctcaagtggttttgatattaggaaatgaaaaggaaaaggaattatctttgcggaatgtctgagaagtgttgaaatctacctaaagatgggctgttgaaacagatgaaccagtagacttttgttgcagagacaggtacatatccagctctaagccctttaccgtatatgtagttcacctttttctgaaatggctgtccatttggatagaacccgaggccacggtaagcgcaatggccaacatatttcggctcactgaaccccatccaagttgcaaccttagaccggataccgtcacaaccaataacaatctgtcaaagacatacatcatcaaatcagctaaggcacatatcttctctattcatactagtttggttcatcatgatgtctgataagcaaaagatccatgtaccgagtataaacacataaccataggctcagatcctgagagaagaatacctttgcaagcaaccgggttccatctccaagttgaaggagagtgtccccattggcattgctttgtatactttccagtttggaggaaaaccgaatggtttgtggaggaagctggcttgcaagtgtttccaagagtactcgcctctccaccgcccgaacttcttggctatataagacatatactttgttggttacacgcatgaatcaaatggaatgctcctaaccagaaagctgaagtagctacctttgatcttcgtctttgaatttgaaagaacgaagctctcttccatcttccttcttcactaccatcctgctcagctgatcataccaacacactcaggtaaaaccaataacaaagtttctcactttctggataacaaaactcctaacattattagaagaccgaatcatctttttgatatgggcagaaagaaactgtacccttgcatttcaagaaactgctttcggagttgaggtccgatggagatggcgtcaagaacacgccacccattcttggatagcgtcagcgatgctcctcctgtccgaagcgactctgcctgctccaacaccaccgaccggattccaagcctaaacccatcaaacaaaaatatccggctaagtggctctgagtttctaagaaaattcaaagaaccggattttgtaatctatatacttaccggtgaagagcaacggcagtggcaagtccgaccatatccgccccaacaaatactactttctc

SEQ ID NO: 17884 - DNA, 578 bp, Arabidopsis thaliana landsberg
cacgatcaacaataaaaagacactttagtgtttattccatccttattgacaaaaagagaggttatcaaagaaataatgggtcaaaaaatatatattccgatgtttattgtattcttattgaccaacaatagttctaaaacaaaccacgagtcaacaattaaaagatacttgggtgtttagtatttattccatctttagtgatcaacaattgttaaaagaaatcacgggttaacgataaaaaagacacattagtgtttattccatccttattaacattgtctttcttataaaatatatcttattcaaacacaaatcaattgatattaagatcataaactaatacatttgatgaaaattataagattcaaaatttctttatatatttgaattgaattattattatctttctataaattagaactagaaattgaccctcggtacaccgcgcattgatatttttgttcgaaagctaaaaattttattttaattaatattatttatatatgaatgacatattaagaggtagataatatcgcaaaatctaccacattctaacaactagcattcaaaatctacca

SEQ ID NO: 17885 - DNA, 308 bp, Arabidopsis thaliana landsberg
ttacaattcacaaacaattgtatatcgatttgagtttataacaacaaggtttagggtttaaattttataattaaacaaattatatgtcagtttgagtttataaaaatggtaagaatttagatttttacaattaaattgaattatatgtcggtttggttcatagagattttgtttccttaatttgttgtgacttattattccaatacttatgtacttccaaatatactatagactgacatgttgcggaattatgtatggcttcacttatagtgtttttggcaagactaacacaagtgcatatgtttaag

SEQ ID NO: 17886 - DNA, 3093 bp, Arabidopsis thaliana landsberg
caatgccggcaaaaaaataaaaaatttaacagtcaatgggcggcgaatatgacgactcagtcgcagttcttagtgaacctctcttacggaggcctcgcctcccaaaggttcatcttcctttcctctataccccttctatcgctttcttctgttgtgttgctttcttctgaatgatttttttttttgtcgatttgtttttgtagtaatctcagagcgaataatcgtgtttcaccttcttcttgtcaaattacacgaacaaatcgctcatgggcattaccagtttcctttaaagttgagaaatttcaactccaacgaggaaggaggaaaagaggatcaccatgttttggggagagcgaagggttggtcaaaaatgggattggtgatgctgatgggattataattgttgatcacggttctcgtcgccgtgaatccaatcttatgcttggtaatagctttgtttctcttccttctccttcttcattttctttgttgtccttactttattgtatagtatacttcctttacggctttaccttgtgcgagtttatgtaattgtgttgttgtttctgtatttcagaggagtttgtgaaaatgttcaaagacaaaactggttacccaattgtagagcctgctcatatggtaactctttctaatgttctcacctttatgcatagtgagaaccatacccatgagtttgatacagtctgatttccgtttcttggtcatcttttgcatttagcttaatatgttctatatcaggaaattagatgactttcaagctctgcttgctgtttgctgatttttacactttacatcaggaattggctgagccatctataaaagatgcattcagtttgtgtgtacaacaaggggcgaaacgtgtagttgtgagcccgttttttctatttcctggaagacattggcatacggtatggctttgttcatctcaatttgttttgttttcttgaagcttctagcttttcttatttatgggattattggaggatgtacattaatggcctagtgagatcatgacccttatttgattcaggacattccctcgttgacggctgatgctgcaaaggagttctctggcatctcatacctcataactgcacctctcggcccccataatctcctcctggtaagttataaagcatattttccccccaaaacgagcgagcactttaaacctaagggatgtgagagcatcctcatgcattagtgaatgccacttttttcccttgaacttccaatgagagcatcctcatgcattagggatcttctgctgtttaatcttcacaagagatctgttcttcttttggctcttgatctttcagtaatctactaatatttctttctgcaggacgttgtaaatgacagaatccaacattgcttgagccatgttgaaggtgatgctgacgagtgtcttgtttgtgctggaacaaataagtgcaagctctacaatagttcttaggtgtacatgtaagaacgtttttgtatatctgctcatcttctctaaccttcggatgcgggaaaaaaaggaggcatagtatattgttcacactcatcatttagtacgcgtcctatgtttcaacaagggagttttgagatttatgttcttttcttcttattgcagaccaatttgaaagactacgataatataataaaagctgtctgttaaatgttgtctctccctcttatcaacaaattaagaaattgaaatttgatgtatcgtatatcagcaatgtttcatggttataaaaaaaatagaagtttctctcgatgatttttctggcctcctttttcttttcttattgggtttcgtgcattgcatttgttgaaccacaaggcagagaccatttttccttattgtaacttctgcaggtaaagataagagggaaaacgtgtggttgtaggagataacaaagacttttgaatgtctcccaccaaattctgatggatgaatatgtggatgtggtatttcatggaccagcacaaaagagcatttcaagaagtcgtttggtagctgtaccatctaattatgttcacatgatgctgagagttgaataattcagaaagggacaaagagtgttatgattgcgttgacttggagtcatgtttcatgaaggtagtgcgtagttgactcttttctagtgtaggaggtagagatttgggagagtcactagaacacgaaatggcagaggctattgtttctgttacagtgcagaagctaggacagttgctcttggaagaaccgttgttcttatttggtataggtgaccaagtgaagcagctgcaagacgaattgaagcgtttgaattgctttttgaaagatgcagatgagaagcagcatgaaagcgagagagtgcgtaactgggttgcaggcattagagaagcttcttatgatgcagaggatatcctcgaggcatttttcctcaaagcagaatcaaggaaacaaaaagggatgaaaagggtgcttaggaggcttgcttgcatcttgaacgaagcggtttcacttcatagtgttggctcagagattagagagatcacctccaggctttctaagatagcagcaagcatgctagattttggtataaaagaatctatgggcagagaaggtttgagtttgtctgatagtctaagagaacagaggcaatcgtttccatatgttgttgagcataatcttgttgggttagagcagagtctagagaagttggtgaatgatttagtttccggaggtgagaaactaagagtcacgtccatctgcggaatgggtggtttggggaaaacaactttagccaaacagattttccatcaccataaagtgaggcgtcatttcgatagatttgcttgggtatatgtttctcaagactgtagacggagacatgtttggcaagagatttttctgaatcgcagctacaaggatgaaaatcagagaatactcagcttgagggatgaacaacttggagaggagttgcatcggttcttgaaaaggaataaatgcctcattgtgcttgatgatatctggggcaaagatgcttgggattgtctgaaacacgtctttccacatgaaacagctaaactagtaat

SEQ ID NO: 17887 - DNA, 1489 bp, Arabidopsis thaliana landsberg
ctttcttaaaatgtttcaaaataatatatgtttaatattttctgatttacaatagttattaagttatatgaaatataattattttaaattttattttatttttcagaaaactcttataagagagcttaccattagaatatgaaaaaaaattaaaactctcttataactttttaaaaattttaataataaaaaaatggagaaagcccgtgaaagagctcttacgaaccaaaaccattcagtccggttaagaattggttatcaagtttggttcctaaaagatatccaagttcaaaagcaaaaaaatatcttcttttctctctctctactctcttctcttcttctcttcttctcttcttctctggctgggcaaccatgattactgtcgtcacctccaggctctctctccttcctccagtcttctccgtcgttaactcttcttcttcgcgttccaaaggtgctcaatttatttctgccacgtcttctctttatagcactctgttttacacacgtcgttgattcttcagttttttaaaagacccgtcttatacaaaatttcagtgtaaccgatccctgaaattcgttaaagggatgaaattttatctaagattcggagttttcttttcgaacatagtggtaatgtttgtcgaatgcttgatttggtcttccacagctgtcactatcgagtttgaagatagaaatcttgtgttaacttagtatgtattactgcataatgtcaattctgtttgaaagcatcagaatttcggaacagatttttgtttcgtatagcatcgatctttgtcttgtgtgtttttatcttctctctgaagcctgcatgaacccttctcttatggctttaattgcagatatgaatctagagccaaaaaagaaggttaaattaagagaagactggagagaaaagtccagacctatcccacccggaggaacctatccagctaaagaccattgcaggttttttctttcttttttgtttgtttgtttgtttacctcactatttttgtctcattcttatcaagatccttggtgttctgatgggtttgcagtcagtgcgggctatgcgacacctactacattgcccatgtgaaggaggcatgtgcatttcttggagatggaatgtcaaggattgaggtaatgtccatataaatggataagatttgatactctttttaattgatgggctaagattcttattttgttaatattttaagttcttgtgcagagcttggaacctgttgtgcatggtagaggaaggaaagcagattccttacaagatacatattttggggtgcatcaagagcagctctatgctcgtaagttgaagcctgtcgaaggtaaatagacacttcccttccactgttccacattttctactaacttcttttcctggctcaatctaagctagggcacttttgtgtctcgttcaagatgaatttagcttagctttgttgtttacttttcattctattttcgg

SEQ ID NO: 17888 - DNA, 1327 bp, Arabidopsis thaliana landsberg
atacaagactccatggtggattacagtattggtttcatacccgctgctaagaagatctcgttttcaatctctttgacaattttgaatttctctaaactcatgaaacattcattgtaaaaacaatctttttttggttgaatataattttacattctttaaaaaaaataaaaaatttgacctcttcatgaagaatatctcacggctcaattattaaaattataaatcatgtttggattctaatttttggatccaaccattaaggatggtctactcctattaaatttgtttctattgtttaaaaaatcaaaaaaaaaataacttccacgaatattcgaatctgaaacattaaagagcggttgcaagtgctattaccacaaggtgaagctagtattacattagaatcggggtcagacgagaaattatgtaatcaccgaatcaacaatcatttgaataatctttcaaacggttacatgaaaattattactaatttaatttaaattaaaatttctcatcctatttgggttcgtcactagcagtgataggggaacacattttttttttgtcgtaagaaagtggaactcatgattacactagttttgaatatttttaaagagaaagataatccaagtcataaataattaattcaaaagtttgcttttcgagtcataaataatttatttattttactttaattatatctattgaaaatttctccaaaacagggcaagtttttttgggggcaaaatcaattgatttattcatactcaaaggaaagcaaaggggatgacaagttatacaaacttcataatttaacaataaaactaaaagcatttattcatattcaaagcaaagcaaagatgacaagttatacaaatttcataatttaacaatcgctttgacttctcctttcccagatctagagattgtagttgctcatcttatgtcttcttcttctcattctcttcgtttgtaaccacagaactttgcagtggtctggttccacaaataatagcctcgtttttgcttactaaaagtttatctctattctcatcaccatggggagttgtttttctcttcaagttagtgatcaaacactgaatcgtatctttaattgcttaattggtaaaggttatattcgaaacctcaagaagaatctcagagctctgcagagggaaatggaagatctcatagcaattcaacatgaggtacaaaacaaggtagctagagacgaggcacgccatcaacgaaccgcttccagctgtccaggtatggcttgaccgtgtcaatagcattgatatagagtgcaaagatctgctaagtgttagtc

SEQ ID NO: 17889 - DNA, 1559 bp, Arabidopsis thaliana landsberg
taaaatcttgtaatttttagtagttttttactccgcttctattcaaaagtaaaacaaaattaaaaatgaacccttaaatatacttttaaaatcagttttttttttttaaaaaaagagtaaaatctgctttaaatatactataaggaatcaatctttttgatacaagaataaaatctcagaaaaatcattttttatatacaagggagtaattaattattattagctcgattttagtggaattcgtcttcacgatattctcttaattaatatcatttttttctgacacctgttcgtcttggctgtcttgtgacttatttcttgtagtgaataattggatttgttctcttgatgacttgttttttgtagttattctacttataattagctattttattttcttctgacacatgtgcttcacctaaccaatctcaaagatcataataagggcgttttagtgcacaactattaacgcaagagaccaagaaaaaaaaaaacagatacttcattttgagttcttgaatacttgttttatcttgttttcgttttttacaatttgggaaaggaaatggagccaacgttccatgcttttatgtttccctggtttgcttttggtcatatgattccttttctacatcttgcaaacaaactagctgagaaaggtcatcaaatcactttcttgctacctaagaaagcccaaaaacagttggaacatcacaatctgttcccagacagtattgtctttcaccctctcacaatcccttatgtcaatggcctccctgctggtgctgagacaacctcggatatctcaatctcgatggacaacttactgtcggaagccttggatctcactcgcgatcaggttgaagctgcggttcgtgctctgagaccggacttgatcttttttgattttgctcattggattccagaaattgccaaagagcatatgatcaagagtgtgagttacatgatagtatctgcaacaacaatagcttatacatttgcccctggtggtgcattatgtgttcccccaccaggttatccttcatcaaaggtgttgtactgtgaaaacgatgttcattccttagcaaccttgtcgatcttctacgagagactttatcatcagatcactacaggttttaagagctgtgacatcattgcattgaggacatgtaatgaaattgaaggtaagttctgcgactatatatcaagtcaatatcataagaaggttctcttgactagtccaatgctccctgagcaagacacaagtaaaccactagaagaacagttgagtcattttctgagcaggttcccaccgaggtcagtggtgttttgtgcacttggtagccagatcgttcttgaaaaggatcaattccaagaactctgcttagggatggagatgacaggtttaccgtttcttgtagcggtaaagccaccgagaggattatcgacggtcgaagaagggttaccagaagggttccaggagcgggtgaaagggcgtggtgtggtttggggaggatgggtgcaacaaccattgatattggatcatccgtccataggct

SEQ ID NO: 17890 - DNA, 746 bp, Arabidopsis thaliana landsberg
aaaagggcttgagaaatcaagaactaacttctttacttgtctagagatggcaaactcaatgaatgacttgatctctacctctaagcccactggaaaaccgagacaaatttcaaaactttcgataacctgaatgggaactctagagacccagttgagcatatactgaacaaatgatacccgtttggagacatagtcgaaggcagagttatccacatactctgattccttgaaggaaatgttcctcttttcataacacaagttcctccaacgcttcgagagaatgcacgtctttacattatccttgaaggacaagaaagagaggattataaccagaactacatctggtagacttgatattctgtcctgttggttgactgaatccattctccttgaactctcaccacttgaaaataactgcgatagaagaagaaaacaattagcgatggacaaaatgaaaatggacaatgaaatatactcttttgtatctataatttcttaagaaaaaacatgaagccaaaatgttttactttatagatttagttcacacttttcttcaccataagtaaaatatttctatgttttacttaaattatctcaatacatgtttagttcaattatgttattttccaatataatggtaattttttttatctttcattgtaaaagtgtcatatgtttagcaaatattcccaaaatcatggtcgttttctccacccaaacttaatggtaaatcatttgatgaatct

SEQ ID NO: 17891 - DNA, 584 bp, Arabidopsis thaliana landsberg
  unsure (1)..(584): unsure at all n locations
cacttgtaatttaaactctctccttctaatgttccttggccctttgatgaaagtatacatgtcttgacggaaagaagatgaatcaatctcgtgctgatcaatcaggtagaagcagtagcagattccgatttcaaaaccctagccaacatttttgttgttgtttcgcctgtttttgtttttttgttctcttatcgatcttactctaactctaagcgagtgatgaccgatgatgaaggaatcccagaaaaccggtaattttaaatttgaatcataaaaccggttcgatctcaacgattccgaaaccggtttgattggtccagtggacttgtcacaacgtcgtaaacaaatactattttccttatccgaaccggttcgtaccaatttcctgatgaaatcaaatcaattacacaataatcaaattttggaagataaggaaaaaagaaaaggagcgtgcaaaaaaaagtcacagtcgcgagataaaatccgaagctagcgaaaagcttcgatttccagcgatcctagtgttggattctacgattntagggtttaaaatcttgagatgtgtcgttatcaatgcaattctc

SEQ ID NO: 17892 - DNA, 554 bp, Arabidopsis thaliana landsberg
  unsure (1)..(554): unsure at all n locations
ttttcattcttaaatcaatgtgtttttgagtttattcgctaatttatgtgtttgttcttttgatttgtgttaatgacttgttagatcttgtgattagtacacataaaccctactagaatcgctaatttatgcttgtgacttgtgttaatgacttgttagatcttgtgattaatacacataaaccctactagaatcgctaatttatgtttgtgacatgtgttaattacttgttagatcttgtgattagtgttgataatagtagtagaatcgcgaatttatgcttgtgatctgtgttagtgtcttgttaaatcttgtgattagtacgcataactgtagtagaatggctaatttatgtgtttgctgttgataaggatgattaatatttgaagtagcacactaatggcttatttgcaaccagtcttatgcttgtgattagtgttaatgccttgttgaatcttgtgattagtacacataagtgtagtagaatcgctagtttatttgtaaactngataatgatgattagtgtatttaagtagcagactaatggatgtatt

SEQ ID NO: 17893 - DNA, 630 bp, Arabidopsis thaliana landsberg
  unsure (1)..(630): unsure at all n locations
attccaacttcagatgactggtctgaacttaaggcaccgaaggttgatctcaaaccatttcctaaagatttaaggtacgcattccttggtccaaactctatttaccttgtgatcattaatgctgagttaaatagtgatgaagtgaacttgctattatctgagcttagaaagtataggagagcgattggttattcattatccgacattaagggaatttcacctactttatgcaaccataggatccatcttgaaaacgaatcctattctagcattcaaccacagaggaggttaaatcccaatttgaaagaagtagtgaaaaaagaaatttcgaaactgcttgatgctggtgtcatctaccctatctctgattgtacttgggtttctctagtgcattgcgtccctaaaaagggtggaatgactgttgtcaaaaataaaaaggatgaactgatccctactagaactataactggtcatagaatgtgcattgattatagaaagttgaatgctgcatctaggaaagatcattttcctttaccattcattgaccaaatgctngaacgtttagctagtcatccatattattgcattcttgatggataccagtggttctttcaaataccaattcaccct

SEQ ID NO: 17894 - DNA, 960 bp, Arabidopsis thaliana landsberg
caggaaaaagaaacataagcttccagacaagtcctccttgtaggagctttttgctgccgtcttgcccgagtgtgctctggacacacagcttcttgagtttgagtctcgggttgatgccgctctcttcagaaagaaagttgacatccaagactcccttaagaaccctccttccattcagaagacccttaggatctacgttttcaacaccttttccaaccagatccctggtcctgaccctcccacatggactcttaggattttcggcagggtcctggatcctgaccacactggtggattagttcagaattcaaacccactttatcccaagttctcgtctttcttcaaaacgttaaagatatccctggaccagagcctgtatcctgagaaccatctgatcgaatggaaaagggatcgatcgcctgctcctctggaagggtttgagataaagaggatagggtgtcaggagtttgcagctactatactgttggagatgaattacgtccctgagaagttcaagacttctcctgctttgatgcaagttttgggcattgaggttgacactcgcccaagaatcattgcggcaatctggcattacgtgaaagtcaggaaactgcaaaacccaaacgacccttctttcttcaactgtgatgctgctctccacagtgtttttggggaagagaagatgaaattcactatgctctctcataagatatctcagcacctatcacctccgcctcccattcagcttgtacacaagatcaagctttcggggaacaatccagccatctcagcatgttacgatgtgcttgtggacataccagcaccggtccaaacggagctttccaatctgctcgctaatccagagaagaacaaaaagattgaggcatgtgatgaagccatatgcggagccataaggaaaatccacgagcacagaaggagacgggcgttattggtagggtt

SEQ ID NO: 17895 - DNA, 572 bp, Arabidopsis thaliana landsberg
taatgccctttacatttatcaataactctatagtaattcttcgaggtctaatttggcttttcatctttaagtcagttccccttttctgctgtcatgccgaagcttttctgcgcatagcttcgtgatcatcttatccttcgtcatgatcgtcttccgtcccactcaagcttcgtcttgaccagacacttgtatacccgtaacctgattccgaagatatctgttcacatatttcacttggaaaacattgtcaaatcatgtttttgaggaccttcggaagccgaaggccccaacagtagcccctcgcaatattaatttgctggaataataaattcatattgcgatatggacgaaggctttaaaccgaagtccaaaaaaacaccttccctttgctagaatagcaacagtcattgacaagtgggacctccagttttcaacgcactaggcgtataaataagagctcaccacgagtttatttggcacgctttcttgccatctgctcttgctcactcaacttttagtctgtgcgcgacaacatttgtttgactttttaaatttttgagcttcggtttggg

SEQ ID NO: 17896 - DNA, 1938 bp, Arabidopsis thaliana landsberg
ctcctcgtttttttcatcctcttctttttcttcttctctagtagaactggcagaaactctttcgatccctaaatagccctttagcctttcaactttcttcttaagaacttcacagttttcatagaccaattttactttctcatcaaaggacattaatttcctttttcttctttgatgcacaagtgtttcaattgcaggtttcaatacatgatcagttctaccttcatgtccttgttccacttgaatccatcaatgacaccaatccttcttgctcattctataccctttgatcacaagatcaaaaatatctaacagatccttgtcttcagaattcttctgtgaaaccaagtggtcatattcatgagaattaacaccaactattggtgtcacttcaacctgcaaagataaaccaaattccaaactgtgtataaataatgcacaattcttaattaaccttttaaaatcccttgtaaattatttaaattgcctttaaccctttgtaaatccttaaaacttgattgtaataactattgtaaaacattttttttatttataaacagtgtttaaaacataaaaaaagccatagctaagaaaatgtaccttgtcaccatctgcaattattgttatagattttgcacttggagacgatggtgatcttcattggagaattaatgaaatatttccactagatgattcatctctaagccaaacttttctcccaacttcagaaccgatgataatgcccatatgtgaattgtagaaacaaatcgaccatattgtttccttaacaaagtgtcaatattgagtttcttcacttcagttacgaaatatgagtaaacaatctgcgcccatcgatacttgcagaacttttcaaaatcactagctctctgcagattctcaattggcagcaaggtagtcggatttcgagctagcaatatcccctccactagtaacaacccccccaatctcattctctccttctggcagcatttttttggatgtaagatcgacaaatcacattttatcattaatccacaaatcttttttctgcttttcttcaaagtctgattatcttctatctaccacttttctatcttcttctcttcacatttggactacttcctgatgcatcatctattggaagtcatgttgttatgttaactctttcagggagaatcacataggttgatcagcaaatacaaaccacaatttgtcattgctggttagtatccttcttttgagtaaatgatggacgatatggcttgaaaaggctatgtcattgcattcaacgaattccactacaggacccaagaacgtgtccattaatgtcttgtactctatcgactctaatgctttctctggccttcatgacaattttgtttgatgaatgctttgatacccttgtaatattatctatttctttgcctggttgaaacagtcttttagggaagtacagtttctttgtactcatatttctcaaaacctgattaaatacattaacacagtcattaaattaacacagttttttgaaatggttttaaaaactatttttgtaaatctattatgcatttgtagttttcgaaacataaacatagtcattacaagtcgtttaaagaactttaaaaacccttgtaaaaccatttttcaaagtcattacaagtcgttttaagactttaaaaacccttgtaaaacacagtcattaccccataatcctttttaaagaccgttttgaaaccattccaaaaacaaaattttaatccttttcaaagaacacaaccgctgaaaataaaaacaaaaaacccttttccaaaccaactccaatcaactggtaacccataaattaagtgaggatctataaatctaaaatacaaactcaaacatcaatctaaatactaaaaaagtttcaaaacgaaaaaactttgaaattgctacagcaga

SEQ ID NO: 17897 - DNA, 835 bp, Arabidopsis thaliana landsberg
attggaatggattttataaactcatcatattcccgcatacttgtttgacgttctggaacagagcttgattcgttggcagtaccaccgccaaaatatgaaaacgggtttgcataagacagtactcttctaacataagcaaagtaaccgccactattagggtctgtgttgttgttagactccgagtaagatgttcctctttgatagacggttgctctttttcgcggaactactacaagtgcttgtctatcgaacaatctcaactcggatagagacttatccagatctgcagagattaagagtaatggagttatgtatctactacactagtccaaactgaccagaaaaaaaaaaaaaaaaaacctaaatggcagaaaacatcatcttcgatcaagatgaagctggttttaaggtaaaatgttctttaccaaataaaaataaaaatctattggatgcattgtagattttacgtaccttggtcagtatacaccttacgtgggtaaggaaccgcaagatcataagcacccagtccgattgtttgattactgctcacataatccttgaccattctcaatatacttgtcacagaaaacttctcctgaaggctactaccatcaggtaatcgaatgtttaaatgaacgtcagatgcttttttggatttttctgcatcctgttcctctcctccttcatcctttggcttgatgggctcttttgtatcgacagatcatgttagattaatgtcccttccactaacacctacaccactatactcttcatttatcacaggtccctgttacctttttctatcaacagaagatcgaaccctggatgtactatc

SEQ ID NO: 17898 - DNA, 1364 bp, Arabidopsis thaliana landsberg
aagtacgaggtggttctactagttggtctcgggattggagccacaccaatgatcagtatcgtcaaagacattgttaataacatcaaggccaaggaacaagcccaactaaaccgaatggagaatggaacaagcgaaccacaacgaagtaagaaagagagtttcaggacccgtagagcttacttctattgggttacgcgtgagcaaggctctttcgattggttcaagaacataatgaacgaagtcgcggaacgagatgccaaccgcgtcatcgaaatgcataactattgtacaagtgtctatgaagaaggtgacgctcgttccgcacttatacatatgcttcaatcactaaaccatgcaaagaacggcgtcgacattgtctctggaacaagagttatgtcccatttcgctaaacctaattggagaaatgtttacaagcgtatagctatggatcatcctaacaccaaagttggtaagctcacatctctcttctctactatgttcgcggttatatagaaatgaaaagtgattggattaaagaatcttgattttgtatgtgcaggagtgttttactgtggagcaccagcattgacaaaggagctaaggcatctagctttagatttcacccacaaaacaagcaccagattctccttccacaaagagaatttctaaaggacacacagagttaaaaggcctaaacaaaaaaaataaaagaaagaagcatgagttattatgtttttcgtaattttacttcccttactattttttaaaacattaatatttgtatacatatatatatatatatatatactctcttgactgtagatttctttgtatgcttttttttattgtatgattaatttgttttttcttttgagaaaaacggtgcaaaaagtagcaaaggttgtaggagtgttggcttaagctcaaagacctaataaaaatttttgttttgttatttgtcatctctcacagtctcgaaattttagagtatctccatccataaaaaacctaaatattttctcaaacaaaaaacattaaatttttattttaatgaaaaaattaaaccaattgaaagaagagaaatgtcataattgcatgtaaatagtatctcatagtttcttaaatgagaaacttaagggcatctccatcaaggaaaaacccaaaaagtttatcaaacaaaaaaaatattagtattttattaaatttttattatatgattaaatttttattttcatgaaaaaattgaaccaattgagaggagagaaatataatgatggcttgtagagagtatctcatagtttctcacttgagaaactttctacactctctcttttctttttattattttaattattttaataatg

SEQ ID NO: 17899 - DNA, 635 bp, Arabidopsis thaliana landsberg
gtctatgcagcatattgattgtatcaacacggttgaatttatcgccgttaaataaatgttatcaagctactatcagctacctaggttatccccggaatattcccataaagcggggttacagaccgtaattacagggagacctttacaaattaggcccgtaatgcgcagcggccacgcagggcctgttacaatgggccggatcacacatgggcctccatgttggacgacgtcgcaagatgagacgacctcgtcacaggtcttcgtccggcgacgtgtgggacgaagggtaagtctgccagtcgtcttgtctccgttggtggagcgaggtcggcgaaggcatcgagcgaagggtggcgtcttcgccttcgccccaacatttgccctccgagggaccagttcgactaagtcatctggtgccgaagacgtcgctagatggtggagacgctgccctcgctcgaagtggttccgcgggggtttttgacatgaccgttgattgacgccgtactgttggattgcgggtttcccgaagcgccacgccctgttggattgcgggtttcccgaagagccgcgccccgtctataaaagggggcgggggtcggcgctttttgaacttcaccttccgcgctccgtgaaaa

SEQ ID NO: 17900 - DNA, 1475 bp, Arabidopsis thaliana landsberg
ggtttacaaaattgatcaaaaactataactctaagtataattagcaagtattaagtaacaagttacagggcaagtttaattttttttatgatacttgatactcgacttgcacttgcaagtaatagaattatcatccttgatacttgacttgcacttgcaagtaatagaattgtcatacttgctactttgacttgtttataacgagtacttgaattttcaaggcaagtacgagtcgagtagcgagtattaggcgagtaacaggtacttgtgctcaatggattttcccgccaaaaactttccaacaatatttttcgcgccaaaaaaaaatcgaaaataattttcccgccaaaactatttccgacaaatattcccgtcaaaacaaattcagtcaaaaaaaatttagtcaaatttgtttgtataaaaaattctctttaaaaatatttttgacgggaaatagatttacaaagaattttaaaaactttttaagagatttacaagaattttaagaggggtttaaaagaatttacaagagtttaaaagaatttataaaggttttaaaatgattttataatggtttaaaaaagtttacaagggttactaaaaaaatttaaaatcctttaaaaactcttagaaatctattaaaatccttttataaagctgtagaagagttcttaaagggtatcaaaagatttacaaagggttttaaagagttttaaaaggataatcaaaagtttataaagactttataagggatgaaaactcttgtaaatccttttacaacctttatttggcttttaaacaatttacaagaattttaaaatatttataaaaggtttttaagagttttaaaaagatttataagtgttttaaaagactttataagagttttaaaaaactttacaaagatttacaagtgttttaacgacttttacaaagatttaaaaaaaaaatacaatgattttataagagtttttaaaagatttacaaatattttaaaaagattttataaggtttaaaaaaaaattaacaaagatttttaaaatctatattcatgcgaaattgttttggaggaaaaatataaattttggcaggaaaatttgaaaacctgaaattatttgccgccaacatagatttgactttctcattatgttcggttgttcactcaacaaaagaagaataatttactcatttaacacatatataaaagaagaattatttagtcatttacctacatgaaaagacattattgcaaagaaacatgaaaaaggtatttgtacaaatccccttattcttatacaaattgccttaaagatgaacaaataaaacaaatgagcctacattaccgaatatgggtcttggacccattaaaatttccccctttgcattcgaattatttaattttccgctaaataagttcaaacgagacatcggaaactaaccgaagagaagaatccaacgccggtagtcattccaca

SEQ ID NO: 17901 - DNA, 2183 bp, Arabidopsis thaliana landsberg
catggtgtttccggtgagctgctggcgggtaatccgagcggacctcgtgccccatttgctaggggtcggctagaggcccggagcgcgctccaaaagtacctgcgggtgatctgccggacccggtcccctttgacggggttcgagggctcgatgcctccctctgatgggattccgttacaagatcgctcccactggtctccgaaatgtcctagggtacctcgggagcgtacccgagccttggttatgtatcgaacgtacccagggtcatccctcgctctgtgtctgaggcgaatgtgaacccttcgagggccaacctacgaacccctgatcagtagtgggcgcagagccgagcggcctgaggcggccgtggaacccttccgaggggccggccatcgaacctctgaccagtagtgggcgcagaacccaagcgctctgaggcggccgttgaaccctccgaggggcagccttcgaacctcttattagtaggggggctcggggcccgtttccttcgcggagaaggatccctttcggggtatccccttttccggtccctgttgtaagagagagaaagaggaaaaggaaaaggatacgaaatcgaaacgacgtggcacaccttttttgacgcggtcgttatggcgaaggcgaagcgtcgcccgcttctcctgccaaagttgccgcctgtcccgccgcggagttaatgcgacggggcaagtggttcgcggggcagccgttgcgcgtgcgcgagtcgttcgaggaacggaacacgggtgcgccatcttcacgccgtgggagagtgttctctcgttgtcccaagaggggacatgagcttggctgatgacttgacggctgcttccgcttgcctgccaccgccattactgccggcccatttctggccgtatcgaccgtcgcgccttctcccgcggctgactgacccatgaccgatgtgctcggttggcaccattgggtcatgcgcagggtcgcctcgagtcgcggcatcggttccgcagtcgagaaggcgcggtactggcgcgagtggccgtgcagtttctcgcacgtagtaaccggcgcgctggttacatgacgtgtgggcctgggcctccttgctggatgcgttgaagtcgaaggggcgcgtccccgtggtgcggttgcacgccacctgcatggcggtccgcccttttaaccgctggtttcggcgaggatggaggagtgcttgtaaccgcggggcggttacgcgctccgcgcgcggcggtttggcttcttctgttctgggccagcttgcatgacgtgtgggacccagcccccgtgtcataggggggggaccctggagcacgttggtgatgggtattgtctgcagggcctgagcgggcaggtgtgtctgtcttgcgtagaattgacacccttggcaggagcgtacaatcctagtggcgtcggccacgcggtcggccagtagaaaccttgtcggaaggcgttcccaacgagggctcgagatgctgcatggtgaccgcaagcccccgagtgtatctcttgcaatagctcctgtccttcggcgacggatatgcatcgttggagaatgcctgaggggctgcggtggtagagctccttttcatcacccagtaagacgaatgacttggcgcgccgcaccagtcgccgagcttcggccttgtcgaggggtagctctcctcggtggagatattctaggtacggggtctgctagttttgattatgcatgaccccattccgctctcccttgacacgtagtgcctcacctcggcggccgaggatgcctcgggctgggccgaggccttctcgggctcgggcgtgtcgtcggtcttgatggagggttggtgcaggtctcgggagaagacgttcgggggaaccgttgtccgtcccgaggctatcttagccagctcgtccgcggtctcgttgtatcgtcgagcgacgtggttgagctcgagcccgtagaacttgtcttccacgcgccgaacctcgtcgcaataggcttccatctttgggtcgcggtagtgggagttcttcatgacttggtcgatgacaagctacgaatcgccacgagcgttgaggcgtcgaacccctagctcgatcgcgatgcgcaacccgttaattagagcctcgtacttggccatgttgtttgacgccgggaaatggaggcgcagcacgtagcggag

SEQ ID NO: 17902 - DNA, 480 bp, Arabidopsis thaliana landsberg
ctaaccgtccttcttataaagagattctgaatacctttcacctccgctcacctctgtatctgtagctatcttgatctcagcctgctcatcacattcatcaacaatttctaagtttacctttccttcttcattctcctgctcgacttcattatcatcttcttcgtagacagcttgaagactgatttcaccactgttttccgattcttcttcaggttcctgatgaccaacattcacttcttctatatccacttctaagctatccacttctaagctatccactatgaacccatcaacaatgatttcaacactagttgactggaaaacagcatcagacaaccttttgtcttccaaaagatctgtcaagttatgaaattgaaaaggaacacttccctcctcttctcgtagacttgagaccagcttatcaagatacacaaatgatgattctgcccacatcctcagctttgcacccaactgctcaaa

SEQ ID NO: 17903 - DNA, 1053 bp, Arabidopsis thaliana landsberg
ttttttccatccccccggtggttgtgccttacatttgaaacccatgattggcctcccatactttttataaggttatatatccattctcatcagagcggaactccattccaatatatatttcatctttcttctcattatcattatttgcctctaaagcagcagcctctttagttacaacgtcatcctcgttgttagctatttcatcttcttcttcaaattcattggccgaagcttcgttttcccttattgagtcatatttttcctcaaccaaaagtttttcacttatatgattactctcccttgcaattgttcttaacatttcctgatcaacaagttcaataacaaaaaaaaagttgctctaaaaaacataattcataaaacaaaattaatattaaaactcatacatgtattaattataattagttgtctctatttgttcacaaccaggcttaagaaatttttcttcaacaaagataagagaatctgaaactttacctcgagttgatgattaaaaaacaaagtattgttccttcttcaaaaaatctgtcgtgccttttaaaagaacttctaaagataagttgggttacaagaaataaaataaagagatagcatctaaccctaatctatatctctgattaaaataaatatttatttatctataaaaaagaggagaaaacgtcataatttttttctttttattaaacttcttgtctttttcttcaaaattgctaaatttcattattaaaacaaaaagaggaaaagacttgaaaaacgtcagcttaatgtacggaagtgaataaaaagatttttatttcttttttctattttgtaattttagctttaaattattatgtagtttaagtatgatatgacatgtttttattgggtaatgaaaagacaggtgaataaatgggttcaccccttcacccaagtttcgttccttggagagttggaaactttatcttgcccaacaaaagccatgtgcattgttacaacaacctgtttttaattttggaaaatagattagcaacttataatgcagtgattggtttt

SEQ ID NO: 17904 - DNA, 566 bp, Arabidopsis thaliana landsberg
gaaaacagaaagtgtaataggatacataataagtgaccgcaagtggtggaaatggccctgccctccaggtccctccaacacgcgttgcatctcatgtcaacctctaatataagtatctcaagctgctacgcacctgcaaattaacttcatatcaaacaagatgaagaaccatgctctaaatgaaacttccattctccactgaactaactcattgagatcaccaattaactagtattcacaatacaagttttaattaacctatattcattctaactactgaaaattgttaaactgcaaacacgaatgggtacaaagtaagcattaagacctgtcaaacttcagtagttagcagttcatagtcatcggagaggtacaaaactaacagtaactgtgatgatcaactagtttctagtcataaaaacgatttagaaaacggaaaccctagaaattgggcatatgcatagatttcagagatcggcaaaatttcgactgcacagtcccgaaattaagggtttctacatcacagcgatgaactcaactcaacagttagattccgacttacgatt

SEQ ID NO: 17905 - DNA, 399 bp, Arabidopsis thaliana landsberg
atttgggattcagctgccattgcttatcacccaacaagtgcgttggttatctcagaagacaaaacttgtctacttggaggccgatgaggagtctttgggcctttgggcatctgagagggtagatcaatgtcttgttgctacagcctgataatcactccccattagaaaaggtattgtatactccagagcgcttatctgaatgtacaacgcttttacatggagaaaagcctatataagaatctgttgactattcttattctcgtactatctgggaaactgatactggctattccgatactgggaaagaagagtccaaggacctcttggtacaggctactgacactgacaaagtggagtccaatggtcttttggaacacgatactgtgactgagaaagtgg

SEQ ID NO: 17906 - DNA, 1498 bp, Arabidopsis thaliana landsberg
ccaagcccagaagataagccgaattgactgaacccttgttgtggaattcgcgaaattaaatctagtggagactgcacgtttaaagagataggtctaatcagcctacaaatctcatgacttggccacatggttaaacaaagaagctatttataagatggactttgcaaatccatatttaaatatagaaaaaatcctattgggatcatggtcttaaaaggtttaaaagcctcctcgggcaaacacttcttcagaaaataaaaaagcctacttaggcgatgaagtagtttgaaaaataaaattcaagtttttataaagtcagaacccccactataaatcctcagccacctcgaattcagtttgagttggctcgggatcgactgggtccacgacagccgtctcagtctcatctgttacgtcagcgacaggctattcggtgggaatcctagagttcgaaccatcattatcctcgatgaccactgtttcggtattcgtggatggaggaatttctggcgcgatggctaccgttaggagtgtccaccggcatgatagatacctcaggttccatgggatcactgggacttgagataatcatctcgaatcaggaaaacgcaagtataacttattttggtttggtgtcaaagtttgaagttttaaaacttaccagcccaatctaaaccggactcgctcaaagcaggcgactcggtaaagaactcctcaaactgttgatggttgaatgatgaagatgggagagcggccagacgacttcgcttctctgttaaaacggcttccaattcggacctttcttgcttctcggaaaaatcctcgtcgtgagtttgatccagaaggagtaagttgctttcatactctttgatgtctgattccagctccgtcctagttttctcggtctgaatgaaaaggatatccccttgaatcaattccatcccacgacctttcacctctcttctggccttagacgccaatttggccaactcagcatctcagagcttaacaattgcattgtacttcgccttgagttcggagaactaattgttcaaatcataagcggctgattcagattcaaagagccggcctttagtagtcgagagctcatcctgaagcttgtggtacctttgatattgatcctgcaactcgttgttcgacttcaaaagctcggaagagagatggtcaactcagtcttctagtttctgctttaaatcagaagtagagcggagatcggcctcaagggaagaaagcttgcccttccaagcgttgatatcttgctccctactaagcagtagtccctcatagtgctcaatcatatcgttaagttcgttgttcgcctgaatatacccaaagaagtaagttaaggtgcgttttaaacgacgagattgggagaaatgaaaacaagactaacccgagatgaataatgcgcgaggagtaaaaagcgctcgcgaattgcaggacgccacctgtcaaaggttggcaggatcgtatcttt

SEQ ID NO: 17907 - DNA, 1125 bp, Arabidopsis thaliana landsberg
ccactttgttactgattagaggcttacttcttgatttagcctccaaagaattcttgatttaattcttgataaattgattgtaatttctaatttatcatcaacagacttgttttttctttttttactaaatgcaaaattaattttaaaaaaaaaccttgtttacaatatatgcaaccttaatctgaaaagtttctgaaaaagaaaataagaagaactagaccatcgcgttgctaacagaatccctcatgatgtttgttagagccgaggtgggttatgttgcttaatagattgtgtactgttcgatcaatgagcttgatgaggtggtccaaagtgtgtggtaggtcgccatgccttttaccgttgcgttcaccccaaatagagtaacttgtagcctgaaacacataacggatgaggaagcgagtagatgggacatgagaagccaattagttagtttctcccacacccgattggagaagggacatgagaagaaaaggtggtcgcgagtttcgcacggactgggggttgagttcttgaaccagatacctgtaaaccaaagctgcagaggacttggagacctttgttgagcccaagtttctttagcggagaatttgggtcgaaacttgtctcctaagccacgccaaagagcaacatcgttctcggagcagagaactctgtttctaaagcgatctagtttgagctcaaccttgtttaggttttcagcgtgatggagtctacgctggtgaaagcgaagagcatcgattacagtggatgtagattgaagtccaaacggtgccccaagagactgtgcaatggtcctagtgaacaccacttatcaaaccagaaagaggtctgcagaccacttcttacttccacaaaacagaattgtgttgtttgttgtcgatattggagaagttttctccacatctaagagccagattgtgcgttatgctttatagaccaaaaagagccattccaaagaagtccacctttaatccaatccacccaaagagaagaagctgaagtgatgccccagacgagtttaaaacaacaaactctattagcctcaataaaagatttcagccccatccctccctgggggtttggaccacatacatcttcccatac

SEQ ID NO: 17908 - DNA, 921 bp, Arabidopsis thaliana landsberg
caaactttctggtaggttgagctggtaggccacttccccacgctttgcttggatctgatatggcccgacgtaccggggtgctaacttgcctttaactccgaaccttctgactcccctgataggtgacaccttcagatagacatagtctcccacttcaaaactcagttctcttctccttcggtccgcatagcttcgttgtcttgactgggttgtcttcaggttctcccgaaccattttgatattctcttcggcttcaagcaaaatgtcggggccaaacacctgtctctctccaggctggtcccaatgcagcggagtcctacaactccgtccatagagtgcctgaaacggtgacatcttcaagctggcctggtaactgttgttgtaggagaattctgcatacggtaaccttttgtcccatcctgacttgtcttgcaacgcacaggctctcaacatatcttctaggatctgattagttctttcagtctgaccatccgtctgcgggtgataagctgagctgaagtcaaatgtgtgccaaaggcttcatgtagctgctgcaaaaatgagaggtgaactgtgttccctgatctgacactatcttctttggtaatccatgcaagcaaacaatctgagacatatataactctatcaacactgcactactatagctggtcttgattggcatgaaatgggccgcatttgttaagaagttcactaccccctagatggagtcataatcgactcgagtgcgtggcaagccaactagaaagtccatcccaatctcatcccacttctattgaggaatccacaatggctgcaacaaacctgtgggcctttgatgttctaccttaattctttgacggctgtcacatatggacacatactttacgatttcccttttcaaaccgtaccactaaaatcttt

SEQ ID NO: 17909 - DNA, 709 bp, Arabidopsis thaliana landsberg
cgttgcctgtggcaaggtgatatccgtttactgtggcgcactatatccgagccggaatcataaggggctgagccttcaggaccttcggaatgagcggacaggacacctgcgaattgtgcttatagaatgtgcgtgtgccgcgcgaaaatctggtgcgcatggtcaaagggcagggcttcaagatgttgatgaaggagctggcctgggagcggatgatcgtggccgttctctctcaatcgtccgccgagttgagctggcaactggccagggactacacggtccagcgcaaggtcttcgggcacccgataggcagctaccaatacaaccgcttcaggctcgctgaaatgcgcaccgagatcacgatcggccgtgtatttgtcgaccgttgtcttgaactcgtactcaagaatcagcttgaacaggacgccgccgctgccgcaaaactatgggtcactgaaatgcagggacgcatcaccgaccagtgcctgcaactgcacggaggttacggatacatgctcgaatatccaattgcccgtatctacacagacacgcgcgcgcaacgtatctatgccggcaccaacgagatcatgcgcgaagtcgtggctcgatccatgtaacagggctacatgttattttacataatatacattatgcgcaatcgccaaagcccccagacggccccgcaagcgccttttgtacatctcccccg

SEQ ID NO: 17910 - DNA, 1190 bp, Arabidopsis thaliana landsberg
tggatgaagctttgacgaacgcttctgcaatcggtgaccaacgcttgaaaatcttacagtacaaactcatcctctcctctgttctctcttccaacgatcttctccaagctcagagattcatcgatcacagtaatttctcatctcccttctttctcatggtttcaacttcataagagattcgaaaactgctttttgttcttatcgaattcggtttatatcagaatttctggtttgattttgatttttgcttcctcacaatttttccagttctttccgatgatgtcccgttggtggtttcgaggcagcttttgcagtcttttgcacaagagcttgggagattagaaccggagacacagaaggagattgctcagtttactctaacccagattcagcctagagttgtttcctttgaggaacaggtttgttttctcttcgtgataccttattgtttagcagcaatcgtgtcctttttaaaaccctaattagtttatctacttaacctaagttgagaggtatgtagagtcgctttgctattgtaccgctttggtatgtgaaatctacactgaaagctaatttgagatatttgtttactaaggatgctgtattttgggataactgagacaatgtacgttgtgttgttttacaatctctttattctaagagatgaaactgtttgtggtgtatttgcaggcccttgttatcagagaaaaacttgcgggtttgtatgaatcagagcatgaatggtctaaaatggcgaagatattgagtgacattgatttggattttggaatgaggtgtgttgcacaatttctagtttctgcttttgttgtgttctgttgcttattttggctttgtgctattcttttaatagggtcgttgaccacgacttcaacggtgggagcacttcttgtctatgacatcaccaaaagacagacctttgacaatgtcttaaggtggctacgtgaactaagagaccatacggattccaacattgtgatcatgataactaggaacacagctaatctaaaccacttgaattcagtagctgaggaagatggtcacactccagctgagacagaaggtctctctatcttggaaacttctgcttttgaagccacaaatgtcgagaaagcatttcaaactgtgttagcagagatttaccacatcatcagcaaaaaagcgtggcgctt

SEQ ID NO: 17911 - DNA, 604 bp, Arabidopsis thaliana landsberg
  unsure (1)..(604): unsure at all n locations
gaaagagaagagggaaaatgtctcaaacgatatttaaaaaaaaaaaagatatttcaagtgttgtgtttaattttgtaaagagtagagaaaaaaatgaatgaagaaagagaaaaagtaatggttgtaaactatggttagtttgaattggttaggttgagtcaaatgtgtagtagtaaaaaaacttaaaaaaatgtatactcctcttaaagtgtttcattgcctaattgaatttcaaaaaagtatctccttgtctaatattctctttgtttaatcatctatatatccaaatgaatcggtttcctatacaactgtttgtcttattaaagcaatcctcattagttagcatctctgattatggtttaatgctattgataaaacttttaaaaaatttacattatgatggcttgagtttacattttagaaattaaaactttcgttaatttcctctttggtcaagaagaaaagaaaaggttaaaaaaaagactaagatatttataaattttgcatcaaggaagtgctgtagaaaataagaatatccttttgtagaaaaattgcanacttttttttaatctatatatnatatatngncttcttttttttttat

SEQ ID NO: 17912 - DNA, 991 bp, Arabidopsis thaliana landsberg
tcaatgcaaaaaatctctaatgtgactagatccattgtgagaatgttgctttgatataatcgtatgtttttatacaagcatgtgtttatcgatgtttaatgggactttaccattcataaaaatgtgattttccctttttaaatttgtaaacaattgtttattttgggcaaattataaattagaatatttgttttcccaaaagtcttattttattttattttatggttttagtttaaggtgaattaggtgaataacataaatgggtaaagttattaaataaataacgctataaactgaagaatgcagaaagtaacacaagtggggtgtgtaatgacaacatactccttcacccagctctttcattcggctttaaggcgcgtgaagaaaacagaagcgcagtgaattatgcggacgtggccttttgaggaggaagaaaagtttgagttatgttgagaagaggatatagaaatatgattaaaatagattcaccttattaatcttgcttcctatgttgatttaacaatattacttggttaaagttaataatacattaaaaaaacagatttttttttttttatctaacatgatttgaattttaaaaatcagaaacgaattttttaaatgatgaatagtggtaccaaattctatacatatcaacatagaaagatagaatagtatatatttgttcaaaccaaaacgtgtgttctaatgaatccaaatagtcaattaaatactttttgatggaaggatactaaaccctaatggataatatgtagagaacccaataattttaatctaaaacaatgatcaaatcacttaacattcttaatcaaatcaaacaattcattttaaaatatatatagtacaaggtatacgtaaaagagtatattcacaaaatagaataatatctctcaaaaatcccccaaaacgttttaaatataaagtaatggtgctggtagtggtggtggatagtagattaagttgcgggaat

SEQ ID NO: 17913 - DNA, 509 bp, Arabidopsis thaliana landsberg
gcagcgggaccaattctcataggtctagtagaacaaggaacgccattcatctccgtcatattcacggatctgttcactttcatcagaaaacctaacaaacccatatccttttgtacgtccagtgactctgtcaataacaacctttgcacccttcactgacggataagaggctctgaacgtctcaagtaagatataatccgtaacatcagcagccagatcaccgacaaatatcgtgtagtccggtgaatcgtctcgtttatctcctgaactcaatgatgcccagttcagtctaaagagctgatcaggaaagctcgggataggagcgttgatgaatgtttgtagaactctttcagcagcagcatgagatgcgaattcaatgaaaccgtatccttcaacttgaccggtttgtttgtacgaatcactttagcagaaaccatctgcaaaataaatactgatagtgtctaaccaactagtcattatataactagaacagacactcattaacttat

SEQ ID NO: 17914 - DNA, 1644 bp, Arabidopsis thaliana landsberg
tataagcactgcttttgcatcatcttcagagtattttcctcccctgtaagagaagtaaatttgaaatagttagacagccaatagaacatctctaagaaggatctctgaccataagttaacaaatgtcataacaatctttaaaagcagaccttgctagtatcctgtcaagaagttcaccacctccacataacctgaaagttgaaagaaagtaaatgtttattcacagctaaacattttgaagtaagccaagtcgggaaaataagaatctgatagctctcctagtagattcaacatgacacaggaatatataagcacatgattgtcttactccataacgatgtaaacgttggcattgtcctcgaacgcatcatagaattgtaccaaattttgatgtccagataacgcccgcagtattttcacttctcttctcacatcctctatagatattgcagatgtcatctgccaaaccaaagctgatgagaaacagtctattgtggattaagctaacactaaacctatctgtatattacaccaactaactcgattacatgattaactttcttagtcatcaaataaggaccatcaaaatttcaattgcttaatgacaattgacaaaagcacaaatgtccatgttccaatttattgaccaatttaaaacgtttagaaatgttcacagaaaagtcagcaatgctaatctacaaccattgaaaacttggctattgaaaaacatggatgaaacataagtgtcattgacaaacttcaacctcatctgtgttcgctattacttgtttttgtattaatttctatgcgtgaaagtctacatacgctatcaattttttcaaaaagatggctcaaacaagaggacagtaagctcgtagagaagaacagaaacatctcaagagaccgtaatgatcaaattacaggttcatcatgaagcaaaaggagactatgatggtttgttcttctaccttgaaacagtttaacatctactaaacaaatcagacaagacacacaaagaatcttcaatttgtcagatatagctatcactacaatgatgaagcacttgagccaattgaagcagaaaacttaagatggaaacttgagaatttggaaaaagtaaagctgtaaaaatgaccttagattttgggatgactttaacagcaacctcctgatctttgagctctcctttcttgaacttagcagagcaagtatacccaaaatgccctctcccaatctcttcccctagctcaatcctactctgtaactccttggaaaacccaaatcttttatccagccctacctcttccctctcctcctcctccttctgctgcctcgccgccggcagagcagcctccttcttctccttcctccgccgcagaacatcccgtatatgtctcgccggtgacggagggtggaaagcacgcgcgagctgacggagaggagtgctggtaacgctcttactctctcctcctcgccgtcgcggctcttgttacggcggtgccgggcgggactaggcgtgtaaaaagggaaaaaaggagagcctttacggcgggagatgaacgaaccggtgatttcccgggatgagcaggggtagaatcgtcattttggagaaccgcgtctttgggtgcgtaaggattaggtttg

SEQ ID NO: 17915 - DNA, 522 bp, Arabidopsis thaliana landsberg
gattgagattacacacataaaacggttgtttatacgtgaaatcagtcattgacagaaccttctcacctttagtactcactccaacaatggaaacgttatgagccgttaatttctcatccttcaacttgtaggcatactttgaccactctattttctccttgtcctctagaacccacagacgcaactcaatagcatcatcagtgtaatcatcacaaaaaaccaaacccaactttcccttgtagtttatcacttcacaatagcttccagggtaaataaagctgaatgtctcagacctcacatcaaagcaaacaaccacaaaagcagtcataaactcagacgtatcgcctaagtaatacatgaccccattgatacatatcccatcactcgcaatgtcatgttttacagaacattctatctttctccaactcatttctccagttccaaatgttagaactgtatgatgatcaggaccagaagggtaagccatgaacaacaccttgtactgtttctcatcggatcaaa

SEQ ID NO: 17916 - DNA, 1292 bp, Arabidopsis thaliana landsberg
aagtacacctttgtggagcaagtgaagaatcttaattcatgtaccatcctcataaaaggtattaggacgacttttatgtcttcattaagttttgatggttcatttgttcttttagtagttttagtgttcattcatgaatttcttgggttttgtagggcctaatgatcacactattgcccaaattaaggacgctgttcgtgatggtctgagatcggtcaagaacaccatagaagacgagtgtgttgtgttagtaagtaccttatatatcttgaagtttttttgttaacattgctttatgtttctccgcaatatcaaagaaattgttaattcgtgatcaaaaccctgggtaaggttagcatatagacctattgtatatgttttgcgttatgttaatgtgtggttgcatgtttctgtagggagcaggagcttttgaagttgcagcaaggcaacacttactcaatgaagtcaagaaaaccgttcaaggggtaagttgatttcttcactcgtactctaattctcgcaacattacttaatgcatcccaatattctaaattgctaatactatcatgaacattgcagcgtgcccaacttggcgttgaagcttttgctaatgcccttctcgtggtgcctaagacacttgcagaaaatgcaggtcttgatacccaagatgtgatcatttctcttacggtatgcattcatctctcttatcatcttctgcaaactgaaatcaattgttgaaggaacaaagaattataattgctcattgtgatgcgcttatgcagagcgagcatgacaaagggaacgttgtgggactgaaccttcaggacggtgaacctattgacccgcagcttgctggtatttttgataattactcagtgaaacgccaacttatcaattcagggtaatgttcgacccaactagtcaattctaataaaagctttgggtttcggttgaaaccatttcaataaccggctatttgtttgtgttgcaggccagtgattgcgtcgcaattactttcggtggacgaagtgattcgtgcaggcagaaatatgaggaagcctactgctcgaagtcctatgcttttaactcggcttctaattcgtaagcacctcaaattttgtttcttggtgcaaatcctgaatattgggaaacatatgtttggtccttctttttggcaatgaaaaacatatttgaatctgatctttagatgttgtggatcttatgcaaaatgataaagcataggaatacaaaatctattcgaatctgatctctagatccagtgaatacaccca

SEQ ID NO: 17917 - DNA, 552 bp, Arabidopsis thaliana landsberg
tacgaatcctgtcaacaactcacctcccgcgcaaagctccataactaaatgcacagaatgcttatcctcatacgctcctttaagctccacaatgtttggctgaccggtcaagtgatgcataatctgcacctcccttctcacatcctcaatgtcttctttgttcacgagcttccttttagcaatggtcttgcaagcgaattgcagccccgtggccttttgcgtgcagagatgagtcaccccaaactgtccacgacctagctccttacccaatgtatatgagctctttacatcttccattggtcgccctaagacaggtcctattggtccttgtttggttgcaggaggaggagatgctggcgggtgtttagaagctctaacagaggcttcagcggcaccaacaccgccgcctccattttccggcctcggttcttctttgttattatctgaatctcttccatgagagcaacaatttcccattgttgcaattaaggggagaggaagtaaaagttctcaaccaggaagagaaataaaaaaaatattaaagatcttttc

SEQ ID NO: 17918 - DNA, 631 bp, Arabidopsis thaliana landsberg
  unsure (1)..(631): unsure at all n locations
tcgtcatatatatttatcatataagaataataataaattataagagctggctagggggtgacatgttttatcactccatcttttgtcaactcactatatactcctctctcctcctaacacagaggcacaagggcaagaagaaaagagagagatagagatatataaatgaagatggcnnnnnnnnnnnnnnnnnnnnnnnnnnnnnnnnnnnngcagaatccgctggtcgcggtatcttttccgcggactacttgcttgggatctagtttttctcctcctcgtcttcttcgagtttcgtgtgttgccacaaaccctaggtgagttttatctttttagatcttcaattcgtttccttgatcaagttttttctttttcttttttctttttttcatttggctttatactggttaatttcgttgtatatgtttaactcattggttatatttaactatttgtctaattggcaaatcctttcaaaaccaaatcgaaacggtacaaaactgatcaaaaagttagtaattttttttcatatagaaaaatggcactgaatagtgaaagtgaacaacattgaacttagaaatacttcaaattaatctatagaatngattggtgtataagaaaatcctacaat

SEQ ID NO: 17919 - DNA, 486 bp, Arabidopsis thaliana landsberg
tacgtcgtgtgtcgtaaagtttcttgtcctctcactcaaatcctcgcctaaaccatctctcgatcctccactagggtggaacgatcctgcagtcctgtctaccatactgatcaccgagctaatctcacttacagattctgccaatgattttggtgatgctgcttgaaactagaaagtacagacattaaacattaggtcagtaaataggagaaggtaatgaaagtaaacttggataagctatagagtttatgatttctttacttaccgcttttataagtcgatcaataggccgctcagtgattggctcgggcggaggaacagataacagaggagtttcttgtgtgcccagtttactagaagaatctaaagttgagtttatttcaacaccagaaactggagactcaacagatataggcatttcagaatctccaggaactggagatggagctggagcaacaaaggcgagccactagacttcatggggtg

SEQ ID NO: 17920 - DNA, 3931 bp, Arabidopsis thaliana landsberg
ggtgttgatttgctaagtcgaattccccatttatcacagaagccttggaaacgggtcgatataaattgcgagccgttatctgtgacaatctcatacggtatcccgtggcgacataaaatatgtttccacacaaagttctcaacttgagcgtcctttatgctggcgtaagattcggcttctatccatttagagaaatagtcggttagaacgaggactaacttttttttgcttcgaaggatgcattggtccaattatatccattgaccatcgcatgaagagatatggcgaggagattgatgacaagagctcggctggttgatggattgtcggcgcgtgcctttgacatttttcacatcgttttgaaattttttcgcaatccttgatcatcgttggccagaagaatccgtggcgttttattttgatggctaaagcccttcccctagaatggtttccgcacgaaccgccgtgaatttccttcatgatcttgcgagtcgcttctccttccacgcaggtcatcaaaggttcggataatagccacttgtaaagttttttccctattaagacgaaacgtgcagcctgagctttgagttaacgagctttccatttatcccaaggcaatttcccctcggatatatagcttatgatgggttccatccattctgaatcacaatccaagtctgagacgtcattcgacttcgaaggcatcttcgcaattcgcggcactctgcacgggaaaagcatgttcctctttgtcgagctcgatgctaggcttttcgattaattcgactgggatcaccctcctcaggttcaggtcggatgtggaggccagagcagctagggcgtcggccgccgtgttttctcctctgggaattctggttaactcaaactcgtcgaattgcttcgcttgattttgtacatgagctatataagcttctatttgttcatcccgagctatgtactcaccgttgaactgattcgcgacgagctgaaaatcgtaaaaagcccggatttttgagatcttcagcccccaagctaacttaagcgcttcgtattacgccacgttgttggtggcctcgaagtttagtctgaatgattgctcgagaacctctcctgttggcgaagtgaggcggatgcctacacccgaaccttgctttgatgacgagccgtctacgtgcaatagccaggtggtattgagtggattttcccaggcctccttagtgggcagttcgacgataaaatcggctgaacctgggattttgcacatgttttgttccgatactcgatgtcatattcgctgagctcgattgtccatttagctaggcgtcctgattggcttggactgtgtaagatagcgcggagcggcatggatcccattactatgatggaatgggactgaaagtagggtcgcagtttccgagccgacattatgactgctaaggcgagtttctccatttgcgggtagcgagattccgcgccggtgaatgtttgcgagacgtaaaaaatcggtttctgttcatctttgtcttctcggactaacactccgctgactgcagtatccgatacggcaacatacaagtatagtggttctccgattacgggttttgcgaggatgggtggtgttgccagatacttcttgagttcctgaaaagcttcttcgcaccgggtcgtccattcgaacttcttgtttccccgaagcacatcgtaaaaggccaagcatttgtcggttgaacgagagttaaaacggttaagggccgcaactcttccggttaggcgctgcacttctcgcttgttctaaggtaacgccattcccaaccatgcctcgatttgcttcgaatttgccttgatgccgcggtgcgtgactaggtacccgaggaactctccggatcttactctgaagcggcactttgcaggattgagtttgacgttgtataggttaagctgcttgaaacattcgcgtaaatggagtatgtgatctttctcagccatagatttcactaacatgtcgtcgatgtaaacttccattgtcttcccgatctgtaatgcaaagattttgttgacgaagcgttgataggttgccccgacgtttttgagtccgaagggcatcactcggtaacaaaagatgccttgttctgtgtaaaaagcggtttttcttgatcttcggggttcatgatgatctggtagtaaccagcaaaagcgtccatgaatgacagtagcttgtttccagaagttgattctacgaggcgatcgatgtgtggtaatgggaagctgtctttcgggcaggctttgttaaggtctgtgaaatctatgcagactctccatttgccgtttttcttttttactacgaccgggttcgcgatccaatcgggacatttcgcctcggtgatggatccgatcctcaataatttctctacctcggctttcacggcttctgctcgctcccgacccaattttttcctcttctgcttgatgggtttgaaagtcggatcgatgttgagctcgtgcgatacgatgtcaacacttactccgggtaaatcttctggggaccaggcgaatgtattgacgttttctttgaggaaggcagtgagttcagctgttagttcttctcctagatctcctccgatttctacgcatcgctcgggcttttcgtcgtcaaggcagattaagactaccggatcgggagttggtgttgtagattcccgagcctcctcgatccttagctgctataactgctcggaaattgacttcttttcagctcggccaagcttggccttcttatgattcgcgtcggccgtcgattcagtgacggggttcctgagcttgtgtgctgccatgaagcagattcgagcatttttctgatttccccagatggttttcacgccgtcgcttgtgggaaatttcaggcagagatgatatgtcgaggcgacagctcggaattgatttaaccatggggtgccgataatcgcgttgtacacggtcggctggtcggtaacagaaaaatcgacgatttttgttaccccttttgctcggactagcaatttgatggtcccgagagtcatagtggtttcatttgagaacccgagcacaggtcgtggagttggcacgatttgcgtcatgtcgatcttcatttctcgcagagttgtaaggaaaatgatgtctagtgtgcttcccgtgtcgactaggactcgttcgacgttgaaatcaccgatggtcagtgtaatgactaagggatcgttgtgtggacggtctaaaccgttggtatcgctttcgtgaaaggttactttgtcatttggtccattaaatggccgcgcccagttacgattcgcgtcggctctcctttgatatgccttgattgatgccgccgtgtcttgacagaaagccgaatcccctaaaattgtgaaaatccttccccgagcagcttctggctcatcgtcgtctgttttgcgattacctcggcctcttttgggtccttcagggttcgccgtgggagctgcctgctcgggattggccacagcgttgacctgctcggttttacctttttctgcttctaaatcttcgatggtcaaacctcaaccaatttctccggttaggaattttgcagccaaccttgctccgaggctacgacatctggaagtatgatggccgtaactcttatgcaactcgcaatattcttgctcgtttcctgcgggttgatcctttgtccaagtgtaggattcttgaccgcgacctcgacagcggcctcgcccttggcctcgggcggcttcgcctcggggtgtatcggcttggtaattatgggctccggagaaatttcgtccttcatggtgaacgaatgtcccgccttgggcacctttcttgtggttcagagcactgggttgaggtttatcggtccgaggcgtttgcttggtcggttcgtgtcttttggctagtagttcca

SEQ ID NO: 17921 - DNA, 1363 bp, Arabidopsis thaliana landsberg
tataaagtgcagcggataatcgacgtcgtcggtatcgaggaattgggcaaggcctagcccactactcctcgtgctcccctcttgccggagcaacatcccactcgaccgtccaacccggtggcagggtggtaggccaagtcacaccatcaaccatttcctgaatggtacctacaaaaaattatgccacaagcaaagctgagtatactaatactcagctagacttaaccggtgtgaggagtctactcctctacctctagactatgcagttgtttggctgaggggtttggtttgtcaaaagcactagctgtgtctaaaattaatttttaggttttcagattctatcatcatttgcttagctagatttgctccttctaagcatagatggtgacaagcatttagttcactcaagagattatctcatgtaacctcatttcacttcttactcgatgtagtacaaggtgtcaagcagtctcattagcagcgagaagcaaatgattcgaatcgagttttaaccttgcaaggtaaacctaaacaaacgacatgtctgggcactccgtccccacacatgtcaaccgtccccatcgcttccccgtccgcgtccaggcgtcaccgccttagcatacaatgctccactgaccccggccgccgccgtgaagtgaccgcacttgtacccaccatagctagcataggagacccagtctcaggtcgcgtgagggataaagtccgtgcccggcttcactcaggtactaggtttaccggttaccatattccccgacatgtgcttagtatgttcaaaagcttgacttaggtatccacacattaatccttaattcctttttcctgtctcatggacaaggcatcctccctgcatccatgtccatagactaacatagatcccgttatcaagatgaatacaatcaattcctgacctcacgtgagtgctagaaaaaacactcgacttctaccgagatccctaattagtaaagcaactactcgacctagcatactagtatccatttcaaaaggaatcctgagttagtgcatctagggtttcaggtaactcctacacttaagtgcacaatacaagcctacaaacattaagtgcagtaaaatagcatatagaatagattatgcataaaaccggggcttgccatccaaggttggggcaggcagatcctcgatggcaggctctggtgctggctcctggactacctcctgagcaactccttgctccggaacgaggatgtattccccgtcagcgagattacagtctatcaaatgcaatgaataagatatatgcatattaatgatagggcaatttgtaaatgctatgcgtagtacatttttgatacaatcgtggatc

SEQ ID NO: 17922 - DNA, 592 bp, Arabidopsis thaliana landsberg
  unsure (1)..(592): unsure at all n locations
gaaacaccccagaataatcaaacaaatttataaatttcttatttcaatattgaaagctgtgcgttgatgtaacttgattccgcaaaaatgcattacaaaaatctcaaacgtctgtatgaaaaaattcgctttctttcgtaccaaaccacaatttagcacgagaatcataaattaagctaataaaaaaacaactcaaaacagagacgtaactatgtgatgttcctgataatatactacttactactaggctttgtcttcgttgtcgtcagaatccgaagcagctccgagtttctgttgacgggtagttggaagagaatagtttcgtcgctctttgcctcctggcttcgaagaggcattaccgtaccagatcatacccagtactgcaattatcattccaacaaccacgtgcaagttaagaccttctctaccaaagaagaagaagccnnnnnnnnnnnnnnnnnnnnnnnncatgtgtcccagcacttggaacgatacagctgtgaatcttccgatgcagatgaactggcttaggttggttccaatcgctattgtgcacgacagggttataaacagctgcagaattcagggacat

SEQ ID NO: 17923 - DNA, 1187 bp, Arabidopsis thaliana landsberg
acatcttgacatcgtactctttaaggacaagactcgagaaggataatgacaaaaaaagaatgcccatattgcttcgatgcctgcctataatgatgcagtgatgggtaatcaatcctgggaatacatactctatccacaactatctgcctccaacttgggcatcatctttggctatttaatgaatgccaaatgtatcatcttttgggcggcacacgaaaaacacatctcaaaacatagccccatgatttcctcagaagagttcttctgagttaaacttgttccatgcttcctgtttattgtcatgacaaaggagatgaagccagcaaatgtggatttatacaattgtgcggttattcgtaaaatgcaaggtgttttgtcggtggcagctgaagtagcagtgatggatttagttccagaaagatggtgaattcacttaccttgagcatgtcgaaaactttctcggcaatgtatttctgctggagattggctcctttttgctgaactttgtcaggatgtatacagagagtggccttcctgtaaactttcttgacagatgcaccggtaattaaatcggtcaacgatacaggctgccaaccgcattctggccaaagaacctgctcattcacataacaacatcagaagagattgtggattcataacatcaaagatacaaataaacatcagaggtacaaataataaagaaaacggacaataagacacacatattgtaatgttgaaagcagagcacgcaagtttccctccttccctgcaccccaacgtcttatctcaacatccagggtcccaccaatcctctgaaatccagaataagtatggtgattaaacaaaaaaacaagacagagaggatcaaggatggtcaataaacacaagggaaaaaaaggacggatggtcattgttgagacagttcctaaggtagcacaatatattttacactaatgactgcaagagggcccagacttgaaacacgtggtaatgaaagttacatctttctcagcttgttctctttgtacttgaagatcacgttcatttttctcagcaagtgctttcgcctgattgagaaaagaattcatgttataaaacatactggcaaatctggtgtcaatgtcagataaaaaaaaaaccatcaaataaaactttaatgatacattacgcccgctcctgtgtccttt

SEQ ID NO: 17924 - DNA, 1405 bp, Arabidopsis thaliana landsberg
gacagtgcaaactatatcctaaagcttatttttctgattcccttaagattctccaatggatatacacatcaaaactatcttttcttcccccaaagaatctgatatgatcacagaggaagacaatgtagtggctctggtaggttcattggcatttgtatcgcaacagcgtatttctgcggaataggtcttgtaaaggtctttgcgcggttatgaaacttgccgagatggtttatcatagagaatctttcgaggtcttggatttcaaagatggtgtctaatattgatgtagtcctctttaggctgcatagacaatttgaatgagaatgtgtatacttttagaaacattatctctcagaaacaatttaggactgatccatccatacctttcgaagtctctttcaagcttttgtattttctcattgaaagcattgacaagtaaagaatgttgctgatcttgatcactagctgtcttcgaagtttgacgactgcacaaaaactctttttagggaagtgagcaaagcttaagaaactgagatcaaactaaaaccataatggaactcactttatgctcttatccaaatccgagcgacattttagagaacatgaattagcgaggttgattctcgacacaaagtaaagcaccatttcgtagttaagagctgcgttgtcgcccaagaaaacaaacgttggtgctggttggagaagctgttgcataagatgtgtagatgaaagaagccttctctttgatggagatatcgcctcatttgtatcgaccttagttatcataaggcggtaacaacaacaaaatcaaatatccatgtgaagatcgacatggaaaattacttaatgataaatataagagtattgaaaccttctcacttagtgtatttgtcgcaaggttccattcttgttcagcaattctatagagagcaaatgtttaaacgtcaaatatggcgaaaacaatataacataatcatcatcttgaatgtggtattaaattggtctgacgaaatgacctgatgttgtgacataactctgaaccttgtagatatactttgtgccatggtgattgtaaaaaggttgaactcttacgcttcttccgtgttgataaaaccatgttttggttcagagtgtttgatttggtcagtccagagttagacttacaagtataattgtatatcccctgcattttcggattattttccgccttcgaataccctgcattacacaataaatggccaacaatttcagaattttggcggacatagttggaagataaagaaaatatcttctaaagaacatttcataatccttattggtatcaattcaacgatacagtatcttctacactatattttggcacataattgaaagtctaccagtaaatatatatatatatatttat

SEQ ID NO: 17925 - DNA, 609 bp, Arabidopsis thaliana landsberg
  unsure (1)..(609): unsure at all n locations
ggacattggatatgttggtgacacttatataacatctggctaaatgtggtagctctatatgatgtcagattcgggtcatggagttataccctgaagaaataactgtagtattcttgtnnnnnnnnnnnnnnnnnnnnnnnnnnnnnnnnnnnnnnnnnnnnnnnnnnnnnnnnnnnnnnnnttttatacttaaaccgggtgtctcccttgcttcagtcatgtactcggcgagaatcaatcctaatatgttgcttcaagtaatgactatattttaagctcagaaactaacactctgtttcagggaggcttagtttcatcatttggctcagttatacacacttggggtctgcatcttaagggtccagtctacatatccttgttcaagccgctgtctattgtcattgccgtcgctatgggtgttatgttgctcggcgatgcactttaccttgagagggactttatatttcacaatcttcataaatatcacacacaacatattatctaatatctaggatgtctctatacttgaaatacagacataacattcagctgtagtgccatgtatgtatccatggaattacattgagagatatatggtgtctggtttta

SEQ ID NO: 17926 - DNA, 1327 bp, Arabidopsis thaliana landsberg
cagcgacctggaagaactcgctttttttgttattacatcagaaaggtcttttggggttgtgggaacatacactaacgcaagtgttattggctgcaaattaacaatgtatcaagctgtattatttccatcttacaatttaaacattttgcagtggttatgaagtggtggattagaatagattaccatcatccctaaccacgaagaaagcaagtatggacctagccgaattggcgtgacagataagaggtagttcaacatgctgaatgggagaagaggagcaagccggtgcagcaagcatatctatattcagttttgcatattcataagttttcaaaagaatggtgccagcccaaaatttgtgttggttctcagtgcaaaccttgaagccggatttctcaatggcgagtgccactgactgaaactgaggataatcctttaattttgcaactacaaaaggttttccaatctgcataagagcattttcatgtaagtaccaaaatatcaaaaaaggatagcgtcagtggtttatgcatgtcacttcattaatctaatggttgtgtgtgcaaatcaataagagtttgagtcgcttaccgtacggccaagtagaaatgcagctcctgagccaagtgtagcaccgactgagtccgccacaaaaccaattggcagcccaaaaaggtagccaccaccgagctgaatatatcacagcttcaaccaaataagatttctcaattttatagataaaccagtcactctaacaaagaaagttgagagtagatgatagccgtaacatatgacacacaaaagaaacatgtatataccgtgagaaccgaggcaggaacagccaaaactgtaagaggaatgtacgcaacagctctgcacacatcacaaaagaaagagaagttcagtaccaaggtaatctcatgttcctatatctatggattaacattagcaatgaaacagtgattaagctaccaccgttagtgtagctcattgctatgactcacgcaagaatctaactagctccatagctaaagaaacaagaagaagagagacttacagggcaaaaggtccccaaggccctagatcttgttcaacccataacaaaaaatccttcaatagctgaaaaataatacaaaggaaattagtaagtttcagatcataaactacaaatcacaacatcaaatgaaacgaattcaaaaagggcatttgctttctgacaattaggtaatcaatgatagtaaagatcaatcctttttcattgctaacacaaaagagcgacatttacgagaaattcaaagaaaagcatgtcaatttccagagatcatca

SEQ ID NO: 17927 - DNA, 799 bp, Arabidopsis thaliana landsberg
  unsure (1)..(799): unsure at all n locations
ccgcagctatctgctctccgaatggtcttgttctccaagcatctaaataatgaagattattgagttgaagggggattcaagtttctcttgcttgtctagttgcaagaagataaagatcctgtagtgacaatggctgatctaaaagcagcaggaggccaatcaggatgcaaagacttgagaagtgcaataactcctgaaataactggagccgccattgatgttcctgaacgcataacaaatccaccggcattgagggtgtcattgggagatgtagcagctaaaatgctcacaccgggtgctggtatatcaggctgcattgtgtaaaaaattagagatattgcagaaaaactgataagtcagaaaataaggatccagacatactttcagaatcgctggggaaatcgagttaggccctcttgatgagaaagttgctacctttgtcccaacaggttctccgacgagtgttctagaaggttgtatcttcacaacaggtgatctgtattttttttcttatgattatgtgtttcttgaagggaatgaaacaactgagcatgtgctaatataagaagtgaagatcataattcatagtttcatacccagtataacgtatgtagaaaagtatatcggtcccaagctcattgtcaatggctacacaaggaaaatcatcactacatggagcgagattataccccgggtttcttgcaatgatcaggccaagaccaccggctgccttcacaatagacgcagctgtggatacaacagtgaaatctcttgctgntgtgaaacacaatacaacttt

SEQ ID NO: 17928 - DNA, 599 bp, Arabidopsis thaliana landsberg
tgccttagctagaactggtctgtaatatcaaatatagaatcatcattgtccttctcaccgtcaatcttgtcagctttttccttgacttcctcaactatattggggacagaagcagcatctcctatcttcgcatcaatagcatgtgattttggcatttttagtttcacctttgtaggcacctttggaaccgtcatcttttttcctcttttcttttgggggcctggttctttgacggttagctcatttagggttttctctttaacgacagctttcttctttggatcttgcttcgctctggaatttctcctcgccttagatgaggcgcgtaaattccgggcaccaggagacctcgcaatgaaatcaatgtcacattggtttacatcaacgttcttcaggaattcgccttcaagattcctactgaccccaggaataccaccatccttctctaccaccaaatctacaactttctttcgactgcaaaaacgtaaagataactcaggcgtaaactaacgataactcaatcacatgtataacgataacttagtccgtactaaataagataatggtaactcagccaaaagtaagtaaataaaagacac

SEQ ID NO: 17929 - DNA, 514 bp, Arabidopsis thaliana landsberg
atcgggttacagctccgatcatcttcgatactaagacgaaaacacaaaaaccctaatcgatcgccctttttcttcctctcataatcttttgctaaactgtttgtttaattatctctggatcttctccataaaaatacatgctctcataatatatatacgaaccctccgaacggttaagagtctaatacattactctagaataataaaccaatatctaaccggcttttaaaccaaatattcccggttcgaaatgtaccagatggtaattgtcggtttagccagaccaatttcggggatggccttttatcattcgtctttccagagaaagaacgagattgcgatcacagagtgtcaaagcaatctgctttttctcctctcagattcaaaggttctctttgaagcttcgcaggcggctatactgtgatggcggattatcatttcgtgtataaggacattgaaggagcgtcaactcaatgggatgatatccagcggaaattgtggaatctaccggaga

SEQ ID NO: 17930 - DNA, 581 bp, Arabidopsis thaliana landsberg
  unsure (1)..(581): unsure at all n locations
cagtctcggggacctcattctcaatctcatggacttcctcatccgaaatctcatttacaatacatcgttaagaaatgtccatctcacacattcctttctaccatatcctgttgttctctactaatagtcgctctctccaactgtcaataacaatatctattggaccgcagtcatcatcaacatcatcgtctaagagatctttcaacagatatttctcatgataggcaggtaccaaaatgcttggaaaatcctgttaaaagaaattcatttagcaatcaatcaatcaatctcatgatagactagacacacaatcaagtaaatacagaaactctaaccttagtattcccaagctctttatatataacttccaacgggacacctttcatgctacattctttaaacttatgcttgcacatccttcgacagtcactcaaagcggagcgtacagggactctaaatttcagtccaagctgtggaatagcctcataagccagaatctacaaataacaaaacaatgttaatatcatanaacctgtacattacaccttatactcatataataatcataaattacttacctc

SEQ ID NO: 17931 - DNA, 1228 bp, Arabidopsis thaliana landsberg
cccaatgacaacaatatattctttaaatcttacactttcgattttataagctttaaatctttacaagggttcgtgtccctccttaataaccgggttatctactcaaaatcttacaacaatatattatcataatcttacaccatcgactaagtatgctttaaatctttaccaaatttcgtttcactccttaataacccacacgatcttctcacttaatatacatattcctatattttccatagattttctcaatcttgcagtctacataaaatctaaacaattaaactcattaacatatctaaataatgaatatgcgaaatctaacccgcttgaagattttattccatttcagttgctaactacaatatttgctctctatccctttaagattcgtaaccctaacttgaacactatatatacagctattattcgactttcatcatcattcacctactctattctttatctactcgtccataaacacacaaaaaatggctgccacatttgattaccttactgatgtcaggccttacaagacctcctggagagtgcaagtgaagactcttcatgcttggcgtcaatacacagccaacaccggtgaaacccttgaagttgtgttttctgatgaaactgtaagagatcattgcatcagtcatatttttttttaatcagtttacatatagtacacgaattagctaaatagattaaatttctttttctatatatgcagggcaaaaagattcattgtttagtgaggaaagatttggttagcaagtatgctaacatgctaactgttggtgattgggttttcattgagacttttagtctcaactatgccggtggaagtttccgtcccacttctcatctctacaagatgtcctttgtcaatgaaacttcagtgattccatctccatcagtttcagattctaactatctgactttggtcactttccaaaagatccaaagtggagagctcaatcccaccatgttggttggtaagttatcattatataaccctaataactctactatgttttaacttaaaactgacaataacgatctatcttttttttgtagatgtaattggtcaggttgtaatgattggtgagttggaagaactttaggctaacaataaaccaacaaccaaaattgattttgatatcaaagatgcatcgtgagtctctctatattattttagatattagctgatatcatcttaaagtatata

SEQ ID NO: 17932 - DNA, 424 bp, Arabidopsis thaliana landsberg
ctgattcacagactatcttttctccatgaacttgaggactctgctacagacattgttcctgatgttactggtatgtttataacgatcataattctttagatcatttcatgatatatttgagtactctgctgcagacaataactagcttttgattttttgttttcatagatgctattggtgtggttgcaagtgtttcttctatcaagaggtttccttatgtctgcaataagggtaagaccgactatgaggccaaatatgtttctttcgagcttatagataattggtaagtttataagttatagatttaggattagttgatctaccttgcagactttacatttagattattgcgtgtgattatttaccatagtctaccaatggtacagggaacaaaaactcaagtgtgttgctgatggttcatgct

SEQ ID NO: 17933 - DNA, 1191 bp, Arabidopsis thaliana landsberg
  unsure (1)..(1191): unsure at all n locations
caaagcacgacatttaaacttactaactttaaccaaatataattcaataagttctttgaattaactaccgaaatgacttaattgatggcaccctctgaactcgaaatgtgatatcctttatttcctatctcgtgaatactctaccaaatttcagattattctgagtactttgaatgtttgtttgttgtcttcacatatttggtcatatctgaaactttaaaagaaatattctcgaacctattgaagaagttgtttagatctatatctcaccattcaacctcatgacagtaatacagacacatcatcatcatgttgacctatatatatatatgaactaaacgttgtcgatgtcatgtcataagtttttctcagttttttaccatatttgataatccaagtttgttatatggtgtcgaccgagtttctctctttctctatcattttaagataaaaatcaacagtctttattacctaaagtttgtaacttgactcaatttttactcatgtgcatgagccacgagaggtcatgagccacgagaagaagccgagccatgttcttccattttattttatttttctaaaataatgttaaattatatttaagaaaaaagtaaatgtttatacataaaatgcaaaaaatttcttaaatcgaaacacaaagagatactatactactatctcaatgcaaatcaaatttgaagtctcactacatatttctcctcgtctctcttatttagagtagataatctgttgcaaatgtttttatcaatcaacttcactatcttttctatcggcgaaggttgctcgccatgtctccgtgcatttctttctttccatagggaatggatcgcattttggaacacatacttaaaaatgaatgccaccttctgttgaagaagaagagctccaaacaatatctggaggaccgaatgagactatgagtcaatggttaactcgggagaggctcttgccttgcatatcatgaatatgcggaaatttctctccttgaatgcatctgatctcgccccgtatgcattacaagggtatgctcttttctttgacaaggtaacaattcttctgtcgtttcatccactttctttgtatttttttttattcactttactcttatggngaacatttggcatggagcataaagtactcacaaacaatttctttttgtgatgcagaaaa

SEQ ID NO: 17934 - DNA, 577 bp, Arabidopsis thaliana landsberg
  unsure (1)..(577): unsure at all n locations
gaatagcactagaggagcccatactcaattgcagtaatcgatcccaagctcaagtagtacctccttctcttaaaaagcatgttgctactaaaaccaaggataaagtctttgttcctccaccctacaagcctccactaccatttccagggagattcaaaaatcaactgataaagaagtatgaagctctcttggaaaaacaattgaaggaccttgaaatcacaatgcctttagtagactgtcttgcgctaataccggactcacacaagtatgtgaaggatatgatcacaaagaggatcaaagaagttcaaggaacggtggcgtcaattcaagagtgcagtgaaatcaccnnnnnnnnnnnnnnnnnnnnnnnnnnnnnnnnnnnnnnnnnnnnnnnnnnnnnnnnntctattagacaattagctttcagcaattgtctatgtgatttaggggcctcagtcaccttaatgccactcaccatcgcaaggaagctgggattcgtccaatataagccatgcgacctatccttgatccttgctgataggaccttaagaaaaccctatggcatgctcgaagatct

SEQ ID NO: 17935 - DNA, 1991 bp, Arabidopsis thaliana landsberg
  unsure (1)..(1991): unsure at all n locations
cttaaaatccactttggtttaaaaactatttaaaagatccaatttttaaaaataacatttctcaactaagggtccgaatggtaaccgcgttttttgttatgtgggaaaagcgttattacagtgcggcacggttcaactgcggtacgtgggggagaaatatatttgtaggacaagtgtggtttatacaaaataagcggtacagaataatgtttgattggtgaaaaaatatttgcggtgcggattataaattatatatatatatatatattaataattaattatttttttatgttaataaataaacaataacagatatttataaaccagtaatataaaaattgatcaaaatagaaatttagttttgtaacatacatattgttacatgcgtcgactaatttcatcataaaaatattaaaaaaatattatctattactttgattttcccataacatatttgcaatattgtctcttatttgcatcatatattcttcatctgctatatcagttgcttctatgtcatctaaatcatgattaaaatctctgttgtttatatttgtctttgtcattacatctacaaaatctacatttgagaagtttgagattctgatgatattatataatcccactgtagccattaccactcttttttgaacatgaacattatatcttggaaaatccgaaagaatcctccatttttttttccaaactccaaagttctctcgataacagaacgtaaagatgcgtgacattggttaaacagttcatgtttgtttctaggaggaggaccaaaatagaattgagacatatgacatctcacaattcgattttgtgacgaccgataaagagctagaaatccttgcttgcttgggtagccagaatcaaccagataatacttctctgacggaggcaaaagaaactcggaatcactatgctgtgctatttgcagaacaactgtatcgtggcaagaacctggtgctccatttcaaatatatatgaataacatattcaaatcacatatcgacatgatgctcaaagatgcattatcgtgtcaattccaatacattccttgtaattcagacttcacttttacacaaacatgagtcccatccatagctccaataaatccactaaaataaagtcaatatcttcaatatacttcaagtctctcagtaattagatgtaaatcttgagttgttggagttctaatataattagatgctaataattcagttgttgtaaaaccttccccaaattttctcttcacggtctcttgatttcgtccaaatcttaaaccaacatctctgtgaacttcattgtgcctacttatttgtaaaaacatagcaacatttttttcaatgcttatatatagtgttggttatagattgtaatttgtttgtaacagactgcacaatgttgtgaatgctgtgagtgacattcgtaataactgaagacaagcaacaacatcttattgtagtcgatgccaaatatttctccatcctatacctccatcaatttgcattggtgctctttcgaaatattgatcatggtaactcaaagttggctgaattattaactcctcaaattactcatcttctaaattccacaattcagctctttcttcgtaacttagattattttttccttgtgatcccaactaacatatacgaaaaacctgaaattttatgagatagtgaaaatgttattagccataagtgaacttacaatatataattacaccaaatgcggaaaaaactaagaaaagccataaagaaaaactaagaaaaatcataaaatattttttaacataaacaagaatagaatcgattagaaaaaactagttttcgtcttttgaatctatttgctccctgcaaggttccccatatattaaacagacctcctcgtctatgtctttctaatccttcttngtgagtgtcccttaaacagatgagcttctttgttaaaaattacgtgtattacgcccttgttggaca

SEQ ID NO: 17936 - DNA, 1169 bp, Arabidopsis thaliana landsberg
ctcactatagctcatccatataacagagaaacatgttgtcaaatgcagattaaggcaaaaaaaatttttggaagattgtttcatcatttgctctcaaaaagcctgcaaaatttctcttaaaggataatctagatgatgacttggatcttattgatgaagattctctgctaacggaggatgacttgaagaagcctcaagttcctgctggtaattaaagacagccacatgatctttcttatcattgtacatcccttgtgtttaagatgtcttgcattttttgcagccagcggttgtgagacccccaaaaaagcttgcaagaactgtgtctgtggtcgagatgagatcgagagaaaagctgtgaagctgggcctcacagaggatcaaatcgagaatccacaatcatcatgtggcagcataagcttcttaagagtttgttggtcgtggtgctcgtgcttgttaccagaagagttgccgttaaaaagctggtttgttttgtttttcaatttcgagttatcgtaagttttttttggagtatggacttgtgagactctttagatttatatttttcagctttattggataatggtgattctcctagaaacttatgttttgttatgtctactcgtttgctatcttaaagttgttatttttatttcaatatcttgtgttttttcactcttccgttcttgtcccatgatgtatgatgacatttgctttgttctatcaatagcttgattcactcattgttctgctgctaaatattaggtttgttaagtttatgagaagctgttacttgatgtggcttagctataaactagtgatcagatatctgattagactttgattcaaactaatctcttttgttggatttcatttctaaaatgctgttgtgattccactactaaaactaaaactcgtgtcggtagaagcaaacataaggcaaaaagtcaaccttctggacgcgcaaagcgattctcaagtgttgacccaaatccgaagaggacaagccaatcaaaagtccagatatgtatcatcatctctcaagctgagtggtaactaaactttacaaaaaaacaaagaaggattataagctatacttacttttcagcttctctcatggagaatcttcatctttgcattgcagtcttgcattggagacacatgtgttt

SEQ ID NO: 17937 - DNA, 1145 bp, Arabidopsis thaliana landsberg
agattcggaaaaagtttgctgtcaaaactgttgatatcggaaataagataacttacgaaaccccgaacgttagtcatggaaatctattatcaccaaagtgaaagatggaatgaagtttaatcggaatgatagacactgagacacccaacgatggcattataatagattaagaccttgaatgttttgtacattttgtaagagtttttgggttttgtttttcaaaaacttattttcataccaatcaagattttaaaattttggtttctctatagtttagaaaaactattttgttgtaatttttcattcctcattttagttttttttgttctcttaaaatttagaaaatctagtttatactcaatcaacgttatttttttcaaaaccaaaaatcatttttttgaaattttttaaacaaaaatataattacaaaaatttaaaactaaaatctaaaatctaaatccaaaaactgaatcgaaaatcaacctccattcagggccttcatgtggaccacgaacatcctcattacgattgcagttcaaacggtccatagattgaggattcaaaaaaaagataagagacgttaaggattatgattgtttattcaaaaggatgacactaaacaacaaaataactgtagttttgaaaatttgaatgtataaaataaagatcttttctagaacaaacccactaaatctgactagtaatgtcacatcgattttagatagcgtttgcattttggtaaatactatgtttggttggtgagatccaaacgctttttagaaatgtataaaacatagcactaacacatttttaaaccttatgtattgtttacgcaaatacaagttatttattttccagctaagtggtgaaaaaataaaccggttcacaatttttttttaaaatgttactaatgttgtgtttgtctacacaatttttttttaaaatgttactaatgttgtttgagacaaacacaacgtgtaactttgtatcctacatactcttgtatcaaatgttagattttatgatgttcatacgttaacaaatatgtatcatgtgaccaacttctatccctcaaattagaaatttgagttagtaaaacgtgatgaaaataggttaacatatccttatgggaatatgtgagacta

SEQ ID NO: 17938 - DNA, 612 bp, Arabidopsis thaliana landsberg
tgagatcatagtcaccatgaaagagtgaagcttcaaagaatccatcagcatcggtgacttcagtagtttggctgcgtagcctccccattcacgtataagcttgtccacaacatctccagttggtagattcttgaagtttccatcggtgaggcacatgtggtagcaatttggtgcataagctgtccacgtcaccattcctttcacatgcggatggcatgtccctctcttaggacttgctcaaaatacttggcctgcaagaaatgaatattagactcgttccaagtgctcaaaacctcaagaatatatatatttatatggatgaaaaaaagagaattcgagaccagatattgtgggaaaaagatggacctgagatttttatagcctacttttataaaagaatatgaattacctgatcactggaaggagctttaacgtcgatctcagtgagccaaataggcaaaccagtggcaccaagagtatcaagaggctgatctcatatacggaatggttaggagtgctgaaatgagactcaagaccgatccccatgggaatgtttccgcgaacccgaatagattgaagctccctaagcttctccaaatacttcgctggact

SEQ ID NO: 17939 - DNA, 2106 bp, Arabidopsis thaliana landsberg
ccccgttaacaaacttgtacattaataccatgtatctgaatacggaaatgcctgagaataagattttagattgaagtcttgagcttacttatctgggaagtgctacgaccaagcatcttttccaaaatgtcatgtaagacgcatccctgcaacacatagttacaattacgatcaatcaacaaatcaatcccattcacacagtagcaacattgatttaagtaccttgggatcaatagaagatagaactttctttatctcattagcaacagtatcacttgatgctcgcttccttctcgagcttccttcgtccgtccctctaaaaaaaaacaacgcagaatctgataaaccctaacggaacaatggacttcacaaaacaacaattgagcaatgggaataagttacctagctgacaatttgacattgacaccgcgactttcgaatttaatcgccggagctgaccaaacggaaaagctaacaactaattggtcgacagtaaatttctcaaattgaaaattcgattcatcgaaaagctgattaagctgagaaacatcgaatcgaaaactccgtaaagtgatgagagtatcagtaaaccctaattcgacttgaagatcaggttcatcgcgagaaaaagggagtaacagagtacgaagtctccgtcgaacccaattgcgaaggaacgtcatgcgaatttagtgtttgttgtgattgaaatcgaacgattcggccattaaacgagttgataagagcgggaaagcaagaggacaaagacgaagtcacggagaacgaaaccttatggacacgtgtcagtctcttacgtcggtaactcagttgtagacttgtgtaggcgatgaagaagttacttatctgccgttttcttcctagctaacgagactacctgtagtttttgtagaggatattgtcaaaagaaaaagaaaaaaaaaattaacgtcggtaacttaatttgaacttattagatgaatatgttttttggttaggacatactcctacttatgtttatgtttcttaacttcaattccagcaatgttttagtttctgtttcagtattgtaatagctctagttgccttagagcaaccacgttggttacttttatggatgtctttagatacctatttttaaatataaaagaataaaaaaataagagagagaagtacagatgtctttaaattgtctttccagagacatttgagacatctattttttagatgtttttacttttactattattttatgtgaaagacatctatgaaaaattgttatattcttatgtgtttaagtggaaagtccactgatcaactttttgtaagaacttaatgttatcaatgaaagacaacagttaagtgaaaaagaaaaaaaaagaacttattaccagtttgcacaaaatctctcaaacatctaaaaagattaaccaaaacgatagccaaatcagtgttcgattgggaataagctgagaaaacctattaatatatgaatcaatttacatgttataattcaaatttttaacatataatcaccaaattaaattggagaagtgtcttttgtcaaatggcaacggtttatctgcaaattttttccaccaaaattatactccaacaagtcatatgttactccacataataaagattgaggtatgggttgggtttttttctatccaataattatatatataaaaaaagtcaacaattaaatattccgaaccaattatagtttcatggtccatcttggctatacccaggcatcgaagaagaagctcagccattaattttcgctattcattctgtttttagttgttcttgctttattgttatgcttcttccagcctctaatgttatgatggttaaaaattaaaaatcataatacatgtttattctactatcagattttgaacgttatatatgtataagagtagatataaaaattgttgttgtttttccttcctttttaacttttaatataaaatggcaacgaaacaaaagaagaaaatgtatgaagtatgaactatcaagccccggaaagctggttttcgttttaatttactaacgagtttaaaaccattaaattatttaatcaaacctaataataagctg

SEQ ID NO: 17940 - DNA, 1580 bp, Arabidopsis thaliana landsberg
cattcaagaatttcacatgcgccctccattgcttgctaaaattgttagctacctggctgaagatggcgtggatgcattgaaaaattagattaaggcaggtccggtatttaaggtggctgtgtattcagaggaagcactacgttgtgtccgacttgacagatctcggtatttcatgtggtggtcaatgccacactcgatctattatcatttcttcaataaatgtcttgaagcaaacaatccccatgccttgactgctgtattgtacaaagggatagcatatgagaatttcgttgaagaatggtacagggcacctttatgggtggagccttatggagaggacggaggatgggtacaaatcgatggagcttactgggctcagccccgagtgcgagcaatgaatgcaaggtgctgccgatgcaaaagggcagcacacaaacttgtccaaatatgtgaatggatttggtaaaaaagacacctaaccattggtttgcgcagtaggtccaacaaatactatattatcttacatcaataatattgtcttggtttagaggaagtagtttttcgactcttgggtttgaacttggatcaacctgattggaaattacaatagtcaatgtctcttatatatataagtcattatagatgtccaagaaaacctgtccacccatgattaacattaaagacagcacaaaagaaaatgtagttttgatggttaaagaaaggctttgattagttgtgtttgtatttatataagtacctgcatttggctatcaacatcttcctcattggcattttgatctttgacatctgtgtcataaatagggttgccttcatttgcatcagcctgattagagtgctctgattgtagtggggtaacaaacacatccatggggtcatcagtaatctcctgcaataagatgtgttgacgtcgttaattctaccaagtttggaaatagttgaagttaactattacactaaccgtgtttgtcaatggggtactatcactggagtcttgagctttatctaaattatcgtttgggacttgctgtccaacttcaggctgtccaaatacatgctcacacagcgtgtgtgactgagatgaagtctatgagaaaattaaaagacttactatgcgataaactttaaaaatgcacaagaatatgataatgttcaaatattttgaaatcttgaatacctcaggggtttcagattggataagcacctccattctcttcttgcgctttgatctagaagatgatggaacaaaaccgaaagccaaatttctggaccgcttgaaggtgacagtttttcttttcttttcaagcttcattacacgatttgatagctcttccaccttgttttgtagatcaacgatcaacctagacttctcatcatcagatagccttacaacttgattaaaacgagttgaataactatgcttggatttgggagggtcagacttcacccgtagtctcttcttacgatccacaatatgctttttgtgaacaacagaagacttctcctttggaattttaattgatggcaatgtagcatcacctcctggccaatcactttttttg

SEQ ID NO: 17941 - DNA, 1625 bp, Arabidopsis thaliana landsberg
caggccatgcaggagcagttaactgcgtgagctgaagccttacaattctacacatgttggcttcagcaagcgatgatggaacaataaggatatggggacttgaccggattaaccaacaaaaccagaagaagaagctagtgcaaggaagtagcagtaatggtgtgattcaccgatgcaatgggaattgattatgataaaaagaaaaaggaatgaccttcttaaaactatttaacagttatgttgtttcttctttcttcatcagcctctttttgtttgcttcctttggtatggaaagcaaacgaaagaaggtaaaagctgtttttttttttcaaattctgaacccataactggaaggaacaaaaaggaaaaagaaaatgcaatttgcaacataattcttctattgatgttacattgtacataaagtttgaatggtagcatttgcaattgcacttacctttgtttatctcagacttgtattgctcactggtcctactcactagttctaatattggcgttttaaccttcaattcaatgttcatgtctaaatttgttgacttgttatagttggcctacttaactgattgcatgtctacttaaatttgaagtgtccttttttccatcaataacctgcattatgcagatttcgatttagttgtttgtttgtgctttatggtagcaagttgcatttgaaacaatggtttcgatcggtaacacacattaatgcgattattcaagtaatttaccgatcagtaaaaatatttcctcaacgaatttgaagttgaacaagaaaaaaaattcctattttatttaaaattaaaaaagaaaacaattgtgaaatttatatatttttccttcttaaatttgtccctttttttctttctatgacatacaagaggatcataaaagcaaagcaaaggattagttcaattgcaattctctaattcaaagtttggatccctaactgtaaaatccctaattcgagagagagagagagagagaatgggaagtaaccgtcctaagaatttccggcggcgaggggacgacggcggcgatgaaattgacggtaaagttgctacccccttgtcaaaaccgacttcgactctttcctcctcgaaacctaaaacactctcagcctcggccccgaagaagaaactcctaagtttcgccgacgacgaggaggaggaagaagatggagctccccgtgtgacgataaagcctaagaacggcagagaccgtgtcaaatcttcttcccgtctcggcgtttcaggatcttctcacagacactcttcaaccaaggaacgtcgtcccgcttcttctaacgtgcttcctcaggccggctcttattcgaaagaggcgctgctcgagctccaaaagaacacacggacgcttccttattctcgtcctagtgccaatgccgagcccaaggtagtgctcaagggtttaatcaaacctccgcaggatcatgagcagcagagtctgaaggatgtagttaaacaggtttcggatttggacttcgatgaggaaggggaagaagagcagcatgaagatgcgtttgctgatcaggcagcgattattagagccaagaaagagaggatgaggcagtcacgttcagcaccggcgcctga

SEQ ID NO: 17942 - DNA, 982 bp, Arabidopsis thaliana landsberg
aattcccaagagtaattcggaaagcattctatagaattagatcacattgtatttttttctctctgaaccctgatataggtgatggtagtgaaatcagtaggatcgttaaacacaattgaattaaaatcagtaggcttcttttgtcgtatagagattgcatagtttcagcctacaggctttatctcaacctattacaatgttcaccacttattgatacttgtttaatacattacagcgttccaagatggatgtctctgtttctgacaaaagctttgcatattctgagccaaagactaagcagttcaagtctatctcgagtcatctcaaaccaagataggtatgattttatagccccccaatgtttttatttttttgttgattcaacatgtctgaaaaaatatcatcaaaatcagattatctttgtcgttgttggtagtatttgctcattttaacacaaaaaagtccttgtttagtaatgttttcaaaatgtacatcaatttttttgtttatcatcactctcttttaatcctgtgtgtcttcttctcattatgttggactatttgatcattttttttgcagatcagtttcctttggactcttcctcggtggacgccgttttagccatttccaaaacatctggtttcccagtgataaaatatgtggggagttctcaagaatcttgaatggcactgattttgtgtgcaaacatttggagggtgaaatgcaacgggtttgtctcgtgcatctggtctatgtaatgggtttatttgacctcttataatggcatcttccttgcagaccattcaaaggagagtggcgttggctgcttttctggagccacagtgtctctatttgaaatctattaagctgtctacattcaacttatcctttgccgttagcatttttacactttctgtctgccttctctctcttttagtatgaagaaacgtttcttcttcccccacatatgtataaaaacatg

SEQ ID NO: 17943 - DNA, 545 bp, Arabidopsis thaliana landsberg
  unsure (1)..(545): unsure at all n locations
aatcaagtaataaacttgtgaaccaagaaatttcatctacagatcattttcatcaatttagttttgaaaacactaataaactgtctacatatatgtttatttatcttttagaattttgtttgttctttataaggaatctgaaaaggcaatcatagattttttaaaaagattacaactcatcgagaaagttcacgagttttatctttatagttttcaatattatgatctcatgttgtgaggtttagagttgataaaactcatgtctttgcggaataaactcactctatctctttgattaacactcgtttgtaaagaactttgaagagaactagaaaacagaacaagaaacaaagaaatatggagagaaagtaaagtgcaagatcgagactttaacgtgttcgggtctctgaatgaaaccctattcacgccgggaaacttgttgtcccggaatccactagaataaggtttgtaacgagctctctcttgtgcttgtacaataacaagacacgaatctactagctcccacacacnctcaactcaactac

SEQ ID NO: 17944 - DNA, 1817 bp, Arabidopsis thaliana landsberg
gtagttatttaactaacggagcaattagtacaaaaaaaaatatgaatcattggagtgacttttaagtcattagtacagaaacagccgcaaagagtacatagaattaggaacccatgcatgtgatcagattcaagacatatataaacaaagtttaactcatttgacaagatagatactttttaaaaattatagagatcgcatattacatataaaaagactccagagattttgcggaagcaggaaatgagattattgcatataatgatctgattattaagatttggaaactgcatgcatggttcacttggtaggagactgagagatgtttataagcagatccttggtgtattgatggaatggtgaacgaatgatctcggagtcttggaccattgagaaatcgtaatatgccacaagatgatggaggaagattgccatttgaagccgcgaaaactctgcacctacacaaagtctaactccatatccaaacgccatgaacgttttagatccccaaatcatttctttcccctgccacaaccaaccaaatcccatctataggtttacaaaggatgatggagaaagagaaaaaaatagagcagctgaaaattatagtaagtgtatcactaagacctcccatctccatggattaaactcaaatgggttctcatagattgcaggatcaaaatgaaccgctgaaggtgcaaccgccacaatccaaccagccggaattgtatatcccgcccatgattaaagtttcttcaagtgattcagagaatatatatatatatatatatatatatatatatatatatatatatatatatatatatttctgccacgctggtgacaaaagatgcaaaacaccgttgagaacaaccaaaaatggtatgtatttttatccagcataaaatcttgaaagcaaacataatgaactaaatggaggagttcaacatacctcagaagaaaatctagctcggtttataacatcgtcgctgagaagccttttcaaaacctgagattgttttgtgtttacaattgagcaaaggcaatggaaaaacgaaaaccaatatccaaatacacaagagcagagacagagcatcagcctaatgaacttacctctgggaatggggactcaataaaataccgattcttcttcaaaaccagctttactttcccataattagcagtagaagcatggatgaactcaatcatctccttgggtagcttagtcttagacagtttattcaaaacagaaatgatagtttctgtctcaagaccaacggaaacagcagcatacaacgagtgtggggttaaattatactcgtgcattgactcaggcctgaaatagtaacaaatgaatgaaaatcaacaacaaaaatcataacttgtacattgatataatcaccaaatcaaaatcgaacctgcaaacgggttcagcaatggcgataagaaagtcataagcttgtttatagagaggagaaaatgtctccaagaaaatccttccatcagcacaagcccacaaaggcctgtttccatgatctggcttcaactccaatttagtaaaatctctcttcttctcctctccttcaccttcaaaaaccattataacttttcaattcaattttgttccaaatgtatccatttgtaagtaataagtatgctacaatcttaccatcacgagagtcttcatcagcatcatcatagtaatcttcagcgttttggatgtcttcatcttttgatcacctgagatttgacagtacaattcactcactaactaccatctgaagagcctaattgataaaataaaaattgactggaga

SEQ ID NO: 17945 - DNA, 577 bp, Arabidopsis thaliana landsberg
ttataacccacaacccattatcaacattaagcacaagtacattctaatgattaacggaaattacaataatctgaagcaatagaaggaagagaagctactgcacatttggaatcgaatacccgataagggaatccgccgcagattctggagaagaatttgcagtttgtcggagagagcttttgattgaagaaatcaaacaaaaatttaggaggagagatctcgaaccggaacaaaaagtttatattggtattgaaattacaattgattttgcggttgatttatactgggttagagaggaaaagaaaaaaatattcacgcgatggtgattttagagacaagtgcgttgataaaaaaaggcacaatttcagaaggtaaacccctacagaattgctctcacgctctctacgcgcactttgtgagagtggagctgaaatagagccttctgattggctaaaaaactctaaaaaaatagcaataggagacatgctgctagctcttgttattatttagcttttctacaaaacgcagtcgtttctatttcgatcgtttcagctcttgacattgatccgaaccaatc

SEQ ID NO: 17946 - DNA, 206 bp, Arabidopsis thaliana landsberg
acaagtaatggaaaaacgacaatttcaatgtctgccgaatgaatcaatcacatagacttatacagtggctgtggataaatcggatccattctatgtatatatgctatgaggaccgattaattgcttcatctaaacaatgcattgtgcatggcaattactatgaaccctgctgaacatgaatagaaatgatatatgaaactggtatt

SEQ ID NO: 17947 - DNA, 1597 bp, Arabidopsis thaliana landsberg
ctatgagctaagtttttcccaagaagacttcaatcactgtgcagtccacttcttatccaaggaactacgcaccaggaactgaacatcgcaactatagaactcgttgtagagtctgagcatccgcgcaataagttcaaacatcccagggacttcaaggtctgtgcgagtgcgacccttctcttcagcataaatctctaccttctccaaacacctaaaagagtacaagaaatgctttatcatctctaactctctaattgttcctcgaaaccctttgatctgtaacttcttcaccggacaagacacgagcgaacggcctttgtcttccctagacacgtagtcacaagcatccccacatttattggtcacaaaatgtcttagaccctgaaagcagataagtatagagtaagggaattcaaagaatggtctctgtcattgttaatgtttgacaaatgatctgtgttaatacctcaaagaccagtgtttctaaatgtgggcagttccttaagagaaccggcattccctcccatccttcattctcggcagtcttaacacttaacaatttgaggttgttgaacaccggcatcgatttacagcataaagaaagcacctgaaacaaggcaaagccaaactcaacattacaactgcaatatgtccaggattgtttcgatatataaaagcaggagccttagaacaacaatgaagtgtgcattagaacctgagaaagggcttagcataagaattgtacactcggaataacataaatttgaatctcatacttccacaatttagatgggtttacttgagtgcagagaaaaaaatactatcaaaacaaaataaaaacagacctggagagtatctaaagatatgtaaagtttctgaacatttcttatgccactcataagcttccacccatttcgaagacgcagaagaacgtcgtcctcatcgttatttggcgctcttcctcgcttgatttgatcttgatctaataaaaggctgattcgagcctcaactacgcttgtcaagttaacttttggataatcctccgcaaccatatcataatactcaaagtaaaccagacttgggatatcaaaagagatgctctttggatttgaaaagttttcacagccaatggtaaagatacttagcttcctgaggcttgcacttgtcacggtttcatcccaatccggccactcattaatagacatggataattcctcaagaacagggaaagtaggaagaaacgtctcaatcgtatcacaacgaatccaagctgagtcaataatgagagttttgagcattggtaagacaggacctagtctagcccacgctacccactaattaacacctaatgaacatcttagtttcagctcgactagtgactcactgaagaacagttttcgaggcaaaaaagattcttcgtcaaaatcgatgtaaagatccatgtccaaaacaccacgctgcagcacgttacatatccaaccatcaagtcgacgtggatgaacaccagttttacacttgagggaaaaaatcttaatgggagaatcagcctgcaatgccaatacattatccacaaagtccatgaagctcagcagaattt

SEQ ID NO: 17948 - DNA, 1291 bp, Arabidopsis thaliana landsberg
  unsure (1)..(1291): unsure at all n locations
gaaaaaaacaagggcgttcgtgaggacttgaatctgaatatatgtatcaaacgaacttattgtacctttgttggttttgcggccaccatggcgataaccctaataagtgtaaccgacaacaccagatatgctgcttcctaaatgtatctacaaatcccttatctaagaagtttgagactgtctttcttctatcgcaaaaccagcacttcttctgttcccctagttataagatatgggggagaattatgaaacctgagagattacttttcgatggaaaaacaggggagggaagaactcgagttagttaccgcgggattgaagatatcaatctcttcatgagcacaatttagatcaccagtcaagactacaggcttagacttctccagatcctgcagatggaaaagagccattgagcttgtgtaagaaggacatatacaacaaaataaagaaactctgaagaaacgttttcatactttgatgtgattgctaagggttcgatcccaatcttcgatcctgtatgtgaaaacccacggagtccattcgttagaataagaagaaaagtagaatatctatgtcaactacacgcatttaatttgaggagtaccagtccttttaagccatctacagaattagggacataagtacttatcaagtagaaggagtcgaattcagcagttaccatacgcccttccatgtcatgatctgatccagatagaccagtaccatatctaactctgagtggttttatctgcaaaagaccaaactgattaaaacacatacaattcaacttaacatatcaaacatattggataacatggatatgatatcacaaataagcacattcttccattcttttgagatatcttttgaagaaactactttagctttcaagtttttctcagtagactgttttactcctttctctctgttttcaatgccataagcttcagaactaatgcattcatcttgagtaggctcttctctgtttcagatctttcttttaatcgcgacactttctaaatgcgtggagaaagtagcttcctttttttctgaaccagaactttcatctgtaacaaataaacaggcaaggacttggtttttcacttaaaagagaaaatttagaagagacacagcccaacaaaaaaattctttacagctctcgcaaaataatcagaagatatagcacttctgagactttcattctaaatcaaatggatcaagcttaaaaactactaaatggaagcaagctcgtgccttttctcgatatgatacataaaacagaanaatgagt

SEQ ID NO: 17949 - DNA, 458 bp, Arabidopsis thaliana landsberg
  unsure (1)..(458): unsure at all n locations
tccgagtgctgcatcttcttgggcctttgaacagtgaggcccatactcgaccatatttcgtttggtatgggccgagtgctattcaatcttgggcttttggtcaattgaagcccacactcggcctgtaaccgagtggtacggtcgagtgtggcctgaaattccttataaggcttttttgtttcctgaaacacttaaacaaaaacatcaaaaataacaagaaagcaatatatacaagaatagacatgggacttcctcccaagtgagcttgtttaaagtcactaagcttgactctcactatgtttatgtacagaaatgattgaggagaggaactgcgaagtcctcnnnnnnnnnnnnnnnnnnnnnnnnnnnnnnnnnnnnnnnnnnnnnnnnnnnnnnnnnnnnnnnnnnnnnnnnnnnnnnnnnnnnnnnnnnnnngtacgactccttttcatcagtac

SEQ ID NO: 17950 - DNA, 2785 bp, Arabidopsis thaliana landsberg
tctcgaaaacacaggcgagatggagcgcttcaagtaagacacactatgaaggcctttatttaatctacaaagtcgttaaacccgatgtttatcaattgttaaccatggatgggacattaattcctcgctagtggaactcgttcaaccttaaaggctactattattaacaatgctccacatcaccaccacgacacactatcaccaccacatagcatcattttgcacctccgccgaaaaaaaaaaaaaaaaaaaaactacggttggcttgatccctttctaagggtatgtaggcagccctttgcaggcacaactataaccaaaataaaaaacagagaaatgcaaatttacgccatatcacttatgacaagctcttttggactagtacgcctcgccaatcgacttgctcccacatcgactccctggctaggagcacgatttaatcgtgttccacatgtatgcagtggcgaaataatccacatctttacttaggtaaagtagaaaagctgatctagcctcgcgttagccagtaggcagccaaatcttaataagccaatttcggcttgtacgttcttgctgacctcaaagcatatacgagataagctggacaccagaaccgcatctatctgatacgaggagtctgtcttgtctactcaacactaagtttgttgtttcggttaaaacgtatacataataagtcaagagacgtcttgctccacaatatgtttcgaaaccaagtttaaaacgctaggcacacctcgccaagggcaaccctgcacaagaactcgaagatataaatcaattcctcctagtgttttgaagctgaacatttgaacgggataagccgagctgcaactcgcgcctaaccctcaatgaatacaataaaaaaatctcaaattcaatatcgactatgctaaaccaagaataaaccgcaaacatcaggataaaagaagtcgtcaaaatagtgcaatagtcaaactccacaaaaacatctaatatacaaagcaaatccaacaaagggctaatcatacatataataccgatccgacaaagccaaaaaaagctaaaatgccgaagaaagtctaaaatactgaaagagaaaagatcaatataataataaaaaaacgaccccatcctctcgccacttgggaaggtcacaaagatctaactaccaccactcgttgcttcgccttcagctgtcgtcatcagtgcctcatcctcaaactctagaaaggccacgaggtcatcgtcacaaagatcggtaatctcaagagcatcgaccaaattacgcaactcctttttgtcaaccttaagctcacacatagtttccccctggattgctgtacattttttgatcaacttcttcaagactttccgagtacctacggcttggcattgcatgcaaagagattcgtccgcaacacgtttcttaaagatatgcttctgtaactgatcgatccgacctttataaatagcaacttcatctttgaactggctccatttggaatgagcatttcgaaacgcatcgtcacgagaacttctcaaccttgattgctcagctcgaccaaaattgttcgactttctgaggttttctgagagctccttgatctgcttttcgagaccctcaatccttcatttctcctagtttaagttacgcaaacgagtcgttgcaataaaatatgcggttttttatttttcctcaacggccaccgtttcctcccttgcctccctcgcctattcctcaagaaaattttgtaacgcgttttcggtggcaattaacttataaaaaaaaagaaaaataaatgaaaaataaacgaaaagttatcataacataaaacaataaacacgacaaagtaaataaatagaggataaacgaccctgaacctccttacaagcccaagtttggtagagattcttcgcaatagggaattcaccgggagggttctcaagcgacgacccgataacttttctagcaaactcaccgcaataactcctactgtccgagaacggataacccttcctatcatagttgaatgaaaaggaatgatctacctcccgaatatcctgagttgagcctctttcacggacgacgggaaaagaatctcttgaactacctccgcgagaaaccttactgcgcggggaagcatgaacactcaacggctcacggaaaatagctccatcctcgctaacagaatttgaagctatcttcccggcacgagcgtctaagagccgcatcgccctatcctcgctatcagaacccgaagctttcttcccaactcgagcatctgaaagttgtgtcgccctatccttgttagtaatctgttggttagtctcgatctcgctactctctaaaacctttgccaccacctgttgcggttcggttacaacaacgggaacatcgacatccgtcgctactgaactaccttcccgaacgtatcagcgtaaatcggaaactgacgactagcttttcccatctctgaagttgacggtgaatttgcaaaacaatctccgtaaaaaaaacgtatcgagacaaattgacaaacgaacaagattttcaaagaacttacgagtttcaaacgagttgataacgtctggccaatgcaaaggttttctcgtcctaacagcagcaagactcgcatatatcctccaaaagttcctcgaggttgaaaatcgtgcgctgcaaacaaaactaaacgcggtaagaaagcaacattcacgacagtcacatgagcataactaaaaagatctaccaggaaacatattccctcgcaaatgacaaaaggcaaga

SEQ ID NO: 17951 - DNA, 455 bp, Arabidopsis thaliana landsberg
gtgttgataacgtgttataaacagagaaagagatagaagaaatgagtgtgttattccattgagataaagggttctttatataggagtacaaggaaagggtaaaaccctagaaacatctagatgatgggcttagatgatggacattataatgggcatccatctttattcataacaaataataacttgttgttacaattggggataagcttaaattatagagaggacttactcaaggttctaaaatcataaaataagaaactaaatcaaaaatttatattaaaaactagtttagagcggcccactggttgacaaagggttaattaatgcttctacttcatgaggtctgagttctgagtctctaatactacgacttattaataaatttacagattaatagagacaagtgtacatgaaatctcaactatgtataattagaagccgtcgtcgtgtatcta

SEQ ID NO: 17952 - DNA, 431 bp, Arabidopsis thaliana landsberg
  unsure (1)..(431): unsure at all n locations
caaatctgatcttttctatctcaattttgatttcccacatgggggattttgacgatctcgatttaagatgaagaagatattncnnaatctggcatcaggcggaatgagttgattatcgcgatccatttgtgttggaacgactgttctcgtatattaaggggcccaaactttaaaaacaaccggctggtgggtttttggggattagatctcaagtgagatatggctttgccaacaggagttgctgccttaacgcatctttaaactatccctccaactttataaagagactccattataatttgggaagcgtatacttctgtttattttttcatatcggatcatcattatcatcacgacctttctattttgatatccatgagatttggattgatccgaaacaatatagagcgggagtagcttaggatccaact

SEQ ID NO: 17953 - DNA, 522 bp, Arabidopsis thaliana landsberg
ctgaagacccgcggacctggtggttcgggcgaggggctttgatcctcctcactgtcgtagcgtcctccacgtctggggtggtagcctcggtgcaccctttcctcgaggcgggctcgacggtcacggcagtgttgctcgtcgccgaggcgatcccgggctgcaggtgtcccgtctcccgtgtgctcggtgtggaccgaggcctcgcgcatgtgtcgggaggacgctgcatgatgctccgaggggcatcctcgccttcgggaggcagagctctcggctcgtcgggctgcggcattttccagaaggtccttgagttcgccctggatacgttgcccctcggtggtggatggctccggcattgttcgaagtaacatcgccgctgcagctaggttctggccggcccctgtagcatcccaaaaattcaaatcttgaatttttctcaaactcgctctaaattcaaaatgaatttctaatttcatttcaaaatgtttgtttgcaagttgatattacaaataaaatatagtg

SEQ ID NO: 17954 - DNA, 1770 bp, Arabidopsis thaliana landsberg
ggctacagatagaaattgagtagaaatgcgttactccatttgaagttagatgaagctgttgatttgtttggtgaaatggtcaaatctcgcccctttccttccattgttgagttcagtaaattgttgagtgctattgctaagatgaacaagttcgatcttgtcatctccttcggggagaagatggagattttaggagtttcacataatctctatacttacaatattatgattaactgtttatgccgccgctctcaactctcacttgctttagcaattcttggcaagatgatgaaacttggctatgggcccagcattgttaccctgaactcgcttctcaatggtttctgtcacgggaataggatatccgaggctgttgctttggtagatcagatggtggaaatgggatataaacctgataccgtcacatttacaactttggttcatgggctttttcaacacaacaaagcttccgaagctgtggctttagttgaacggatggttgtgaaaggttgtcaaccagatctggttacttatggtgcggtaattaatggattatgtaagagaggtgaacctgatttggctttaaatctgctcaacaagatggagaaagggaaaatagaggctgatgttgtgatctacaacacaatcattgatggtctttgcaaatacaaacatatggatgatgcattcgacctattcaacaaaatggaaactaaaggtattaaacctgatgtttttacctacaactccctcattagctgcctctgtaactacggaagatggagtgatgcttctcgactactcagtgatatgattgagaggaaaatcaatccaaacgtagtcactttcaactcattgatcgatgcgtttgcgaaggaggggaagcttatagaggctgagaaattgtttgatgagatgatccaaaggtctatagatcctaatattgtcacttacaattcattgatcaacgggttttgtatgcatgatcgtctagatgaggcccagcagatttttactttgatggttagcaaagattgtctgccagacgtagtaacttataatacacttataaatggattttgtaaggctaagaaagtggtggatggtatggaacttttccgggacatgtctcgaagaggattggttggcaacacagtcacttacaccactcttatccatggattttttcaagctagtgattgtgataatgcccaaatggttttcaaacagatggtttctgatggtgtgcatcccaatattatgacatacaacactctgttagatggactttgtaaaaatgggaagctagagaaagcaatggttgtattcgagtatctgcaaaagagtaaaatggaacctgatatttacacatataatattatgagtgaagggatgtgcaaggcagggaaggtggaagatgggtgggccctactctgtagcctcagccttaaaggagtgaaacctgatgtaatagcctacaatacaatgatctcaggattttgtaggaaaggtttaaaggaagaagcagatgccttgttcagaagaatcagagaagatgggcctcttccagatagcggtgcataaaatacgttagttagggcacatcttagagatggtgacaaagcagcatcagctgaactcatcagagaaatgaggagtcgcgagtttgctggagatgcttcaacaataaatatggtgattgatatgttgcatgatgggagattggaaaaaaactatctggaaatgctgtcttgaaacaatcaatcctcg

SEQ ID NO: 17955 - DNA, 1154 bp, Arabidopsis thaliana landsberg
aattccaccgctccctctcgctcccttatataataggacagtgtatcttctctcttttttagatcacaactaaaacaaaaaatcctatacctactaaagacactaatcttccttttatttgtttgagttagcccaaatgacgatgactgtcgagaagaggatcgaagctggcgttacggtgagccatgaaggtgtgaaacgggcttacgtaactttcctcgccggaaacaaagactactggatgggtgtagttggtctagccaagggtcttcgtaaagtgaaatcagcttatccactcgttgtggcgactctccctgacgtgcctgaggaacatcgtcaaatcttagtggctcagggatgcatcatccgtgacatcgaaccggtctctcctccggagaacacgaccggttattctagggcttattacgttatcaactactccaaacttcgtatttgggaggtaaatatcttacttaatataaactgagtgtataaatataatattaccgtattatattttgtcaatattattaccatataccttgagtgatacgtgggtttaagcatgataacgcctattgtcactaacattgcaaaaaccatatataaattatgcttcaaaaaaaaaaaaagtctatgtatatatattacaccatttattgtcacagatatttaacgagttattaacatataaatgcagtttgtggagtatgagaagatgatatatctagatggagacatacaagtgtttaagaacattgatcatcttttcgatactcctcgtggctacttgtacgcagtcaaagactgcttttgtgaggtgtcttggtccaaaactcctcaatacaagatcggttattgccaacagtcacctgaaaaggtaacttggcctgttgaaagtttaggtgctccaccgccggtatatttcaacgccggtatgttggtttttggaccaaatcttgtcacttacgaggatctccttcgtgttgttcaaatcaccactccaacttattttgccgagcaggtacgattttttacggattttctatcatttgatttgactttattatatcttgttacggactctgataatattgtttatttttgtaggactttctgaattatactttagagacatttacaagccaatccct

SEQ ID NO: 17956 - DNA, 970 bp, Arabidopsis thaliana landsberg
agatctctcggcttctccggttattcttatctatagacatagagagcttcgtggaacaccaccgattattccataattagagtttgagttaaaaatggttcgataacaacctatctttcattagatctactaaccaatagtttcctgagaataccctattcctagatctttatttcatcgtttacaaccaatcaacctggtgtctttttactttgtttatattttatttcaatcattccctgctagcttaatcttgacattcaactcattgtgtgaacaaaaaaactttgaggaaattcgacccttaaatactgcaattgatctcttatttgagagagtaggtttaaagcaatttgaaccatatcaaatttggcgccgttgccaaagttcttgggagtcaccattgagtttagtttagagatttcgtctagtttttacttttattttgttactcacacgtttcttcttttttgtgtgtcatgtgtatgcctaggcaaacaaggagcacacaatagaaggagttgatcaacttgtctgttcttgagttgggaaaactcgaacgcaccaacaacaaaactcagagattagcaatggctaacagagccatcagagctgatgaggaaggagtttgagagatgaggatgggcaagcctacaatgaggcttgtcagagattggatgatcatgtacttatccaccctgaggacgccaatgaggatcaggcgcgcctcaatgcacaattagctgccagagatgcagcagggctcagtgtcgagcgacaccaactaggtgtcgatcgacaccttcaggaccagaacgaagatgcgattggtgtcgagcgacacaacagaggtgtctatcaacaccaaccccagattcctgtagttattcttccatctgcggaaccacgtcgtactcttggggatttcaacaggccggacctattctatgctaatcgatcagtgattgaa

SEQ ID NO: 17957 - DNA, 304 bp, Arabidopsis thaliana landsberg
ggccgtagtggagatgagctcgggtctaccttagaagctagacgttccttttacaacaacttcattgctaccttggccttgccgatcggaacaacataaaatgtatcgccaaagaggctatgactttacagcctatggccgttacttcaagcgccacaggttgtctcagtgagacggcctcaatccagatcctcctattcgtctatgaccagtgatggcttctgaccactcgcctgctcaatacatggctgctctttgattacagaatgatcatttgaagacttagctagcccttggtataggt

SEQ ID NO: 17958 - DNA, 1076 bp, Arabidopsis thaliana landsberg
cagtatgttatcctgggtatagaaagacttttacaaaactcacctgatttaaagacggtgacagttcgtccaagtgatggcaacatcatgccggtatatttaccacaaacttctttgatttttttcatggcctaccttctaactaccttccttctaataatccaagaaccatgtttactcttctgttgtgtagggtaggtgttttgacaactacttggacttgcaaggcttgaatccgaatcaatgttggagatcaaaagatggggtcttttggaataaatcccgttcgaatttagggtcaaagagagtgagtttattcgtggaacttatgcttaaaaacacaaagatattagacaagatggtcgttcagttaaacgaacattaccttaggtctaagttaaaagagtttgttccaacattttctcagaagaataatgtcttgattgtgctctcaaccacactgagactatgagtggtgtgaatcatttggtttagtcttgattgaacctcaattaaatatagtgttttttcttttcttgtttttactaactatgttcgaagagtggttaaaacctgcaatggcttgtgtcatgtatgatggtaataagaagatggatctttaggtatggctctaatacaaaaataaaatttataaaacgtttccaaagagtgatcaaaacaatgccttttgtctcttaagtgaccgaagaaaccttaaaacagacatgagatagagaaagcagtttctttccacctttgtttcatttttacacttttagtgctcggcttttcaagacttgtatctctgtcttccatattttagatcttcttcagcttcgagaaggttcctgactctgagaagtaagtgctttgagtcccacttcctaatcctaaagcctgctgaggattgcacaactctattccctgtcaaatagataaccaattggagtcagacagtgatgcaaatggaacacaggatcaaacttttgtcaagaatcgaatgaaatgtttgtacctgcacaggagtgaaagccaggctcgatgtcaaaccagaggtagtcgcaccacccgcatac

SEQ ID NO: 17959 - DNA, 1389 bp, Arabidopsis thaliana landsberg
tgatcgaattcttatggcgattcacaaccaaatctctctccgcttcaagagccttctttttctcaaaaacctcaaatttaagaccccttttagacgaaaaggacgcaacttgacgagacttgtcatcaatctccattctcaccttcttgaccccttgtccattttccataagcgaaagaacatgagacgagaaaagatcacgaagcctgtctttaagctcgtccatgtcagacggaacaacaacattaggaatcagctcaggaacaaaatcatgtctcccttgaagacgataatcccaaagagccacaacggcagaacgcgcatcgacccactgacgaaaactgaaacttgcagcgatacaaccaaattgaggcacgtgaactgattcctccggaatttcgcaaagcaaagcgatactctcgatctcttgtttcttagtcgaaaaacacagctttgtgtcactgttagcggcggcggggtgaagcagctgaacgatgaaattaggtctagcccgcgtaactggaggcgagtatcccgacgacggattacgatcacgcctgtaatttggcgggaaatttgagttagggtactgagagtgttgctggttccaagtaggacggtggttgagcggcggagaagattgtgcagagcgagagttataacggttcgtggaggatgagtgagacgactgctgacgaagatcagtcgccgatcttccaccgtctgaaggaggaaaagagttcctcatgatgggatgatgccagtttttgttttgtgtgtgtgtgtgtttgtttaacaatgagagagcgaaagagaaagactctgggagttgaaaagagttaggggtagtcgatcataatttataaggaattttgataatttaaacaaatcattaaaaataaataaatcaaaaattctacattatcgctaaagagtttttttattattttgttaattaggcttttataagataattttgtaaaatttttcaaacaatatttttatttttataatactttttacaaaaaatttatgactttattttgttaagaaaaatgtagaaaatcatgaaccaatagcataataatttaattcattataattagagatttttttgttttagttgaataacacaaaacttttactgattttataaaagtatgaatccaataactccagatttataaaagttttagattacttctaacaaatctaaaatgaataacacaaaactttaacaaattttataaaatcttgattgaataacaacatattctacataacattttaaatcactaagactcttttgaaatcataaaccaataatggcccctttgagaggagacagagttatatcaatcaatattaatatcctactaaactttatta

SEQ ID NO: 17960 - DNA, 614 bp, Arabidopsis thaliana landsberg
actattcaaggcccctccagcagagacccctcgaagcgatatggggataagaagaggaagcattccgatttggatgctcgatctccagcccgctctgtccgggctcgaactgaagagagggatgctggcccgagccagcaaaaagagaaaggcaaaaagggggactctcaagatctcgaggtgctgtcatcccgagaatctgaagctcgcagctcgcagtctcatggaacaccgcctttgccaggttagaaatctattcctctaaatgccttctttctccgagatactgacaacttactcagttatggccatgtttcagctcctccactgccttttgccgacctgatcaggtcgttcacccatgcgggcgcatctatccctccattgaaggagctgaagccgaccaaccaggagaactacctacgtttcgtggagaaactgggcgaggtaaacattcttctgaagaataaaatctaagacttagttgaaatcttaacccttctattgtttctttatcagaccgtgttgaagttcaactacgccttcctgagtaatgaacaccagctctacggacaagacagggagattgagagcttcaagcagaacgaggagga

SEQ ID NO: 17961 - DNA, 486 bp, Arabidopsis thaliana landsberg
gcctattgaaaattatactaagtcaattactacctcgtcgattgtgtttcaagactctgtgtttcctgctcctacttctggtcaaatatcttggtctcttcaatgtgctgaaacgtcacatttcaatggtttcttggctcctgaatatgcatcaacaccaacggtaatatgctgtgaagccttttgtgcttttactattctgaatcgatctggcgcattgattggttgattgggaaatctttttgcaggcgctgccacatatagagatatggggttttggtttcttcaagagtgccattgcctcatcacattcaagagaatgaaccaatatttgtcaatgcgaaacagtatcatgcgattctccgtcgcaggaagcaccgtgctaaactcgaagctcagaacaaactcatcaaatgccgtaaagagtgacttgtttcactgtccattttgcctaaaacaccaaagagaatgagggaaaactaactc

SEQ ID NO: 17962 - DNA, 1233 bp, Arabidopsis thaliana landsberg
  unsure (1)..(1233): unsure at all n locations
agaccctgttctctttattaatcagtgttgtattaatacgatctttctcgtttccaatttaatgcaaccacttctcgtttttttgggttggggttaggggtgggcattcgggtaagcaggtcgggttcgggtaaaacccgatcgggtactggtccttcgggtagagtagtttaggacccaatagggtaaatctaaaatatcggttcagttttggttcggttgcaatcgggttcgggtcaggttctagttcggtttttcgggtaaaggaatttaggacccaatagggtaaatcttcggtttcgggtttgttttcgggtctaattgtttgcgtcggattcggtttgggtaatcgggtccggtttttttgcccaatcctagttgtagttatcaatggttgttattattgaaataactgaccgatacatacggactgtgatcggatcatggggaatgggtgctgatggtagctgggttttcatcctgaaccaacataacgccgttagacggatgagcattcgagaaggggagaaagtagctatcgttcgccggttagtgaaggaagcctatggctcggagtacgtagggtgtgaacttcatatgtcataccagtggcctgattggatggatattgaaggcaattttgggggcaggacgcggcttgtccagataacgttggatgagacgatgtccatgtacctgactatgcgttttcagttcgaagatttaagcttgtttgtgtccaaagttaacgttgaaggaggttttaatggagaaggaagtagtaacacgacgagttatggtccaccttgacaaagggaaaacgccattatactgtgatgagggtccctctcctaatcacgatcccatgnnnnnnnnnnnnnnnnnnnnnnnnnnnnnnnnnnnnnnnnnnnnncgctctactcagcctgtcgggggaaccgtgggagaatcttcgtcaaacgttcaatcagtaccactacggttaaacgttgagcacttttttagtatctcatctaccgatgatactgaaagtaaagatcgaaatgaggtacaaatgagaatgctttcttgtatgcaatatgaatatgagataaatgacggaaagtctatattacataaaactagattcttgacatctcgcaggatgaagattcacactttgttgaggctgatttacttgcaaatcttggtattccaacaattaatctggctgacgatattgacagcttcaaa

SEQ ID NO: 17963 - DNA, 1702 bp, Arabidopsis thaliana landsberg
aagaaacaaaaagcaacggagcaaagaagacattaccatagccgttggctctagagtgacctccacgcgcagattaacgcgcgtagcactttgctaagtacacgtcaccccaagcagctcctccgcaatccgttctcagccgtccgatcgcttccatcaaacagtcttgacactcagtcgcactaagatctccggtgcactgcgccacaccttgcagttcccccgacactcctactctgtatgaaccaccgctactcgccgctaaagaacccaccaccgagtctctacgagtcatctcgtccgagttataaccaaccggtggtccacaacgtcgaaccaccaccgtcttatcctcaacaccgaggaacgtcgtgttgtcgtatttaacgaaacagccttcgagctgcaacgcgccaccgcttgccatggcgcagagactccctagacggcttactgctcgcgcgacgcatcttgcacaatctcccgagccggaggagagatcaccgcgacactggtacaaaccgtagacggaggaactgtcgccggagattccgttggtggtgaagttgttgtatgtgtagagagaagctgagctaacgaacgaggtgagtagagagttaacgtttgactcgtaaggcgatcccggaaagtacttttcttgtgagcaaccaccgtagataaaagtatcgacagcggcggatgaaaacgttccgagaagtgacacgacggcgataaagagaactgtttttgtagcgaacatgactttcgacgattgcttctttttgttctctctctctctgtggtatgattcgagaaagaatgagaacgtcgctacttttttttatgcttggtgtttaactttttttttttatgattggtgcgttactatatgattatgaaacactttgattatattgtatttttatcatctgtttatcagttatatggtttggtaatcgatatactatattgtcaaaattatttactcggtaatcatatatatgaaagttggccaactttctccatatgagtgacacatcatcacactaatgagtgtcacatgtcatcctaaattaatattattagaaaaataactaaaccttggtgataaaaatttaaaagtttcacattgcattgaatcatccattaatcctatttttaacaaaatattttcatttaaaaaaaaaaatacaaaaaatcatgttaatgtatcaaactattttcattttacttttcttattttgctatttttataatagtcattactcgataatgactagaaattttcgtgtattacaacttaattgtttgctacttaaccttttttagtttagtaattttaacttagcctttttttttattatattttttggtttacatgatatgatatttttgtgtgtttatgataaattagtaacattaataatgacatgcatattttatgggatgcattttatactagatgcaaaatgatactattgtacccaatgtaaatagataaatgaattttgagatgcaataaaagtttgttatcggcaaaaaaaaaatttcgttattcataaaaaaaaacatttgcaataaaatcgacaagtagcatcggtaacccaaaacaaaagaaaaactcaactgaaaaaatgaagtcacttaaatgggccaagcccagtgtatggatagtttctaatgggctggtctgggctgggcc

SEQ ID NO: 17964 - DNA, 1410 bp, Arabidopsis thaliana landsberg
atatatatatatatatatatatatatatatattattcgtataaagcttataataaatatgtaggggaaagattttaaacatgttttaaacaagtgttacaaatttaactgataccagcttctaaacttcactaagatatcaaagtcttatcattttcttttagtatataagaacatacaatcaaaaatgaataacttatacctcactgacttactacaaatcagatatgtggaagattgggcagagaggagttccctatttccagagactcattgctgcgccgttcacgaccttgcggtccttgccaacttctttggtcgagacagggcagaaccgtgtcattgatgcttcgttaactctcatccgtgaaagggcaaaactcaaagtatatacattgttttattaaggcttatcatctaattaaagttttcttttctttctgtaatatgaaataaatagattattgtatttgtatgtattgttttagggagagttagtgcgactcataggaggagcaaaagctacaacagctcttcttggagtaccacttggtcacaactcttcttttcttgaaggcccagccttggctcctcctcatgtaagggaagctatttggtgtggtagtacaaactccaccactgaagaaggtataacaaaacttgtatttagaatgttggacagtttcatgttttgtatagcaacaatctagctgataatatttgtttttttacttattattactcaataagattctgtttatagagtcttgaatcatccattactacaagtttatgtgtggtacattttttattttaatttgttggataaattttagggaaggagctaaaagatccacgtgttctaagtgatgttggtgatattccggtacaagagattagagaaatgggggttgatgatgatagacttatgaaagtagtaagtgaatctgtgaagctggtgatggaagaggtaagctctttgaccattagacctagtcctactccaccttatctaaaaagtttccgataagtgaggtcttgtttaaggccaatgaagtaagtgaggtcttatttgctgtgtcaggaaccattgcgcccgctggtcataggtggagaccattccatatcttatcctgttgtgagagctgtttcggagaaacttggaggacccgtggatattcttcatcttgatgcacatcccgatatatatgaccgttttgaaggcaattattactctcatgcatcttcttttgctcgtatcatggaaggtggctatgcgcggcggctttacaggttgggtcgcttttttgttgtatatacatcacaatctctgggaaagatagtctcttaaagagaaacaaaactggcttttagggttgggatcagatcccataaacaaagaaaggaccgg

SEQ ID NO: 17965 - DNA, 647 bp, Arabidopsis thaliana landsberg
ttatactacggagaaatcctaaaactgacggattttggtcgatattaatacatgactatttaggtgtaattaacaatcaaatacaattatacaatcttaaaaactaaacaaaagaaacaatactaacaaaccaaatacaacttgaaatttcaaaaatttagttataaaatatcgtctcgtggtgtactatacatttaaattaaacaaaataatagcatatatttaaagatcatcttaaaaacaaaaattcaattttttaaaataaaaatataggcccacggtgtactgtgggttaatatgtaatttacttgcatgtttccgacgaaatatcatggtcaatctacttaacatttttgaactacaaaataatgaatttttagggtcggattttttcttttgggttttacccggttttttcggcccattcagtgaattctctttctttccggcccaaatcctctatttcgcatccttcaaattttctcgctcctgcaaacaagcaaagctagaatctcgcttaaatcattctgataatcaatctcggctaaatcattcaattacctgattttcgtggaagaatatatagtaaatcagtcttaatcacaacaagaatatattgtaaatcaaactgttaatatgataactcc

SEQ ID NO: 17966 - DNA, 1286 bp, Arabidopsis thaliana landsberg
cgacctcaccatttgattcacgcgaccgccactttacgtcttctcaaatcaaactctcattcactggacctctcgacaagagcacttccgcctgtccatcgccacttctcaccttatcatgccaccaacaacactcgaccgggactcgtacatagcctcatggtttccaccgctttgccacattcactcgaccaagctaccaccactttctcttctcaccgaatcattcactcgacttctccactgctttccaccgctcaagctccattagttcactcgacatcatctcattctcaaatcaactcgttcccaaatcagacgagaagaagaaggaagacgccaccatcaacaaccgcttcactctaaccacgaaactagtttcactcgaccttacaaaatcactcgatcacaatccacagaccgaaaaagaaaaaagaaaagcatcttcaaaaccgataggttcactataacggtatactaaacagtattgtgtttttggttttgttgggactaacgtattaacgtttatctttgagttacatttgttttaaggtttcatcatgagtaactatagtggagaatcctcaatggatcctgattataatgtggatgaagctgagtcttggtccactagaccagagagagaaaaacatgtttacgagagtttcagagatgaatttgaacgctccgcagcacgacgtaatcagagaagagctgaaatcgccagaggaaagagagcgatgtcgagtagatatgagcggatcgatgaggacatcgaaactgagtatgagccagagtcatggcgcaaggagacaaagctgctgaacaaacctgacgaggttacagtggaggagtatatccgattctttgagatgaatgacttctggggaacgaggtatccgtactatgagactttagcccagctggggttactggaggacgtgcagcatctgttcgagaagtgtcatctggagacactcatgtcttacccttacgttgcttataaggaggagacaatcgagtttctttccacacttcaagtggagatgtatgagggactcacagactttgagctggataccatggggttaggcttcttgacgttctcagtggatgaacagcggtatcagcttgtgatcaagaagttggaagaactgtttggtttccctagtggaaagggaaccaaacccagatttgacagagaggagcttaaggatttgtaggccactatagggaacaatctaccgctaaacttggcgcggtctaaaagcaaccaaatccgaagt

SEQ ID NO: 17967 - DNA, 527 bp, Arabidopsis thaliana landsberg
gatgcagcccactgagagggattcgagaggcgttccttatggagtaggaagcctaaagagtctcttgtcaatggcaagcggaagcaagcaggtgactcaacttcttttgtggctttgcaagaacaattacttgaagctcaacgcaagatagaagagcaggtctcttacaatcagaggcgtgaagctgagatttcccgagctgcagatgagcagaagaagaagcttgagcacttgtccttagtggagaagtttttgcgcgaaaatgttcctcagttcctcaatttcctcgaatctcattcagctaaggagataaccacagatcctatctcaccctctccagctgcctctccctcttcatctgcttcataggtctgaatcttaactccttcctcaagactcaatatcacggctcaaagtttttatatgtgtacttgtgttgcttgtacttatgctgaacaaaattctaagttgtattgaatcgaacatgtttctgtaatttgggttctgtacttttctgaaatgacaat

SEQ ID NO: 17968 - DNA, 1308 bp, Arabidopsis thaliana landsberg
  unsure (1)..(1308): unsure at all n locations
ttttagcaattaactttgatatttctatattatcaactaaacatacatttaagtaaatagccaacaacatattaaatataacataaaatgccactacaaaaattcatttcaaaaaaacaattgatttacataaaatcatgaaaggtaaaaaattcaactgtaaaaagatgttattggtttatgatttcaaaagagttttaatgacttaaagtgtaatgtagatctgatgttattcaatcaaattttttttaaagtataattgtgttaacccgctttaatatttataattgggcaattacaaattcatataaaaaaaaattaattatgattattgcattcatataaaaaaattgaaaatttaaatatgattttttctattacaaatagggattgttagcttacttttaactgtttttttcttaattatactaggtaagtaacaagagtataagaacattatacagttcaaaatatatatttaagcaaggcattggaaatatgtgatggaaaattgatataacagattatttttgaattagtttactatcgacgtattttttttgtcggaactgtcgctcacgatttgcaatagaacatagccatatgtaatcattttgatctatatttttgagttactccaagattcaaacaatttaacttccgttataatctacaattaaccttccatccaattccaaaatcaacaatattttagccaatttgtgcgatgatcatgaatttgttttgttaaattcattgattttctagaatccatcatgtacataaaaaaaaattagtggaaattgatatatttttttctcgtaaatgtttttttattgatcgaaagtctacggcacaaggtattcttacaagacaatattttaagagctaacaaaacgaatatatagcccacaaagataggcccaagattaaaccctccaaagaaagaaaagagacagcaaagcaaactatcttcatatcacaagacgcgtcagacggtaaagatgagattacgacacatgttgatttcacaacctccaccgcaagagatccaacttccgatgaattttagatcgttaccggaaaactaagttcgagcaatcaaatcttctgtttctcaccgtaatgacaatcgcagatcaccatannnnnnnnnnnnnnnnnnnntcttaaccaattgaatctttgattccttgacaacaacgacgaaaaggtaattcaagatctacacaacaactaaagcttttaattaggaccctaaagcatattaaacgatgaactgttttaacgagtaacatcgcttagaga

SEQ ID NO: 17969 - DNA, 610 bp, Arabidopsis thaliana landsberg
ctatgcaggaggaggcaagttagtgataatgagattggttctgatattagagcagctattttgaagattgggggtgtttcaaaagaataatgggggtggttagaaagaagtgttgaaaggactcacaaacgttagttcgctcttctctctatctctcacactctgtttttgttccagtttgtagtgtacacgtttaagaaattataagactacattgataaaaaaacttggaaacaatcttacacaacactgtcaacacacacgcacttacacacagtcatgctcttaaacacataattactacattggaattctaacagcaacacttgcacactactttgctttaactaaacttcaacctcaagctaaccaaaaaaaaacactttctcttgtttaggcctcaaccaaagctgcagtcctctgttgacgagtcatctccgacccatcttcttcttcgcttgttattctgttgctttgcttctcatcttcatcacactgattctttcttttcttgttgcaggtttgatctccacaagaagatctctattgctagttgcccacttgaaggtaaaattagcccatttttgtttacttaaccgctcaatcggaa

SEQ ID NO: 17970 - DNA, 1014 bp, Arabidopsis thaliana landsberg
tcataaatattcattagtataattgatacagtatatgtttagttagtacaatatatattttgttaagttggacatatgttgagaataactcagttaaatcagtgcaaagtaatagtcaacaagacaacaactaaattaaagattttttttttgtttaaaagactagtcgaagttttaaatattttactccaaaaagcattggttcaattttaggctaaagactttattgtttcccctaaaagagatcttcagcttatataaacacaacattcattaacgtacgcaatcgatgatgtcaaagaaacccgtgatggctgttgtttagtaatgtagagctaaaataagcaaaaacaaaaacttatgactttactaacgacaaaaccgtctttatccttaagtctttacaatatctccgactcgtcaaatgccacaaacaccgcaaaaaatattctacctgattttttccaaagttttgaaattagattttttttccaaaataattatgcttgaatggcacgtttttgaaagaaaaaaaattatatataaccggtacgtataagcctaaagaatttggctacaccacacgtctagaaatgtacgaatagagagtgaagtgaacgacacataataaaaccaaagaatggagatatggttactcatattggcctctctctccggatctctccttctccatctcctcctccgccgccgtaactcctcctcccctccgttacctcctgaccctaacttcttacctttcctcggaaccctccagtggctccgggaaggcttaggtggcctcgaatcctatctccgctctgtccaccaccgtctaggccccatcgtcaccctccgcatcacttcccgccccgccatattcgttgccgatcgttccctaactcacgaggctctcgtcctgaacggcgccgtctatgcggaccgtccaccacctgctgtaattagcaagatagttgacgaacacaacatcagctccgggtcatacggagccacgtg

SEQ ID NO: 17971 - DNA, 1290 bp, Arabidopsis thaliana landsberg
  unsure (1)..(1290): unsure at all n locations
agttcatcctcacaatatgtagggctctttaatttgttataactatggagatccctctaatcatattgtagcaggggagtttgatacatttcaaaatcaagaatttgatgacatggataataaccatgttggtattgacatcaatagcttgagctcagagaaagcttctacagcaggttattacgaagacgatgatggtactttcaaaaacatccgcctcataaatcaaaaacctatacaagcctggattgaatatgattcctcaaggagacaacttaacgtcacaatccatcctattcatctccctaagccaaagattccattgctttctctaaccaaagatttatctccatatcttttcgactctatgtatgttggcttcacttcagccacaggccgtcttcgttcatctcactatattcttggttggaccttcaagctcaatgggacagcttcaaatatagatatttctcgtcttccaaaacttcctagagactctcggagtacaagtgtgaaaaagatcttggctattagtttgagtttaaccagcctcgccatcctcgtcttcttgaccataagctatatgcttttcttgaaaaggaagaagttaatggaagttcttgaagactgggaggttcagtttggtccacataggtttgcttacaaggatctttacattgccacaaagggtttcaggaacagcgagcttcttggtaaaggagggtttaaaaaagtatataaaggtacattatcgacgtctaacatggacatcgcggtgaagaaagtttctcatgattcaagacaaggaatgagagagtttgtggcagagatcgcgaccattgggcgtctcagacatcctaatctagttcggcttcttggctactgtaggcgcaaaggagaactctatttggtttacgactgtatgccaaaaggcagtcttgataagtttctctaccaccaaccagaacagagtcttgattggtcacaaagattcaagatcatcaaagatgttgcttctggtctctgctatttacaccaccagtgggttcaagtcattattcacagagacattaannnnnnnnnnnnnnnnnnnnnnnnnnnnnnnnncggaaagctcggtgattttggtctcgcaaagctctgtgaacacgggtttgatcctcaaacctctaacgtggctggtacgtttggatacatctcaccagagctttcaagaacagggaaggcaagcacaagttctgatgtattcgcgtttggaatactaatgttagagatacttcgggcaagacc

SEQ ID NO: 17972 - DNA, 568 bp, Arabidopsis thaliana landsberg
atccaaccagagatgaaactcctgcgaaacacgagaatacaaggaagtcccgtgaagagaaaggaaaagtaatggctaatcaggccaagaagagatcaacctctgatgccgttttgaccgacgaagctccgccacccaagaccttctgcttatctaggggtgaatctatcaaccctgatcaattttcattcaagtatgttggagatcggttcctcatgagggaccaggaagcggccagtcacctatggcgcaacttgatgctccctggggcgaatgcgcttcccaatcctgacgacttggtcctaagagaagagtaccatcagtttgccagatcatccttagaggtttatttctaacatgaccatctgttatacattttgtatattttttcatgagttctgatttaatcttgttgcttctttctcagactgccacgcttgccaacaacctgatcgccacctacgattggtagctgaaactaaagcttgcggacatagacgccttcttcaatttaaagaaaagcgtcgaccagacgaggatcaggtatgacgtagacatgaaggagatg

SEQ ID NO: 17973 - DNA, 1133 bp, Arabidopsis thaliana landsberg
aatactaggccagccacaaaagtccactaagcccaccaagtagaggacctacgcagctgatgagcccacatacgcgaatgggtacttgggccagataagcccggtcacttgatgaagggagataagcgaataacaacctaggaactgataagaagatattcgccgaacggacctgatatctcggaactgacctgccgaatatctaggaggatctccgcagacccggacggagctaccacatgcgtagacctatataagggagcaaggacgacttggaagacacattcaattcagcttacattcacacaaatacttttacacttgtaatctcctttcacattgtaaaagctttgtcataatcaatacaaaaagtccagtcgttcttagcaatataactctcaaggtttcagtgaagatctagccctcctttctcatcatctcaattacaaatctctagtgtggatttcagaacccacatttggcgccgtttgtggggacggaaatagatcataccaacaccgaaacaaacacatcaattgtgaccaacgatcatggatcccaattcatccaattcatcgggatctggcttaccagttcagatcccaaatgatgacgttacggacgggcacctcccaacggatctccctcctggagcccaggttgatgctatccataacagtgacccgaagaacatctcccaaaactcgaattcttctggatctgaccaaatcactccccctccgcaaacaaggggcggagaacgaaacgtcacgatacagcctccaaacggagataacccggccaacctgtctaatcaggttcgcccgcgacctgcgagtgaattggccgagctccgcgcaatgatcattaacttgatcaacttaaccaaaaaccaagaaattgcgcatcgcaacctcgccacaattgtgggtcagcagagacgctattccacttgcatggcacatgaggtagagcgcgatatcgcgggtaaggaggtttcccccgcgaaactgggattctgcccaggtcccatagatctgacaggtaccgtctcccggccgatctactccgagaactcgtctggatttcgcttgatagacgtctcactcctatcaaccggcagtcgccttttt

SEQ ID NO: 17974 - DNA, 624 bp, Arabidopsis thaliana landsberg
  unsure (1)..(624): unsure at all n locations
acttgaatttcctattttgcccctttctttttgtgtctctgtctctcttctcgattttcatttttttaattatttttatttccgggatatatgggtttgatttacacatttgaaaaaaaactactactactatagtctttgatttgatgaaaggaaaaaacaaaattgcttctttgttttttttttggttgttgtctatatacataaataaaaaattcaaagttgcgtagattaaaaatagttattagtccgagaagtgattttgagatctgtgcgtagttttgtgtttactaacaattgttaatgaaaagtgattaccgttaatttaattatatgaatctgaggtgtttgagtaataaatatttggagcgtattaattaattatagtagacagaaagatcaataaaagcagaattgaattgatccttcctttattagctgttggtggcatgttggcttataaggtaatgatgggaccatcacaacctaattcgttacatttttcttcttatactaatttatcagcctcgaaacttcgttgtggctgtaattggtttttntatataattaatgatgcgtcgttggatatgtttttagacattattatggctcttaatagacgaa

SEQ ID NO: 17975 - DNA, 2683 bp, Arabidopsis thaliana landsberg
aagccatctactgaactacgtttgttgcacattccagatacttactgcaacatattgtactaggaaattaggcgaaaaataagtaatgcaaactatatataaaatggttaacaaacctgtcacataagtgtagttgagaagcattccatttctctgctgctaagagatgtgaccgaagagcattcagtttttcgataacactagccacattattggccccattgcttccagagaggtctgcttctgacttgagatgagacatagcatctttagaatctggaaagtcaaaactccaggtacattctgtggaggtattatcaccaaaggtggcttccaatctgctgaaactttcagcttcgcctttcccgcgagctaaggcaaaagctaaggttctctgaataggaagtttcatgtgattaagtgataatgcataacttgtcttcttatgttggttgtttatgtgagacctgctggagaagcaaaggatcttgtctctcaacaagtggcttgaatcaagtcctaccatatcgactaattgaatcacctgagaatcaaaacgaaaaaggagaaactgttatagattgacacagaggttaaaacctaggcataaccacaaagacaagaaacgaaacatgtataacgcaaagaaagaaaacaaaaaaacaaacaaattccaagttcgtgaaaaggacaaaaacaagcctaccacaaatcaaaatccaggaaacaaatcatatctaagcaaataagttttctaggctactggaatgggaaaatatctggaaggaatcaaaatcaaccgaaactcattccctagaggacaagaacatgagaaatacctttgttatggagaagcgctttgttcagataatgtcttcgctctcgtcttgaggagaagaagaagaagaagaggaagagaagacagatttttcaacgaagaagaagaagaagaagaagcagaagaaagaatgatgaagaattttcttaatgaaataaaaaaagttgtggttaaggataaaaagggagtgtggcgagcgcgtgtcagattcatcttctcgtggaatctagtaacacggacggatgaggctgaaaggtccccattataaaacgacgtcgctttgtttttctaaacctattcagacaagagacccaaagatagaaaaaaaaagaccggtccatgcggtttaaccaaaccaattccgtgaaaactgattaatttggtttatctattccaacaatggaaattgtttggtaaattttaaaagagtttgggaaagtagctcctattgtaaaagagttttataattagacaaagtcgtttatgaatatatgaaacacttaactgactatttcaaatttcaaatatatgtataacttttaaccatgtaagaacaaaaaaataagaacggctaagtttgcttaattagattttgtaaaatttgacacattatttctaaattacattttattgaaactatgattcaaaattattttattggatgttttttataaagtttgtgaaaattattagcggatttgtaaactgaagaatgaacataaaccattcaatcttttagttacgggaataatgaaacctataaatcggtacaaagttacaaacacatttctaagcataacatttgttcaacacaacactctcaataggaatcttatccgtgggaaaatcacagtctgagtccattgtagttctcttatccggtaacaaactgcacggctccggtgtaaccctactagtaactccggagacatccgtgcagttccactgcagcttcttcgggtccggcgacaaagctatagtcacactcgacatgcataaacccgtaaatggaccattcttgatcccttctagctttgccgaaattgtaacgttttctgcggtcatgtcacggtaatggatattgctaatctccggcaacgccttgggatcaaacccgcctacgggatgcagcttatacgaaccggtcatccagaaaacgtatttcatcgtcttcatcgtaaatctcctagcgaaaatgtctttgatgtaaccgccacgtcctatagcggttttgattcggatagcggattgtgtgttgattagtgtcacctcttcagttttcggagaagatgatttcgatcaacaaaggtcttgatatcgacttgaaaccgccacttcgatacttcaaccaccatgacttcccttgtccattagtcgttcttttgttacctaacaacaaatttgatcttataaactaaatatataattttgattcaatctcatatatatatatccatcaaaccattttaatgatttaagttttgttgtgcttaccggtgataacaacatcggttaggttacttccgtatactaaaccagtaaaccttgcatctccgtatgacggcaaaggtggaatcataggatattcagactcatcctgtttgttacaaacgaaataaaaccaaatgtgattatttatctcaaatagaatggttgatattttttagtgcattcataaataggtgtacgatactagctaaaattttgagcttagatatatttattacctgagaagcaagaatagttgcaccttgctggataaacaaagtaaaatggcttgtgaggttgaaacttaaagtgaaccaactccccggcggtacaatgagttggactccaccgtcagcc

SEQ ID NO: 17976 - DNA, 355 bp, Arabidopsis thaliana landsberg
gtcgccgtcggagtgggagtcttttgcgaagacgtccttcaggtccccttcgggtgactgatacccgaggtcctgttcagccgcaaccacctcgccgtcgtcgaccttttctttgccaggacggcggcgaggtggggagccgtctctggaagactgctcacatcgctcgctgacgcgttttgcgagatcaatgatctcgcgacactccgcggcactgtggcgaccgttgggatgtatagggcatgagtcgccgttacccctttgtggccgtgggcgtttgttgcggtcgccccggcccccgatcgcagctgcgacgaccagcacggtaggctgcggcttctcatagccgcgaccc

SEQ ID NO: 17977 - DNA, 1173 bp, Arabidopsis thaliana landsberg
atcagatcttgacacaatttgtaatgctctgaccgtttctactaatgagcattaatgtcctttctcgggtctatgggctctaccactgtccaactgtcggttcactatgtacgagaggctttaagattttttaccacccttacaaatcaccacatgatcttttcctgtgctttgtcctcattcacacggttcggacaatcactttccggaaagtcactcatcctgaatttgctgcatcccaaacatgcttagctttgaagttctcttcaacgtttgatcgaaaagataagtgcactttggtgacatagattgccaaatcaattattttaagggcttattgttaaaatagaaataattttattaaaaactctgattttaggcacattgagagtgtgctttgaaaaaggggactttgggctttggaatttgacaattttacccctttcatctgagcttctctttcctccttcatcttcgcagcttcttctccacaatccaacttttctgcaaaaaaaaaaatctgttatcccaaaaatcttttatagttgcaattccccattgattcaagattactaaaccctaaagatgatactatacagggaacccaagtaaaaaaatcaagcagactttatacgttttagatgtgtacatagtgaactggttcctctcgattgcgtttacagaaactaatccctaagagaactagtaaatgtggaacctaaggggaaaatcaaatgaattgtttgtaatcccttttgattactttgtaattgttaattgtttacaaagtaatcaaaagggattaattagaaattgagaagctttaggtgttttgttgtctggatttcaaaattgaaatcatcttgtgaatggattttaagggaaacccaatcagaaacttaaccctaaggatgttgaaagggaacccaagaaaaaaaatcaaacgaacaatggtaaatgtttcagatgcaatcgtaaatatttttttaaaattgaattatttagcaaagcataacaattcacctctatttgtaatcgggaatagcaaatccactatgaaaccccaatcttcatcttctataagtgtggcaaagtaatttggctgtatgtgataagctatgaatgcaaatctcactcttttttaattaaaagaaagggattgatactgacgaa

SEQ ID NO: 17978 - DNA, 1613 bp, Arabidopsis thaliana landsberg
  unsure (1)..(1613): unsure at all n locations
ctctacggggtgatgatttttttttttcttaatttttgctgttgaactaggttatttgcagagtctcttgagatcaacctattcctcaagaccactgtattatcatctacaacaactggtaatgcttctgaatcgatgtttcttttgttttctattgagactggagtttctcgtttcctctttgataaatttgctttagtaatttaatatagcaaaattgttgttagtgggataggggaagtgattaaatgtgctagtggaatgactacatctgttatctatctgaattatgcgaaaagacacatctcctgaaaccattcatctgtggagaactatgttatctatgggtatgctgcttcattcttctctgatctaaatctgtatgttttcagggaatttctacctcaagacaattgcaggcgggtgaggagcctgtatcatcacctttgtcatctccagctctgctgggtagtggaaaagaagaagagcagaagattatcccaaagcgtcagaaagttcaggctgtcctcaagtccataaagcaggtgtgttctctctaactcctagtacagttttacattttagatgatatgtatacatcttgatttgttatatgcgctatataatgtgcccaaaccttacttattgcagagtcctaagaaggtcaacttggttgcagcactagtccgtggcatgcgtgttgaagatgctttgatgcaattgcaggtcacagtcaaacgagctgcacaaactgtgtaccgggtaatctctgagatccgagtttacaaacaaatcactgttggatttcgagtgtctagtctaatctcctctccaggcatttgataactttcctcatctaatgatacttagcatacaacttgttttgttaatacaatgcttaaaggagttaaatacattatactgcaggttatccacgctgcccgggcaaatgctactcataaccatggactagatcctgaccgtctccttgttggtatgtaaaactgattctggatccctgatttccttgttttacatttaaaaagagaacgtgatattttagagagttcgccgattggtactttaaggaagcaaacatgatatgccagaacgatgtatttcatctaagcttttgatatgtgattgcagcggaagcatttgttgggaagggactgtttgggaagaaggtagcttaccatgcaaaaggaagaagcgggattatatcaataccccggtgtcgcctaacagtcatagttagagagacgactccagaggaagaagctgacattgcaaggctcaaagttcacaattttaagaagaaaagcaaacgggagagacagcttgttccacacaagctcatcgagacaagtccaatatggaaccgcagaggtaccaaagccaatcatcggtcctcagagttggtacggtcgtctcactagtatctttgttcccgcaattnnnnnnnnnnnnnnnnnnntatggtaaattgcttttttttttggctttggcttgatattgtattggaactctataggacctgtttgcttcttgtattcaataaacacgttcccagagaggcaacttcacttaacaaaagcgtctccgtgtttctc

SEQ ID NO: 17979 - DNA, 1594 bp, Arabidopsis thaliana landsberg
tctaacaatgattaacaactttccatcatctttaaacccaaactaggtataatataactgtacttacaaataagcattttttatgaagagtatcatctgaaaatttataaaaccatatacatcttaattagtatcttttcgttatctataaattttaatcttaattacgatacggtaacaaatttaataatacaaactgttatattacaaatcgcccccatgtcgaacatggctccttgtggttcaagatcatccataagtttttcaagatcatccataagttcttccatctcccgaaagtttccttagagacaaatttaataatacaaacagttatattacaaatttttaatctgtctatcacattgttatctgacttttatttatcatcaaaatgatgatgtagtttatatacaaagagatccatatatccgtatattaaaaactgaactcacattattgggatatagaaaacccgtatagagaaccgaagatcgacggtcaagaggataagacgaaaatatgacaaaaatatattgttaatattgaagtttagaatatttagcattatttctaaatatattatgtatatttatatttattttagattatgaaacttagatcaatctcatctctatataaaagaatgcatcttgtacaattattcttatgagaatttattataattaatcttagacatatttgtgttctttactcttatcaatttatcattgcatcagaaccagcttatgaattaagattgaaagctcggatactataataaagttacatgaatttttaacccaaaatcaattggcaataaatacagcgacttatgtctcttatatattagtcaatgtctcattacatgcttcctaaacattatagatcttaatcttatgacctaataatccctaccttaatctctaacagacattatacatgttacgagatgtttacgattcagacgagatatttagaattttaattactgtatcaacgtatgaatattaatttattggctaactacttactagaccaaaaacgctttcaccacgtaaggacaatattatttacaaaactaatataggtatccgtgtaagggtggtcattgatagatccgtttattcgtataggcaaactttttcgagtatattttcctctacatatgcttttagttttttttttttttggggttaattctcttttccgatcgtattcccgctgacgataccatgggttaaagtgaacgtacgtaaagtagtgtgggaatattctcactctaccaaaataataaggtaacactttcatagaacgagaacctatgttaccgtcaactcaagtaactattttgagctttttgccacttggatttctcaattacgaacaaaatcaaaccaacaaaaatgattttacagattaatacataatgaccgctaagtatctattttctttgcaacacgcattatctgagtttaaatttggctagtactacatcgataatttacaagtcctatgctaatagtctaaattcaaattaacaatctaatatccgaacaaatggaaatcacggatatatacccaattacaaata

SEQ ID NO: 17980 - DNA, 1628 bp, Arabidopsis thaliana landsberg
cttttgtccgtcaacagggactactgttccttgtagaaatttgcacacctctgaacacatatcatcagtgttcaagtcgcatgtgatccattcataaccacaaggaagtttttctggttcttgcttgacctcagataacggatttgccggctcaactggactttcaggcaaactcgtgtttccgacatccttatgggcctttgcttcgacgatttgatttgttttctttttttgagagtggatttttgagctttcgccgtcctcagctctatcataggcattgacatcagacggcttcatccccaagaaacaaagaagcagaatggatgacgtccattgtttttgtttgtctactatcctctctttttcgtcatctttaaataactccaaaagctgatgagtgaagcaacctattcctcgttgtatcaaggtgctaaaacccccaacacaatgtcacatatgaacaatataactttagctccatactggtccattatattgtttttgttgctaataaatcatttgggcttcttctgcgtcgaagaattcatgtcggccacaacaaaacctctataaattaataatattaggaccaagaaaatttattaatttagagagatattaatttattgataaataaataaaattgtataaattttgtatacaaaaattcgatataaaatatagtttgttctttaaaatcaatagtatttctgaaaccaattacaagtagaaaacaattattaagtttgaaaaacaatacaattttttttccatgttgtaaaatattagaattgaacactacaaaaaattaacaaaaattgaagaaaaacattactacactcatattttacatatgatatttataatatattggtaaatttatataattattaatttatactattgatgggaccatataattatataagattttcaaaaatattattattttattaatttatcgatttttatcaatttttacattggtcccaacttgggaccggaaaaatttattactttataaagattatataatttatcaagtattaatttatataagttttgctgtatatgtttggcttatgatgtgtaatttgtttgaaattggggggaaatgatggggactctgtgactttagaatgtataagaatgatttaagtattatttctaaacttgagggttctttttgaaaattacaaataaacggcaagccaaccctaattcgagtcccatttctgtgatcttgacctcttcctttctcactcaatttctgagctaaagttagggttttgccgagatttatcgtccttctgttaaactcttcggagaaagatgaaatctttcctcctctctagacaagcgatccaccgtatttcactattatcttcaaaaaccccaactttctgcagaaacttctccgccattacatccaccatttctcactctgatcgtcatctaagaagctacgacgaacaaaccccattccaaaatgtcgaaatccctaggcccatttcatcattcaatcgatatttccactttactcgcgagtcccgactcagtgaattcagtgccgccattgacgactcaaatgaccaagaggaagatggcgaagatggaaccggaga

SEQ ID NO: 17981 - DNA, 1169 bp, Arabidopsis thaliana landsberg
  unsure (1)..(1169): unsure at all n locations
gcagcgtggtactggtgtagggagttaatacgggcgaagacagcggttgttcttggatggtggcagaattcaagaaagttcgcatattgccaatacagtgggtcttcagattggttctctgcctattcggtatttgggagtgcctctatcttctaagataatgacaaggcaagattacaagcctctcatggacaaaatactttccaggttttcttcttggactgttagaaatttgnnnnnnnnnnnnnnnnnnnnnnnnnnnnnnnnnnnnnnntactcaattatcagcttctgggcctctatgtttatttgaccaaataattgtttagaggagattgagaggatgtgtagcgctttcttgtggtctggaaaacataattctgctagaggagctaaagtgagttgggagtctgtgtgtactcctaaagtctgtggcgggttaggcttgaggagattagcaccttggaataaagttttgggtttgaagttaatctggttgttgtttactgctggtggttcgctgtgggtatcttgggttaggagaaatcttttaagagatcagaacttctgggatttggtgattgtgaactcaggaagctggatttggaagagtatttacaagcttagacctctggctcgtcaatttgtgtgttgcaaagttggttcaggaatttcttgcaatttttggagtgagaactggacagctttaggacctcttattcttctcacaggggacttaggaccaagagtcacgggtctgcctcgttctgcttcggtagcagatgctataagggatggagattggtggattaatgggagtaggagcagaaatccaattatccacttgctcaagaactgtcttccgcctccctctatggtgaaccttcaagaggatgcagaagatgatctcttcttctggaaaattggagaaacggagacagttaatgagttttcttcagctgcaacttggcttcacttgaaccctattggagagagagtggactggtttaaggcgatttggtttaaaagaagaattcccaagcatgccttcattgcttgggttaatatgagacacaggctccatacaaaggatagaatgataagctggggacttattgttccgcccctttgtttactttgcaatactcatgatgagacaagacaacatc

SEQ ID NO: 17982 - DNA, 495 bp, Arabidopsis thaliana landsberg
aaagcaatattaaattatttatccataaaccgtaaaaaaaaattgttatgaaatataaaaatatatgagccagatgatgttggttgggctgaagaggacaagaaaaagagagtagacatgtctgaacacatcattccaagtcagacaactaagtagctcctggatcccgatagtttcgttattgattgttcgacctctactatccagttcagccactctctctgcaatctaggatccataatcaacctgatgcccaagtctgttgctgaaagactaaacataactacctacatgctagcacgaatcattcttttcttcgcggatcgctctaaacaagtccttgaaggtatcttcgaggatgttcctgagaaagttggagattgcctcatcctggcagattttgtggtattggcatatgatgaagaactcaaggatcctcttatcttgagtagatctttcttacctacagttggtgctaggattgatgtagaaaaa

SEQ ID NO: 17983 - DNA, 1146 bp, Arabidopsis thaliana landsberg
aaaaacccctcaaatcggtaatttttgcaatctttaattaatttctgggtacaacatattttcagtcattatatatatccaaaggttaaataaataacaatctattatttcattcaccaaaaaaaaaatctattattcatgttttgttgacaaacaattgataaaaaattataaagtaatataaacttattttctatgtttttcttatagaataatattaagtattgatctttcatcagctataaatataaattccacttcgctaaccctaaaaagaattttatattttgaacacacacacacaaaattgtaattttgggaaacaaaatttacatttctgacaaaaataattcaaatgattgtttttgtgaaagagaatttcacagtatttttatttttgtttatggcaccggtttatttagaaaccgtgtttctgaacgtaataaatcagatgaccatgaactgatttgtttgtcttccggagttgtcatagctttttgatcacgtgataaactaactaacattcgattatacaaaactacaaccaaaaggtgaaattacgttttattgaactctgctaaaactggagctttagttgttttccaaatcggcgtgggtttagtttagcgcctagtttataaaaaaatcgtttgatacttgtccattactgataaaacgtatacatattcaatggtcgtaggtaaaaagtacacatggggaggttggaattcatcactgactcattagtcttgattttttgttttaatgcttgatcacgtgattacctaacttacgttttattggactgtcaagaaactgtttaaaaatggagctttaggtgtttaacttatagttaactaaacgtattagtaattgtccgttattgataaaacgtattacgaacatattcgatggtcgtaggtaaaactacacatgcacaacttggagttcatcgtcagtactcatttgtctttatttcttgtcattcttgtttgatcacgtgactacgtgagtagctaactcgcacaaaacgaaaatttattagaccatgtacatgagtgatttattttgggtatcaaaatcatattttaattgatcaaactatgaatttgggcttgatttatatcagtggattgatatctttaa

SEQ ID NO: 17984 - DNA, 746 bp, Arabidopsis thaliana landsberg
cctaagggtgcgactcttttgttgattaagggtttgcattggatggctcaaaagagagtggagtatattgagactactccttctgtgactttgctctctcatgtccgtatagtttcttttatggttttcctccttatcttagattgtctccttacgtatagttctatacggcaattgattcagtcacgtaaagcttcaatgtcagtcttcttcacgtttgagtaagtgtcttttacctcttacttattttcatggaatcaaactttttttgttgggttgatgttactaagacgggctaggattcttatagagttgaaaatttatgaaggatatacgcgcatttacatgttttcagagcgttaggttgttttggctgccaagaatttgggctgaattttgaaatgtttgaaagtttttgcacctgccaaaacttgtgaatttgacgtagctgagttacataggagaaggatctctaataaatcatctttcaggattttatttggtctacgataactgacctttcggtttagatatcattgtagccctatatttggatagctagtatgttttaaatctctatatacaagtaaaaatatgggaactattactattgtgaataataactctgatgtttgtttgagctcttttggtgtcaggaagaactaactatatgggaaactattgtgaatgtgtttttctatgaaccttacttaaaggcctcttagatactgttttagtttctagga

SEQ ID NO: 17985 - DNA, 2607 bp, Arabidopsis thaliana landsberg
tggcatgagccttaggaacgagccacgtggtgtagagattaccctgacctttggttcaggtacatattgctaattttaaatatataaatattcataaaagctacttttgattctacaccttaaaaccccagactcactcacatacattataaagataatttagtatctatgaatctatccaacaaacatgaatctacgtttaacaaccgacaattctcaaaattctcacacataaaaaaattagtacatgaagtacatgttaattgagttagttttcacttttcaccattcgctattgtttccacacaaaaaatagtattgtttgattgtttatattgttcacgttatcgtggtaattaattgcatgcatgcatgcgttaatggttacgtgaaggcatatgccgcaaggagcagaggcggtgcacgccgcaaaccctaaattcctagtcatcctctcaggcattgacttcgatacaaacctctctttcctccgtgaccgttccgtgaacgtcagcttcacggacaaacttgtcttcgagctccattggtacagtttctccgacggccgagattcgtggagaaaacacaactctaatgatttctgcgtcaaaattatcgaaaaggttacacacaacggaggattcttgcttggaagaggctttcctttgatcttgagtgagtttgggacggaccagagaggcggtgacatgagcggaaaccggtatatgaattgtttggtggcttgggcggccgagaatgatttggattgggcggtttgggccttaaccggagattattatttgagaaccggtaaaacggatttagatgagtcttatggccttttgcaagccaattggaagacatcagaaactctacttacttgcaaaaactctccggaatccaacatgcctttaaaggtcagatcagttttttttcttcttaatcacttaaaagaaaaaaaaactcaaactttaagactcgtaattgattatatatccaggacctggattgcgacccaacaagaaccttctcttccatccatcaacaggactctgcgtcactaataatccatcagacaatataccaacacttcgattaggaccatgccctaaatccgacccatggacctttaatcccagtgaaggcattctttggatcaacaaaatgtgcgtcgaagctccaaatgttgttggacaaaaggtgaagctcggagttggtaccaagtgttctaagttgggacaaatctcagctacaaagatgcatttgtcgttcaagacaagtaatggtttgttgctatgtcttgacgtagacgaacgtgacaacagcgtcgtagctaaccgttgcaagtttttgaccatggatgcttcttgtgatccagcgagccaatggttcaaagttctttgaattctatgtctttattatggagaacatgtatttgacatttgtaatcaagactaccactgagcatattcaagaaatcattttttttaaaaggctaaaagactttaacagtaatgggctgagaatataaagagattgaggcccatgttggtcttcacttgattatcttatatttcgccacgtgtcagtcaacttagccactgagaatttgctgattatctgagtcatgagccagttgactagttggaaattaaaccactgcgaaaaatatgataagccttaggtttcaaccaagcaccaccgccggtgttttatcggcgtcagtgagccgcgccggttttatcaagcggtgcggttcgactaaaccgggaagggttggccggtttgttacaatggcgacggcggcgagtcctcttgaaatctgcgttaaagcttctatcaccactcccaacaagctcggagactgttagttttctctccgtaaactttgaaatgttgatgattagctgcaatttgatccctctttcactcaatttcgaattggagatagataatttgtgttagctccattggtgcagatagatacttagacttaagaatttgaggatttcgtgtcaaacttaattggtgtttagattgtttcttaatttcgaaaactgaaactattcaaaacatacttttaaggtttaataagctaacacgattgcttctatgtttgtggcgagtactggttttgaagtatattttttctcagtgagttgattatatgcataattttgttgataggccctttttgccaaaaggtgttactgacaatgcaggagaagaatgttccttatgacatgaaaatggtggatttgagtaacaaaccagaatggtgaattcttggattctttccataacgtgcctgaagtagacatgattcttgattaatggcagtgatttccttagttttttcaatgggttgtgttcttgtttattgtttattaggttcttgaagattagtccagaaggtaaagtcccagttgtgaagtttgatgagaaatgggttccggattcagatgttataacacaggctttagaagagaagtatcatgagcctcctcttgctaccccacctgaaaaggcttcagtgtaagcattccttcttctttttttcggtcttatgatgcacttgtttttgtgcaattgaccttctagtgttct

SEQ ID NO: 17986 - DNA, 1721 bp, Arabidopsis thaliana landsberg
aagagctagcagggacacagaaaggttcagactttgagaggaaaatgtagagatccccaatgtcttgactgtatacagcgtttcctttttcatcaagtttgaacaccatcacagtttttgtttgcattttcaccataccattgatagtcttgcgtgcgggtgcagttttcctgtaccacttaaccaagaatgtttcaccagctggggactccactaagtgttcggtgatgcagcaaaaatccaaaagctcccgtttggtcttgggaagctcggggagttttcggaatcgcaatctctgcaatacgggatcgtgcttgtgtctgcggagatcccatgatccgatgatgtggcctccagatccaggaatacgaaacatgtcgtatttctgggaaaacatgacacgggaggagaagaagcaggggttttcgattctgatgttggtccactcggagtttctttgagctggtctacataagctcagctgaggtcctaagaacttgacagcgacaacacagtcttcatgctcaggagaagaggaggacatggcgacgttggtgacaacttgggtttggcaatgaggcagagtcacaagagggggcaggggaatgtgtttgggatctgaatcagatgcaactgggttgagatcgtcttggagacgcattattccatcttccttcaaagtagctatccagccatgagatgcccctatcattaccatttccttcatcaactcgagtggcactgtcttatccaaagtggtgagatcctcagtagcagtcaaaatgatgagtttgccgagatccgctccacaaggtctagcgtggaggatggaaaaaggaggagtttgcaccgaggaagtagttgagaagccactactagtgagactcagaagaagagatgatctcacggtcgcaggtttcacaaggcggctgagacgcagagacaacatgaattaatacgaaatacgatttctgttcttaatgggaagcaagaaattattattaattgagtatttggttatcttctccatctaaaaaccctacataaatacagaggtatcaccgtgctcaccaagtctttggatatttccttttgtggggtctcttctgttctccactaaataaatcattaatttccaacttccaaatttaaggctcaaatatttttcttgttcaaaatggtaactatgtattgtctcaaatcaatgcgtgtgcccgttttgcctatccgtgtcccaaaacccggcccgtaaaggtagacacgatgcgaaggcccaggcccaataaatgtgttgacgattctaaacgtcggctcctgcctgacttgtctttttagtaccctctgaaaactttggagaaatataacagattaatgtggtcaacacattagaaaacgagaagtgggcttttatgaacttgataacattcagtaaaactgggcgaccagaaaatatttccattagaaaaatggtttaaggggtaaaggtttctgttgaataccaccaaattgctgaagaatcgtctgtaccaagattccaagacagtgatttcaataatcatgaaatcttcattaaacgtaaatgtgatacatgattaagcttaaatacataacaaggtaaaccaaagatactaaccaatctaaaccataactaaaccaactatatacactctaataataccaaacatcttggacttcaaaaccttaagtgcaatccacataaa

SEQ ID NO: 17987 - DNA, 667 bp, Arabidopsis thaliana landsberg
  unsure (1)..(667): unsure at all n locations
tggatgacttgtggtctccatcagctcaatcgtaaagcttccatttttctcaatctctccctttaattcactaaattgaggaaaatacactggcaaactaaacaaatcgatcttttcctcgcttgttattccctaaaaaaggaaagataactattgattactaaaaacaatcatactttttaaatatactaaaaagataattatcttaccgatttagccatatccataagacaatcaccgatggtgtccaacacattaccctgccatgtctcatacaaggacacaccatcatgcaaacattctcctattacaatcattagtcctccggggacaagttcctccgctctagcaacaagaaaaacctccatgtcttctatgaactggaccttgtaagccttggtaacttcttccaacaaattattacattgaatgtaatttttgttccaagccatagatttcttgtcacatacgtgttcaggaactttcgagagccagtgagtcgtgtatgaagtgtgtccgatgtggatgctgtttcttggtaacacccgaccatagaaagagcctggaactccgactgagaaatattcgcgttctggagaaagaggttgngttctaaagagtgtgttgaagtcattggtgggttgatcattgaagaaaactttgaact

SEQ ID NO: 17988 - DNA, 1269 bp, Arabidopsis thaliana landsberg
ctggtatgtgtttgcataaacacttccccatatgatacaggacgcttcaaacgttcctcctgacaaagaaaatcaaacagacaaagacaagcttatgtgaaggtaataaaagaaagctgttaagtgaactgtttggatggaaagacaactcttaccatttcttgatgaacttgcacaaaagatttctgaccggctaactgtttgtgcactccaagacctccacgatctgtgtttctacagtttgaagctgtatcacttttcagttgagcatcttcagtgttccaatgcacccacatctgtttccaaagtgttccatgaatccacggtggttgttcaccactctactttgcttgactgacaatccctttcatccctttcttggctataaccaagaaaccttctttaacaagctcaataatgccttgatcccaataatactttctctacataacaagcagctaagttagcaaagatagtaagagtaagtcaaagtaaacaataacataatgaaaggtatttatgacattacagtaaaatttctgaagtatctctcttataggctattggagtaatcttccaactgaagtaaggcccatcgaacttcctcctaaatatgtgtctccggtggatcttgagcaggcagttcttgaagatgaggaatctgatattgacgagcagaaggctattgttgctttcgacgaataagaggcggttgttgagagctagattgcttttgagaacaagcaagagttggggtttgtgtcgtttgaggtggtgatttttggggtcgtgtcgcccgtggatattgggaaggacggcttctatttgaatgtgtaaaggagagcgtcgcagaattagggtttgaggattgagaagagcttccgacttcactcccacgaccgagaggatttttaccatggaaaacttttgccttcggcgtcgattccctacctcgacctcgacctcttgatgatttgcctttaccaccaccaaccatagatcaaattcgagtttcaagtaaagaattccaaaccctagatctagatcctacaaaccctagatctagaatgtgactagagaaagaaagggtttagagaagagaattcaagaggattgaaaggaatttggagaggattcgagagagaatgagaattgaaaaccctatattgagaaaagaaaacgataaaatgagagaagataataagtttatttccacttaaaagaaataaagagtcgctctttcgtccctatttggtcgccaactaatta

SEQ ID NO: 17989 - DNA, 2246 bp, Arabidopsis thaliana landsberg
agagatcaaactaagtaacaagacttcttgacacaaccataaggttctaaagagaaaaaagaaaataaaatccacattacaacagatagttcaattcccatctcaactagggaaaatagatttttttgtaacaaactcaccaccacgaaccagataagacaagacacacttagaagcatttcctgtgaacaatcgatggacctgactcatcgtactcactctttgaaatccacatctgattcacacacacaaacaaaacaaaatttcagtattttcactcatgtttcataaatggagctgaaagttttaaagaggcggaattgggatttttacctgttggaaggtgctgagggatgcaaggattgatcctccgatccagacactgtattttctctctggcggtgcaaccaccttgatcttcatgctgctaggtgcaagagcggtgatctctttgctcatacggtcagcaattcctgggaacatggtggaaccaccactgagaacgatgtttccatagagatccttcctgatatcgacatcacatttcatgatggagttgtaagttgtttcatggattccaggagcttccattccgatgagcgatggctggaacagaacctcaggacaacggaatctctcagctccgatggttatgacttgtccatcaggtagctcgtagttcttctccactgaagaactgctcttggctgtctctagctcttgctcgtagtcaagagcgacataagcaagtttctcctttatgtcacggacaatttcccgttctgcggtagtggtgaacatgtaacctctctcagtgagaatcttcatgaggtaatcagtaaggtcacgtccagcaaggtcaagacggaggatggcatgaggaagagagaaaccctcgtagattggcacagtgtgagacacaccatcccagaatccagccaatacctgttcaatggaagataatcagagctcagttcaaataatgatcaatgagtataaacaaaaagcctaaaatgtactaaccggttgtacgaccactggcgtacaaggagagaacagcttggatggcgacatacatagcgggagagttaaaggtctcaaacatgatttgagtcatcttctctctgttggcctttgggttaagaggagcctcggtaagaagaacagggtgctcttcaggagcaatacgaagctcattgtagaaagtgtgatgccaaatcttctccatatcatcccaattgttaacaataccatgctcaattggatacttgagagtcaagataccacgtttcgactgtgcctcgtctccaacgtaagcatccttttgtcccattccaaccatcactcccgtgtgacgtggacggccaacgatacttgggaatacagctcttggagcatcatcacctgcaaaaccagcctacacgcacatagttgaattgcttaacttatggcacataataacattcacaaatcttgtttctataaatcatttagagaagctttttgattaccttgaccattccagtcccgttatcgcaaacgagcggctgaatatcttcaccgtccgccatttttcaatctatagctgattacatcaacataagaaacatagcaaattcaaaggaaacaccaatggttaatgccaatctcataactaaatctaaaacaagaaaatgtaacctttaaatataattcgttacgtataccataatcaaacgcattagcgttacatttaatttggttttgcatccttgtgttcaaaattttgacatcaaataagcaaaaaaaataacatgtacctgatgaatttacgtagaactagaagaagagaaagaggttgtggaatcgtgccctgaaattgggtttcaaaaatttctggaaaacagaagcaactttggcccttaatatcgttcatacacgggtctgagccgttagttttcttcattgagaccaatatctcagcctctaccgacacgtgtccatctatttttggattggtgaattaagaaaacaccagcctgacctgaaaatacggtttaggctctgttttaccggaagaatcgggtcaccgaacaagcatgagtgataatgagtcccatttgggccttggaaaaaggttaaaaggccattttctttagatttattcaattttagacaatcagtgaaatttcagtaacatttctttctagtactttatgtgttccaaccgaaatttcagtgctatgcataagggtgcgatccaaact

SEQ ID NO: 17990 - DNA, 477 bp, Arabidopsis thaliana landsberg
aatttagtattattagccataataaatgtttttcttaaaaaacattaatgcatacaaaatttaattgaccaacaacacatgtaaaaacaaatttgttaattttctttttaattaagggaacaaaatggatatataacttagtatatgcagattttttttttttttttgcttttttatctctttaagaagaaaaaaaagttaaacattttctcaacatgtaaacatctgatcgacagacttgacatatgacacaatcttatgaattaaccatattttatataataaaatagaaactattttctttgttacaaacttttaatttatatatttccccacctttgaatctgatccaaacttgtaaaattttctcctcaaattttgttgctctactgctacaacaatggagcagaaacaacatattcttaaacaaagtacattctcttcctctcctagttcttattcttcaatctcagaccg

SEQ ID NO: 17991 - DNA, 1339 bp, Arabidopsis thaliana landsberg
ttgatattagttttccctttcctcactttaagattcgtaacacttgcgttttccatctggagagtatgtgagcgtcatgtatgactttagagtcgtggcctcaaaacttttatcaactttaccgatttttccactttgaataaagcttgagtctgatgaaaaccgtagtccagtaaacggctcgatatatggtgacacttcattcgggggtaaaccgcaatccaaactgatgaaccatattaagaagatatgcaagagatcaaatcatggtcactaaacaaacaggaaaataaagcgttggttagtggaacaatggtgtctttaagtacaagtaaagttaacacccaatttctttatggggtcatttttccatatattttcatgtttttttttgtttttttctttcttctgtatctctatatatataatttcttttgatttatctttagacattgagtatacttttaagtttagatatacaaatatattgtaaaaataacatatttcatactactttgattctcacccatataaatttatattcaaaaagggttacaattatggagtttgtagaaataaatgacattattcttaatttcttaattttgaaaagaaatctaatagcaatacatatttataaaacagaatcagaatcagaatatatttttaaagaatttttttcttttttttttgtgagtgataggaggcaattgccccctatgttttattcaaataaatgtaaaaaattacaatcggatcatcttgggtatcgcatacccattagtatcctccaacaaaaccggtttaacaatatccgggcaaagagtaaacgaatgaaaaccaaacggtaaagaaaaagtatagttcgctaacccgtcagcgagacggttagctttcctatacacatgcgaaaaacggactatccagtcccttgaaataaagtcgtagcacaaacgtactaggaaagatagagggtggtcatcaccaatgctaatgatctgctgtccaattgaccactaagtgatttaaaaaactatacagaatactttctagagatagttcatcaaaataatcatacatgagaataaaaaaattataagttatccataaattattatcataaataatcatttcactaccgtcaaatttgtaaaattgaggcccacacaacaatgagttcaactgtatctttttaaaaaattaaaagtaatgtatgtggccgtgaaaacgtttataatatacgtataaggattatattggaattttttctgagttcatatgattaatcttcattattcagagttaaaaagtaaaatttcaatacttgacgatttagata

SEQ ID NO: 17992 - DNA, 1819 bp, Arabidopsis thaliana landsberg
  unsure (1)..(1819): unsure at all n locations
gaggcaggtgaaaagattgtgataaacactgaggatgactcttttgttaagaggtattattaagtcaactcttggggtcattactctgttcattgttgttgatatgggctttgctcacgttagtcctcttcttgctttcgctcattacagggacaacaaatgaaactattgcgtagtcgtttaatacttctcctatggaggatacatcggatatgttgagaaacgtttgatagaaagattaggggtttagtgtttatgaagctattgctattattattccagttctcataatctcggagcttctgagacttgtgtcgattgtcacaagttctatatgaagaagacttccgttgtgtacaaagatttcagaatcataaaggttaatttttatgatttattaatttttcggcccaacacctattaatgccttcaacactaccgccgtgtccttcaaccgtatcaacggacagtgttgtgttggtcgtacttttcagatttatgtccagagctcacccaactttgctgagcttcttgaggcatgaaagcttcaacatggaaagcaaggactttcctatatattctcgcttatccagacgattttgagtcatccagagggaaaaaggtagatcaactgatattagaagacgatgctcaaatttacattagaaactccatccttgagtcagtgatgagtttttcctcatctcctcttgctgatgatgaaagtaaaggtctaatccttcaggtgctactttcttaccttaatgtcacttggtgtttatcttgcatctatatgcagttgcctcttcagtatcaataatataagcttgattctgagagtatatttgctccatctgttcagacgaaaaccagattctgaatagccaatttgacgtaaaccgcgctttagttggtctatccgaatagtccagcccggtttaattaagtttgcaggttcgggtcgatcaaaatgtctattaccccggtggttaagagacatattcaacgaattaacaaggaaataaataatcaaaagaacccttaaaattcatcatcatatgttcattttcccaaaagacgaaaacagaagagaaactctaacgacaaagctccgtttctccgccgatcatctgacttttaccaccgtggtatgattctccatcccttcttatttatttaatcttcctcaaattcgccgttgatttgttcaactttagcttaaatgttcaacgaatcggatcgcattaataaacacagtaacctaatggcataatgggcctaatattttttcggcccaactttaaaattacctgaacaattaaaaaaaaaaaagaagataaaataaaaaaataaaaaaagggaaacaaattaaagagagagacagaaaattggaaatggcaataataagcctaaccctctttccggtcacagcaacaccaccggcgtcttgtctcttctccttgaatcgtttttctcgttcccatcatcactttgattatttctcttcttcttctccaactggtaaaatcctctctccgagctcttcttatctccatttttctctctacttgtggtttatctctgctcgactacattcttcccatgtgatgagattagattcttattcttggctaagctcattttttttctaactgttggaactttgcgaaatgatattgtgtttgcgtggatttcgttttagattctatagaaatgctgcagagggtaagcgctcattttngtttatatttcacacggtttgtgtgcactgaataatgatntgatgtactccaataaagagagcatctactgctacaat

SEQ ID NO: 17993 - DNA, 1470 bp, Arabidopsis thaliana landsberg
  unsure (1)..(1470): unsure at all n locations
agtaaaccctgatggttgatgaaataagcatagaaaatctgtttatttttctatcttttctttcttaaagaagtgtgaaaaattggcacaaataaatgatgcgtggttcatagaaacaaacaagtaatgatatggttatgttctcaatggtgcagcagccgcccggcgatcaaaacctagctgaagcacaacattcgagggtaagcctttcttacattttattttattttattttattataattgttgtaaaaatgttcattcttattatctttagtaatcaagtactattaatattataagcaaattaactaacatgagttaatttgtagatggggtggtggaatgcgttgagagcaatggaagttgcacttgctgttggacatctcgctgctttttgcaccattatgtgaatgctcactttctagttcacatcacatttacacattttatcttgatactcaattcttatataaacattaaaacttgcttgatttttttattttatttatgaaaacatatatttatgtgtaagaaacaaacaaagcctttgcgttgcaaaagagaggttcggcaattcttcataaatgcatggttcgatagttagttaattttcgtgtatgattaagttcatccggattatgttaattctatgttatttggtaatctttgtcaaaaaataaagaaataaaaatgattaaatgtgtaacctctttaaagttaacaatcaataaatcatatgaacttggcatgttcaaaatccggtaaatacgaaagtcaaaaaggtcttataagctcatattgtaatataaatttataatagatatatataaataatataagccgcagtagaagcaacaatccgtcgtagtctagctggttaggatactcggctctcacccgagagacccgggttcgagtcccggcgacggagtttattttttctttttttctgaaacgatctcaaagctaaaaaactatttctctgctgtttattcataatttctttccattgtcacgtttactatatgattcaattagggttttgacgaagcaacgagcttcattacatagacaatttgaggcatagctaggaggaagaagatgtgagcggagtggcacatgatcaggattatggtagatgaatgatcaataaagttagtgaggattgattaaaaactgaattgggcaacaaaaatatttcataagttttgtttatcctatagtgtttcctctaggggtagttaggtgaggagatgaaaaattttgtcatagagtaagattatttttgttgtcatgtgttgattgactacattgaatccagatgtttatatacatatattggtgttcaatttgcaggtacatttttagaaaagcctaaattgcttaaatgtgtttttttttatgtggaattttttgtatcnttttgtcttgtttaatggttagggtttgttgatatacaaggggaaag

SEQ ID NO: 17994 - DNA, 664 bp, Arabidopsis thaliana landsberg
ttgcccttggggtgcgcaaagaccttgacccgcagagccttttcggcgtcatactttttcaacgccaccaccacgcccttgccggcggccaggccatcggccttgatgacgatcggtgcgccgtgcttgcgcacatgggccagcgcgggttccagctcggtgaacacggcgtagtgcgccgtcgggatgttgtggcggagcaggaaatccttggcgaaggccttggaaccttccagctgtgcggcaatcgcgcgcggcccgaaaatgcgcaggccggcgccacggaacttgtccaccacgccggccaccagcggcacttcggggccgaccacggtcaggccgatcttctcgtcctgcgccagcttcagcaggccgtcgagatcggtcacggccacatcggcgttgcgcacgccacgctcgcgcgcggtgccggcattgcctggcgccacgatcacctcgtcgacgcgtcgcgactgcttgagtttccacgccagcgcgtgttcgcgaccgccgttgccgatgaccaggactttcatgaggtggactccgaagggttgccgcgtggatggctggctattgtaacggcagaacgaccgcctttcttgtcgatcgcgcggaatgcagcaagacggcgactcgacattcgagtgcgagtacctatccc

SEQ ID NO: 17995 - DNA, 1343 bp, Arabidopsis thaliana landsberg
gttatgtaaatctccgcagtgactatgatggtatttcttgggaccatttggattcaagaatgaacaaggagtgtaaccggcctatcgaccgctttcaaaccgaaacgttacctccaaggtcggctaaaccaatccctgtcacccacaataggctcttgtctcctatccggagtcctgggtttgttcagtccaggaaccctgcttctgtaatggaagcagcttcgagaatgattgaaccaagtcctcgggtagttgctaaaacacggttttcatcatctgattcctcttcatcacttccaatgaaaatcagagatttgaaagagaaactagaagcttcacagaaaggacaaagccctcaaatctcaaatggcacttgcaataataagtgcttcagaggaaagcaagatgaaaagagaactacattaccactcaagacacaagagcgaaataatttattgggagaaagcaggtttggtggttcgaagggtaaagtgaagccgccctttgtatccgcacatgcaaaggccggtacaacgcccttaagtgtcaccagaaactctgcaaaccaaaaggagaaggcagacgctaaaaagtgcgtagtcaaaagccagaatgctctcagaggagctcccattagcatgggaaagaatatgtttaagcagaataaccagaaacagaactgcagagacaaccaaccttcgatgacctctgttttgaaccaaaaaagcagcaaagtaaataacaaagttgtaaacaaggttccagtggaaagtggatcgatatcaaagcagttgggtttatcaacggcctcggcggaaaagaatacttctttatctttgtcacgcaaaaagactcttccccggagcaaaaagctcccaaatgggatgcaaaaatctggaatctctgatgataaacggaccaaaaggagcgaaaatatgatcaaatgtaacatcaccattgatggtggcttgaacaaaggtaaagatgatcggaaaaaggaaatggatgtgatttcattcacattctcatctcccatcaaaggtttatcttctgattcattatcctctactcaaggaattggtcaagacacagactctgcagttagtttcaatattggcggcgattccttaaatgctctgttggagcaaaagctcagagagctgacttctaagcttgagtcttctagctgtagcctgacccaagaagagccttcatattccattccaatggatgagatgaacgggatgatttcattttcatcagaatatgaaaagtcaacccaaaacggtctgcgtaaagttttatcagagagtgaatctgtttctgactgcacctcattctat

SEQ ID NO: 17996 - DNA, 732 bp, Arabidopsis thaliana landsberg
atttccttcaacagaaggtatttctgagagtgcccatatttgccgtgcagggtggcaaaggaaaagtgtatgattaattgttttttctacctcaccacatctgaaacaccctgtgtcatagttaattcctcttttctgcaacttgtttgtcaccggtacacaacccgctaaaatttgccacaagaattaacgtaatttgggaggacaatgtactttccgagttttcgcttttaaacttttagtatctggaccaataaacttttagtatctgcttgtctttgtttgcttggaatataattgattatgagcaatggatacttagagtaatgatgattgtctttggtgattgtatttgtctttttgtttcaatgtactcatacaaatgctaaagggaatcctgctagctttggatcgcttgtggagacactgaacaaaagaagaaggaaggagagttatgcgagctcttctaaatcaaccgttgcgcagcttcaagagcagttatagctcaagatatcttaacaagaggagcataatgcaaaacgtgattaggagcactacgaatctcaatctcggatagccagtttggagaagctcgtcctcttcatgaaagaaaaagatcttgagttggctgcttatttgtcttctcattctacaaaacctgaaccaggcacacttccaaccaccacaaccacccaaccagccattacagttgcatgcaccccataagacaac

SEQ ID NO: 17997 - DNA, 486 bp, Arabidopsis thaliana landsberg
tgagttttcacagaatgaatgagtccctagtcggggacggtccgacttctgagggcggacggtccggacttttacaagacagttcagcttttaagatcggacatccaccgcagtataaaactaatgtcgcggacgatccgacccctgaggccggagggtctgctgtcacacaaagatcatctaattcctttgcgggagacataatagaggaattcagagatctcgacaaattaggacaggggtttacatcggccgatcctttggaggagattgatatagtagatggtaaaactccaaggccgtcttttgtgaataagaccctagagaccgatcctagggatgaaatgatcggtctattgaaaaaatattctgattgctttgcttagaattacactgagatgccgggattaagccgtgagatagtagagcaccggctgcccattaagtctggtttcagacctttcagcagaaatcaagaacatttca

SEQ ID NO: 17998 - DNA, 1256 bp, Arabidopsis thaliana landsberg
aagtcatttccgattcttaagaatatgttatttggagtgatcatatttattttttttgtttccaatgcatacttgattcatatgttgaagatgcataaaaagctaaaatctatgtttgtttgtttttcagaatttgaaaattgaaacttttttttcttcataagagtataggacgtactcaaatgattattagttagtgattaagatccacaatgacgcttagtaagtctgataagatccttgaatattttgaggaagaaactcaaaaatctttgatatctcttctttaagtttcttcttccattgaccttcttcctcgttgtttcatcttgttaagactttattcagtacggaaataagctcttgaactaaaaaaatggataataaattattgactttatggacttttaagccaacctataatttattgacttctatttgataattatatacatgtgttagattatcgttttaagttgttatattgtaaaatttacatttactttacttggcaaccgaattatggtgtattttcttcaatatctgattatgtgcatcgaaataactttgaacttctttattaaatttcacaagtctatatagtaaataattagtaattaaattcaatgatggaagaaatagtaaataatttgaatattgattgtataaagtatttagagttcttttgattaatatcaatatatcaatattcatatatgttaatctcacaaattaatcaagattttgtcaatctcacaacttcgaatgtattgaatattctacaattttacactcatactataatcaatatgtactctctttgttcctagttatttgatgttttgaattttttacttgttctatcaagattgatgtttggaaaactatcattattattttagtttgtgacgaatagtgaaaggagaaaagtaaaactaatattagtattaaactaataaaaaattattaaaataataagtcatttttttcttaattcctatacaatttcaaatttgaaatctttaagtcaaagaaatattacatatcattttcataatttaaataaaacacataaacactcacacaaggattttcagatggtttttagaagtgttgcaagtttttaagattgttacatgtttttattgctgtgagtgttacagattactatctgctagatttggcttcttttgctcctattctgacattggtacagatttatgttggtttctactctgacattgacacggatttat

SEQ ID NO: 17999 - DNA, 2692 bp, Arabidopsis thaliana landsberg
gttcaggtccacaaaaactttatctcttgaaagactagatgtatagcttgaatgatatatataaaagtaaggttttattttctccttattaagttatttgatatactttttacatatattattaaagaatctataatatattaatctctaattaactcactttaaaactcacacataaactcatttgtaacttttccaataaaatatatttttaaattatattaactttggtccaaaaataaataaatatattgactataatttagggtgaatttgtaaagtagtaacttttccaaacataatttgaaaaatagtcataatactatttataatttgcaaaataatcatttttcgctaattaacttcgtacattgagattcctacaacacattcaatgtatagatgtacagaaatataactagattacattacttattgtgccttatcgataaaactacaactagtagtaaatagggacttgttttattatttttcaaatcttgtggaacggctctaatcaatatttggacttatttattgaactttaaaagatttttcatcataaaattttagaatatgattgcctatttttgaatattttggcttatttgacaaaataaatgtaaagaaaatgaaaatttgggcatatagtaaaaataaaagaacttttgataagtattttagaaaaaatacaaaaaaattatggattggatagccatattaatttgggccgtgcttgttatgttaaaaccacttccaaacgattcaaaaaatcgaagaaaaatatatcttgctgaagttactttgatcaatcagatccgaacatgtcaggttcatgaacgttacattcctcaaacagaattccaaaaccaacaattcgcatatgaaatttcaacttagtattttactgaataatatacttcatacatcatcagagaagcttacatgatttgcatgatatatttattcaaaaggtttggtccaaaccgtttggagtttggtctgatcactgaactcgaactggaacgagcttgagaggtactttcttgactattgtaagagtaccagcttcttcagtatcgatatctttatgtgtcatcccatcaggcaacttccaatcgaagaagtaaagtaagttcaagagtcccaattcgacggcagcaatccccattggcatcccgggacatatccttcgaccggacccaaatggtaagagctcgtaatgttgtcccctataatcaacagagctatccataaacctctcagggtcaaactcttccgggtttgtccagagtttgggatctcttcctattgccgaaacattgaccaagatccgcctcttgggaggaatatcatacccttgaactttgatgtgagccattgtttctcttggaagtataagaggagctgctgggtgtaacctgaatgtttctttgattaccatcttcaagtaaggaactttctcgatatcttcctcggtgattctctccttattgctgccaagttgttctcggatatcgccttgaactttctttataagtttcgggtttttaacgagctccgtcactgcccatatcatggtgagggcccctgtgtctatccctgcaagaaatatattctaacaacccacaagaaaagtaagttaaagatttcaatccaattacaattttaatgtgtttaaataactcttgattaccgcgagaaaccccttaatatgatctattgtgagctctaaggaactatcttttccttctttatgaatcacatccaacattgaatcgatgatgtcttcgtgctcttttgatcttcctggatttaaatgatcatctatgacatgttgaaacagagcatcgagcttgtaaaaaacatcgttgagtctcttgtgttggccggaaaaccaatcaacaagccatccaagtccggcaacagggaagaaatcagaacaagtgaaacttgctagggcagtctcagcttcgaacacgagctcttcgatcttttctttatcgataaaattgctctcgtgaaaattctgtcctaaggcaactctgaaaaagatactagcggtcagccagaaaagtgatttgctcaaatcgaccggagagcgatcaaccgcggattccgacagttgcttgaccagaaagttacattcttcctctcggatatgcctaaaggactgaacctttttcaaacagaaaagctcacgcagggcaaacttacgccgcgccttccactcgttaccgtatggcgtaaaaccgatatctttaaaatcccgcgagagtaaccttgtcccgacaagcttaggcctgctgcaacagtctaggtcatgagttctaagcacttcttcagcggcttctctcgatgagaccacagttatagggacaaatccaaagtgaagaagcatcacaggtccgtatctttcggcgagatgtgtaagtgacctgtgaggcaattctccaatctgatgtaagttcccgatgaccggaaacttgggagggcttggaggaagattccattttgatcgtttgattttcttggcaaaaaagattaacgaaacgaaggtgatgagaaaaaaacagaggaaagagatcgccattttttatttggttatcgataaagtgaaatgatattgctctgttttttttccattaataattcaacacggcaactcgagatctagaattatccatacaag

SEQ ID NO: 18000 - DNA, 190 bp, Arabidopsis thaliana landsberg
  unsure (1)..(190): unsure at all n locations
ggtggactccaatacatagtgttcccagggagatatctctacactcanagctgaaagatgcaaatgttgatgaccattatatgcacatttgctttcaatgactatgtgatgtgttcttctttgtaaaaaattctgtcaaactttgtggcttgtgtagaagtagcatatcctcacgcctatgataacggtt

SEQ ID NO: 18001 - DNA, 656 bp, Arabidopsis thaliana landsberg
taacaaccattaaaacatctttaccaaaaaaaaaaccccattaaaacatgacacatgataaaatctttgtttgataactattgttgataatattaattatgttataaacatataatcatcagtgattatccatctagtttttgattttatttatataagacttagccattaagagtcttcctctccaagctcaaaacttcttcaccaagtcttttgttcgtatatatatggttgttcgttgttagtcatatgatataagaagaagaacaataattctctcgctctctacatcattctctcgtccaattttctttgttattaaaataatattatttatttttgcgttatattttcgacacgtcatcagcgcgatcgtctctccgggtgattgtctaatcgatcgattatatatttattcaagcattttttgaggtaacatttaaattatattaaatttatttttattcattcatataaaattatatatgttattttcagagtatgagattatgtctcctccttaattgaataattgctatacctatttgaaatacaataaatggcttaataattgaatgattattatttatataaacaatcatgtcaaatctggctaagttcgatgtcgttgccctagatgtatctggcaagaatta

SEQ ID NO: 18002 - DNA, 1326 bp, Arabidopsis thaliana landsberg
  unsure (1)..(1326): unsure at all n locations
taaaactcccatttagttacagtgttttaatgagtaagagcttatactctacttgagccatanacttcatctgtaaaatcttctcgaattatataatatttaattactgtgaaggaagattcagattcatccaaaatcaagacaatagattagagaggtgaattgatacattttgttgcaacacaagatggatccatgagcataaatcaaatatttagaaagaaagcggcgatacatgatgcagacctcatgagtaacccactaactacctaatttcttattcataaaaacatacaaagtacttgtcgatgtatatataattccttacgtcaattgtttgtcttggtatataagttacaaaataatatttcatcttattttaaaattcttctatttgtactcgaggtcatgaatatactatatgcattgcatattttaaaatttcgtattaccccacatacaatgttttaatttctaatccatgcacacatgcatgcatatatatatatatataacagattaaaatgggaaatggaaatccaaaaagaagtgattttattataaagtttacccacacgttacaaaataggtatcctatagtcatagtctatccttccaaaacttagatagacaacatacatgtatatgtgtttttgtttgtcatctttgattactttcattacattattattaccatgctacgttcttaacgtaaatatccccttatcttgaaatcaaagccatagtgctccaaccctctttagcataggaaccagagagcgattgagatggagactcatgacttgattggctccaccaacaagctgccctccaataaacaccacaggcacggttgggctgcagccaagctgagccaatgcttgctctatctcctttcctctgttgatctcatctagctcatagatcgttggattcacgccaaagtctatgaagagagtcttgatagtgtgagacatgcaacatgagtttttgctaaagatcactaccgacttctcggagatcatcttttgtagattttccattggtaatataatgtgatagttatttgaaaaccgtcttgcaaaggagaaaaataggtgtgtttggtcaaaatgctagattagagatgaaaatgggaaaactagataacttatagagagattactgatatatttgggtgaagatgagaagtgactctgtgtttgatgaagtgaagtgggtaaggtcctttatatatagctctctaaagtacgtaacctttcttattacgtagcctttttatcgaaaatcaactttagcacaatatgaaatatctcaaattgtaag

SEQ ID NO: 18003 - DNA, 2641 bp, Arabidopsis thaliana landsberg
  unsure (1)..(2641): unsure at all n locations
aggcatgttcgagcttatagcggtgatcgtgagcagcaaacttttatatgaccagatacctatgtctatacgtggatgagaaagataatgagtttcacagaaggttgaaaccaggtattgctgttagaagaataaattatgtacctgcanagatagatgatgcatatcatcttcggatcctgattaacaacaaaaaggaccagtcagttttactgatatcaaaaccgtcgagggtgttgttcatgcaacatacagagatgcatgttatgctgtaggtttgctgaatgatgactaagaatatatccactgtattgaggaggctaatttttggtgttcttctaactatgtttgaaagttgtttgttataatgcttatttccgaaagcttgagttccccagccattatatgggaacacacttgaaagatcctgtctgacgagttttaaaggaaagtaagaaatcagttaaagcgaacaagttagttaagttaatcttttaaatttcatataccattttatagattttttataaatattatagtttcttcaatcttatactaatttatatgcatactacttattgcctgacgaaggcagaattcgattatgtttacaagagctgcaaaaatattgaaaaggcatggaacagatctttggagctatcagatgttgcctcaacttgaacctagtgatgaacctgctgatataacccgattttcaccgattttatctatgttttaggtataggattttgagtctttatgttatttctcgagtctttttaatgtctttttaggtattctatgcagtgaaacaacaatggagataaggagacattttggagcaaaagctaaggaaaaggaagctaaggatgattttcagttccagattaagaggagtgtcgatcgacacactcctagtgtcgattgacaccagtttcggcccagcgaagtccaagacgctttcaagtttatagaagaggaaatttgcctcagaagacttccctatttgcattattagtccctggacgttttatagggttttatatacattgtttagacctaagtttctattatcaagctttttgcaaaaccctattttgagagatataagctattcatccactgttcttcggagattcattcagttcttaatacagtgaagagatcctttctttcccttatcttatttgctgtgtttatgctttcatactcaattatgttgtttggttcaatcaatatgtctgagtagtctgcttgttagggatagggtttctcattagggattcatatggtttagtagattgccccctttgctaggttattagtagaattcttcatctttgattatacttaatgctagatctagagtaattaaatagatcttgaatccagacaatagatatgcccaccataggtatctgtagttggatctattatttgatgagcctggtttatctactaaggtgaacagttgaacttgtttagaatgcatgtctaggtataagatctctcgacactttgcggtcggttcgttcgattgcaggcaggcccgtctgccatctctatcgacaaactaggaatatgatctcttaagtttctagtgttttgttctagttaataactacgaaggcagaataaacaaattaatctaggttataggactaaccgataatctttctatactccgtttctcaacttacgcatgcaacaacgcagttcaatgcattaggatcggattcgctaagtactttatgtcttgtcactcaacttatgaagacaacaacacgaaggattggtaacactatgttcgagattaggtttactaggtcagagctctaaacctcttggatcagcgtttggtgatcaatccaaacccatgcattaagtaaaagatctcccaaaataatctaagtgacaaagaaatacggacctaacaacctaatatgatttgaaccataaatcccgtttaaatcaactcataaaacccaataaagagaactacttgctcatgatgcaaagaaacgacatggaggtgaagtagaaaagcatcttaaacgaatcaaataaagaaagagggatcaaaggaaacttctttaggtgtcacataagataacttgtctccccaaaagttgtataagaaagagtagaagaagagaataaagagatcaaagaagaacaagagtagatattttcaagggatgacaaacttcaagaacatggagggcttctacgaattgagtttggaggctgagagtctcgtcggggttgtggctgtgaaggaggcgaagatatgctctaagaggtttctgtaaaatcatgttaggatttcatcatttagtctcggtttttataggcttcaattaggtcaaggggcaaagtcgtctttctgttgattaggtaagtgttgggtcgagcttctggctttgtggtgagtcttagtgaccagttggaagagtgagagacaacactgatgcaagcttcatgatgggtattacaagttatatttcattatactttaaataataggataaatttatacttataaaatattaaaaaaaaaaaaaccacacaaatatatatatgtaactcgcaaatataccttggcttgaccctagactaaataattaacttaatatattaa

SEQ ID NO: 18004 - DNA, 594 bp, Arabidopsis thaliana landsberg
caatgcagttccggagttcgaaatggtgattttttcatggttactattcataatatttatactctttatatctacctgttttctgaatttatcttggttgagaatgtagctagggactggttaaaccctggtatggtgttggaagcttttgaagcaagagctttgagaatggctgttacttgtgctaacaatctaagcaagtttgagaatcaagaacaaggattctcagaactcttggctgatcttgttgaggctgctactgctcattgccagttaattgttgtttctaagtaagtaaataagcttcttcactaaaattttacaaactaatcaacagactcaaatcataacttacgtgaaaattcacaggtttatagccaaagtagagggagatattgaaggaaaaggagtgaagaaacagctcaagaatctatgctacatctacgcactctatctccttcacaaacaccttggtgatttcctcagtacaaactctgttactcctgaacaagcctcacttgcgaaccagcagcttcgatcactctactctcaggttcgaccaaacgcagtggccctagtggacgccttcgacta

SEQ ID NO: 18005 - DNA, 802 bp, Arabidopsis thaliana landsberg
attcctcctgacaatagaggatagatatcaaatcaatatacaatcgttgcgataaaatggtcacgaagatctgaaagaatacactttaacaaggaaatattaattaaggagagtgtaaatcaataagacaaaccagctgtgagaatgatatccggcgattgttgccacatcctccaaagcttttctccatctctcaacatactcttttgttttacctttacatgtttttgtgaaggcttttccaaattcaccggtctgtttctttatatcagttggatccacttcatagaaaatggtcatgacaatctgacccaacacttccctgcatatcatgatctcggtcaactcatcaagacaccatgacgaagaagcatatttccttgagagcaaaacgattgcgatctttgatcctttgatagcttttttgagctcaggaccgatcgacttacccctctctatattattatcaatgaatgtgtcaattccctttcttctgaacgattccatgatgtgactaagaaaggttcttcggacatctgctccgtggaagctcgggaagacatcgtgtttccagtttcgagacacagaagttgcaagggagggaagagataaagaagaagaattactttcttggttatcttgttggaatctgaattttctaaaaaatatgaagaagcctatagcagctgcgtctaagacaaggaaaaaagaagaatccattagaatggtagagagacgatcaagatccaagatggaagaagaattataacaaagaagaaaaagctctgtgtgcccgttgacg

SEQ ID NO: 18006 - DNA, 1919 bp, Arabidopsis thaliana landsberg
aaaagaagtcaatttagctgattggctaagatgaagcaattatgtcaaaacaacaattttttgtcccatttgatccaactttcatttcaagcttctagatgaaattagaaatgtaaagtagagggccatgagttgagggggacttgtattgcggtgaatgaaaaagtcaacattcaaaggtttgactgagtgaaactaagatatgtacggtgtggacataaattctttttttaaaatgtattttatctaaatgataattttctccctttaactgctcaaatatattaaatcaattttttttttgttctttttcttgtttgagggttttcactaatttaaaagagatttatacattatcttatttcaaaccaaaaaagttttgatttgtaaccaaaaataaaacaaaattaagaaaacaaaaccaaacaaaataggaaagttgtcaggagattgtcttttacatcatcatcgaccaaacaaacttttaactcctaagaaaagggtatagctcatacctaagagtacactctgtccccaaaactcttgctccttgtttaccgtggcagcacttggaaagctcattgatactccattccaaacaacccttacatcgcaatatgtcttgcgcacactgcaccattgcatacaatttctttgtccctagcttcttctcccctgctgcgtaaagcatcaatgtcctgttgggtgtagtggcttccagcatgagctcgtagaggaaatccctcgttttcttgttgaacaattccgtttcctcgatcatgttttttgggttgtgcatagagaaaacattcctgtaatcgttcttccttggggatgatctgatggaattaatgaagagaaaacattggtcgtaccatattactcttcctttattcctctgacatctcctacgaagctgccatatacataaatttgttgtttcattttttgagtaacgatttaactaatcaatgcaaagatatatcttgatttgcaaaagatatacatgtttatatatgttaaaacagatttgatgatttatgttttaatattttaaataataccgagtaaaatcccaatagaaaacattttccgtgtttcttttgatatgcgacggctaattaataatgctgaagtgacattaccccggaaagggcggtggcatagcaggagaggcacttggcgtcgtaggagtcgccgcggcactgtaatatgatggcgacgaaactgggagcttcgccataagagatgtgtatgaaaccggttggaaaattataggataagacttcacgggtgagaaagttgaggttgtctttgtacttatctccaggcctatatttcccttgactgacgaggcatttgtggttaagatagtcattggtaaggttcagtgacgagacactgcgtatgagaaggagttgtatagccaagatagggatagaaacaagacgtttggataaagaatatgaagagtacattgttttgttcatataagaagactcagaaggagtttttagctgattggtctcattagtaactagattaactatatatctcaaaacaatattcttgtttacaaaatttgattgatcactttagattgaagaagaaatatttttccttgtttgtaacagaattgagagaggggttgtgtatctttcggcgagagatggggagggccgatgaaaaagtcaaaagtaaaaatgttaaaactcttagaaaatacaaaatagaatcatattgtaaaccacttgttcgatatgattttggctctcgggattttgctaaactgtatcatggcaattatctcatctttcatgcttactgattaattgattagaccatggttattttggatattcattcggttttcaattaaattttcgtttttttggatttaacaattttaaaaaaatcaa

SEQ ID NO: 18007 - DNA, 2105 bp, Arabidopsis thaliana landsberg
cctatattttttttcccgccaaactgaatccgaacccgaaagtatcagaatattttaatcgaaaatctgttttttattcgatacccaaaattttaccgaaaaatctggctatttacccgaaaattcgggtataggttccaaaagaggctccaaaaatctatacatgaacccatgcgaacccgattggatccgaaccgaaaccgaaccgatattttagatttaccctattagctcctaaacttctctacttgaaggacgcatacccgatcggattttacccgaacccgacccgctttacccgaatgcccgcccccctaatatgaagtgtaaaaataaagcaaaaaaactggtcgacgtcaaataaacaacggaaaatccagtcctcagcacatcgacaacgtgaattcaggtcgagaagaaacccaaaaacatcactttcttagattgtttctgtttgcaagtaatgataatagtaatatatttttggtctgaaattaatgtacactatttattacgcgaaaatgaaatgtgccgaccacttaaataatttgttaggaaatgattcattccatttaagtaaccaaaaaagagttagaaggtgtctagaaaaatcggtggagggaccaaacaccccaccccccatcaagtcaatttacaaatctaatataaggtccacgttctttgatttttctccgtcacatgtttgacatttttgtcttcagaggtcccacttttcttttccattttataacaagtcttttcaattttgttaatctatttaattctaattttctaaattttaaatcgatattcaaatatacaaaaaatcttataaaaaattataattttcataataaatcaacaatttataccttttacaatattggtaattaatagctgttagctatagctgtaagctttttcagaatactgcaataatatataaaaaaaattatactacaagaaagctgtgaaaaaaactaaaaatagaatttttggtaacacttttgtgattagtaactgtcaaaactttatattttgtaacgctttttaccgtttggtaaagtgattatcaataacatcataatatatgttatgcaataagtgtatttttaaaattcttgtgtcaagtaaaaaaaaaaacactatagagatcgattttattatacctctacaaaaacaactaattgatttttcgtgttttgttatatattctttgtaacttgaggttgaattaggtattttatgtcaatatttatattgaaaattcaaaacaaaaattacttcaaaacggaacaaatcatgatgtataaatcagaatttataatgtgtcaccattcagatttaaagatagacaattctttaaaacacacaaaaataccacattatagtgatccagtgatcaataaaacacacaaaaatcatcagctttgatttatgtatttgggtaaaaacagttacaaatatgatgagattgttacacttgctactcctttaaagtattactgaggtacaagaacaagaccctctcaatcaatgtttatcaagaaacaagaaaccactcttttcaacaaatcagcacttataatatatgacatctcccattgatgctactttaaagctattctacacccaaaacgttgaaaccgctgtacttgtgtgttaaggaaacgctcagtcctcttcacggctgccactgctactccaaccactggacaaacacggtatattgcgaccagggaaaaaagtaatctccttgccacttgagaccaacaagaaaaacaaaaagagatacaaaatctacatttgaactcatcagtatatagcaacggatttgtttcagccacggtgagccattcttgagaagtagttgaagtcatggtgttggactcttagctgttttagccaagaatccgcaacacttagaagcgacagaactcgctcttggtcttgaccttgatcgtcttccgagagccaaacattgccttgcatcttataagtggttaacccgaaaggaagcaaagttacaccttctccttccttccggatcctctcctcttccccgccattttcttctggctccatatctgaaaaatcaagaccat

SEQ ID NO: 18008 - DNA, 1605 bp, Arabidopsis thaliana landsberg
aatcctaaatgtggtgccattccattgttaatcaaataatgtttggattaattattgttatcgtaagcatgcacatagattatagacttttttgttacatatgcatcaaatatcgcagacaatttaatttatagaattagtgagtacattttcaatacttaataaagatgtaataaagttatataacttaagatatgtggaattgtcaggtcactcgaagggatttatcctaaaatggactctaacatagattaaagacgaattctaattagtctctcttttggagtttttttttggtgtgtgtctctaattactaatctagtattaatggagtgtatactttaaccattttcttctttcaaaatatgcaatggatctcgtaaaaaaaaagaatgttaagaaaacaaagggggtgaatataaaatagttggtagtaaaactttaagatctcgtcaaaccaggacccgctttctcattcactctgtagtaactaattgagatgacaacccaatcttttaccaattaccatatgtgctttacttacaaaataaaataaaataacatcagacacaaattacaagtactagtatcttttagtttcttcccaaaattatattcttataattccttctttacaaaaaaatatatttcaaattcctacttatatttgagtaaagaaaccaaacatgtatttttgcgaccgaaaaatctgaaaatttgttccaaacaaatatagtataattaaaacaatggttcagaacatgttggtaaatatcaattacattatcttgttgagaaaactagtctccaaactctcgtacatttacatgttttctatcagtttaagataagaaaaaacacatatatatatatatatatatatatatataaaataaccgtcttattgtttttcataaaacagtactcatagcagtaatactatactaggcctttaaatgaatacaataattcacttgcgcaaactaggccaatcacgacgattgtgtatttcaaacttttgtctatatatatacataaatgtatgatactaatatgatgtccggaaaaagaaacaaaaaaacccgagaagtagaacattttgatgagcataaaaatcatttcattgagttcaaaaaaagaaaagaatacatatatatactactacattttgaagaaaaacagaataaggaaaatgtataaaattgaaaagaagagagagagaatgaaaagacaagtcaaacgtcaaatcgaaccacttccttatcatacgactgtcagtgcccttctgtgttgtcattcttttttctcttattttttctcactttccttttaccccaaaattaccaaacaaagagagaaatagcttcttctttttttttttttgtcaaaataattatcctctcacacgtgtgctctcgaacgcacgacgtagataacaagatgtcaagatgtatgccaaaaattttgttcgtacaagaaatcattccatcatctttttcattacatcaaaaaaatctcataatatgttttttcttttcttcaagaaagcatcgcaaattagatgttatagagttttatcaaggttttcacatttatagcaacaaa

SEQ ID NO: 18009 - DNA, 684 bp, Arabidopsis thaliana landsberg
  unsure (1)..(684): unsure at all n locations
tgaaaaatatcaactcgcggtgtatcgtggataaatctctggtaggtgaaaaaaatacacttcaatttctctttttttctacttaaaccaaatataacaaataaatatagaatattaatatccacattacacattacacattcattagctaatacctataaaaaggaaaaaaaacacaaacaaaaagaatactaaattttaataataaactaatatataacaaatatcagaacataaaatatgaattacctaagttttacaaataataattcttattaaaaaatatctttaacttttcaatcaatatatacacttgcgggtcaatatttaatagtaccaataatattggagacaatgaggagaaaatcctaattttgcgtgaagcattataacaaccgttcacactttacaggtttgggtatttttagtaagtgtattgtcgattttacctcaagtttactttttctaacttagcaaaacattcagctttaattacaaaacctaattttgacggtatcaaaactgttcaggcatcaccgcatcgtgaattctctatgtttgacatcaaaaacacatgccacacatttctatagtcaatcgaaagaaacgacatggcaagattttgagtacnaactgtcacacaatggtgagcccaatgatatatgtcatacgatgattggaaca

SEQ ID NO: 18010 - DNA, 1941 bp, Arabidopsis thaliana landsberg
gaagttagattttccacaaaacacactgacattatgtaagttgtattccgcaatggtacgaagcgtcacttccttgatcatttcttcattttgccactgattggtggtattcatcaaaagaggtcacaaagattgaaatgtaatcatatttctcccatttgattctgaaaccttagttgatattgattgcacgaatccatacatccatgacacacgccttcatggtttccaattaacctcacgaaagtcgaaacaatgaaatgttgaattttcttcttttagacaattgactgaatgcctcttttggattttaaatttgcctagataaatttaatggtaggtgttgattttagtttgttttataaaaagttagacatatttttatgttgattaaatagttgccttgtattccaagttactaaaattgcttttagaatttatatctaaatggatctaaatgggtatatgggtttaagtggacaactctaatagaccttaaagttaattgggtttaaatgaggtgggttttaaatgggacgggctttaaatggggtgggcatgcccatattaacattactacttctccatatgcttcagtcttcgcgagagctgctgctgccagaagctttcttccctccatatttctgttatgggaaatgagtaatacgcaatatatcaacatcaaacccattttgtgatttctaaacgtttggactagttcattagcatgcacaacttacttgctttcctagattgaaggggatgtatttgtacttaatcatgtgttctatttgacgcgtcattgtcagcacaaacagagcaatccaatagaagagactgaagagtagtaccggccgaaagagagggatgtcaaagaaaaaaaaagaatgtcatcacaaacgctatgcagaacgccttagtcataaagtacctgccaacatataaattaacctatagctcacactctaacacaaaagaattaccaaacaagatgacgtcacttctaaacgtatttcacttgtcttcattcacgaaaaacagatataacatcactgtccctaagcttataggcactacttaattcttgtctcactcaaaatcactctttagatatctcacatatggcttgatttgtccatggcataacatttttttaaccaggctttagagcttagcagatattagcacataaagagagcttgtactgtaaaattaccagaacttaaactctggaagccaacggatgaatggtttgaactcatctgaaccttttgtgggtaacattggaccatctgacgtatcaagctcaggatcaacaagtggtgataaaaacccagtcaactagtttagaacataaagccccaaggcaaaagaaacgataaagaacccttgaacatagaaaaccctcaaacagtatatcactacaatcacaagagtcccgatccacctcttaaccgcgtgaggcttagtcttgtctaagtaatactgatacagcctccacgcctcattcgctcgttgttgtacaggtgatgatgccattgaagcagcgtcacctccaactccctccattaacacactaatatccagaagaatctgcacgcaactctacaagataatctacatgattcatgaatctctccagttatctatacaacaaccatctacacaatattttcacagaaatgagatcaccataggacatttcacatcatcgtaaaagcttggactaaaccaagacctcgaaatatcagatctcgaaatcagaactctctagtttctacgtaacaaaaggaaacgaaattgcagcaatttcacaatccgaagcatacgtaaaactgtaacagaaaaaagaacaacaagaaggttatccatcaaacaaaccgtgaagacgagcttcaagcaacgaaacgaaatgttaagtaacgaagaaatggaaagtga

SEQ ID NO: 18011 - DNA, 709 bp, Arabidopsis thaliana landsberg
gcaccttcagaaattctgtcctttgatatctcgatggtaaagagaagtgacacgagcttagagcagactaaaggattctgctcgacacttgcaggtaagtccaatgtctctgattcttttcttggatttaaaagcatcttctcttttctgtgactttctcatatacatgccacaaaacaaaactcattgttggtggtgagtctctaggctcctagagagcacatggtaattactaatgatagtggtaacgataaatgataattaggacaataattagtttcttcaaaacaagaactgcatgctgtttatttactttcttcatgcagtcactaatcagaaaaataaactatcaaaaaccaatcgcattaagaaaagacaaccttaacggggaaaaaccaaaatatttttctactgcatcaatcatctgtttataaaacaaaaactagtaaaacaagataaataataaaaataattcgacaaaattcagcttgaaccacaagcggaagaagcagaaaactcagcagcttgttctattccctttgatctgtaaggtgcaatgttgtggattccagatatgagtggacctaataactcattctcaatgcactcatacatttccttgcagaggttatcaaccacagcagtcaaattggtgaggtgtcttatcatctccacaactttttcatgatcatactcataaaagggctct

SEQ ID NO: 18012 - DNA, 1168 bp, Arabidopsis thaliana landsberg
atattttgatagaaattttttgagttttttccccaaaccaaaatagttatatacttttacataacttttttttcttgtaaagtaaactacacagtacaagaagatttgtcttttggttagccaattaaattctagtcttttgttttgtcccgtactaatgtcacatcatcgttatacttaattctcaagttttaccttccccatgaagtttccttcttcttctctttaaattcctcactctcttgtctgtcgcttcacttttgcagagagaaaccaaaacaaaaccagtaataatagagacaatgacggaatcggctaagcaacacattgaacgaattcgtcggactaagttttcaatcggtggagctgagaatccgttgacggaggatcttcatcaagctgtgaagaatctctccgctgagctctatgcaaaggatgttcactttcttatggaacttatccaagtaagttctcctctcttactgcccctatcacttatatgtcactgtttctgtgttttttctgtgagattttgctctgtcttctctagggttttgtgctctgttcccgagaaaatctgtaacccattttgaatatctacttttttcccgcactattttcctctgaagtttgtgttagatatgtttgtttgcgttgatgtgtaataatgtaatcgaatgttgaaccagaaccagaacaaaaccgaaccaaaccgtttctattctgcttcattttcatgtattcaagtgttttcatatgatgttacctagttttcatgcatacagtcagaatcatgtttgctcttaaatcgaattatattgtgcttgagattgatacatagaacatgttgttatggttttttggcttcctcctacagttttagcattatgctaatgctaagcattcgtatttttcctctggttttcagaatgcggaagataacgagtatccagaaggtgtggatccatctcttgaatttgtgataacatctgaggatatcacaaacaccggagctccagccactcttcttattttcaacaatgagaaaggtttctctgagaaaaacattgagtccatctgcagtgttggacggtctacaaagaaaggcaatcgaaaatgcggttacatcggagagaaaggtacacgcatttgcttgtggacccaagcg

SEQ ID NO: 18013 - DNA, 1606 bp, Arabidopsis thaliana landsberg
ggacttcttctacaagaacataacatttggtctgactcttttctttttcgaggctttcaccggcttttctggtggagccagatacaacgactcctacttgttgctgcttaacgttattctcacatctctccctgtcatcgcccttggagtttttgagcaagacgtgtcttcagaagtctgcttacaggtttacacctctcttgctcagttatatctcttcaatctaaacccctaaaacccttcttctaatataactttctctctctctagttcccagcactgtaccagcaaggccccaagaacctgttctttgactggtacagaatcatcgcgtggatggcaaatggagtctatgcatccgtagtcatattttccctcaacattggcatctttcatgtccaatctttctgttctggtggccaaacagcacacatggacgcaatgggaactgcaatgttcacgtgcatcatctgggcagtaaatgttcaaatagctttaaccatgagtcacttcacatggatccaacacgtaatgatttggggaagcataggagcttggtacgtcttcctcgctctttacggtatgttaccagtaaaactctctggtaacatctttcacatgctcgtcgagattcttgcccctgcacccatcttctggcttacttcacttctggtcattgccgccacaacgctaccttacttgttccacatttcataccaaagatcagtgaaccctcttgaccatcacattatacaagagatcaaacatttcaggatcgatgtagaggatgagcgaatgtggaaacgagagaagtcaaaggcgagagagaagacaaagattgggttcacggctcgagttgatgctaagatcaggcagctaagaggcaggcttcaaaggaagcattcggtgttaagtgttatgagtggaacatcgtctaatgatacgcattcttcaaactcacaatagacttgattattaagaccaagtatgttttgtttaaccacttcatatatatttctgtgattttttcttcgggaaatcatcagatggagaaagttggattcaagttagatgaaagaaagagagactcttattttattttcttactaatcttatggtttatacaattagacaatggtagaagaaagaggggaatgttgtattttgtgtttgtctgtgtgtgtgtatgtacactagtactaatgaaaagaagaaaaaagatatgttgctgattagacaagtttgacaaatagttgacattttttcctttttacaaatggattcacaaaaaaagattagcatggaaaagcttaagtactcttacttccgaaattgaaaaagaaactgttttcaaagatatgaactaaagctcttgaccacttcttaatgttaggaattatataatcgcacatgaccccagtgaaagatttctatgtaagtgacatccgaaacagtaaaaacaggtatagaattgctgtgaatagacttgtaattacgaaagatttttggatcatacaagagaagaaataaatattgaaattgataaaaaagaaatatggtcagaagagacatatatatgttcgatagagttgataagaaaactaga

SEQ ID NO: 18014 - DNA, 588 bp, Arabidopsis thaliana landsberg
ttcgggtatgtattctctctctctctctctctctctgtatcggatttgaatttgtttgactttttctggttcgtggtggaataattattggattgattactagttttctgattttgttcgagaaattagggtttagaaattcacaattgatcatcttctattgctcagttgaataagaaaggttgcagatttatagttttgaattgatcggaatgtgtcacactaattcaaggctatgtcagttactagtaaaggtgaatattttgcgatccagtttgaaatgtagtttatcaatgaatagtttcacgagctctgtttttattctaaatagatctcttgataggtttcatttatgtgtcttttcgatactctcagtgattagcatttcatagagaactaattgtcgatgactcagattgtttatgttacagttcatcggagagtttcgtattgtgatgttgctgctggaatcgacgatgaataccttggtgctatacagaaaatgtctgcggatggaaacttctacagggtaacatcatctttaatatgatttcatttaaagaaaatgtcatgctttatttataaata

SEQ ID NO: 18015 - DNA, 721 bp, Arabidopsis thaliana landsberg
taattagtgtttaattgggctacacaaaattaggtcttcctagtattattattgtccaccgaattaaatataaagcttaaaatggccatctttttcacttccatgagacaaaaacaaaaatcaaaaacccagaaaagctacgatttagatattaaaccaaaaatgaaagacctagatacgttacttgccatgaagaagaagaagacgatcgatttcagaaacaaaggccagagcttcagtttctctctcctgatattgaaagaggccaaggatttgggttttttggactctcctctctcgaccagaaagtaagaaaaaaactaatggaaaaaagaaaaaacaagttttctctctctctctctcttcaggcttatttatacgaacattaaaatcttgcagaaatggagactttaatttaaaaccaaaaaataaaaagtgattttaatatgcgaaggtgacggataacggagtctaataagacaatgcacctatcacacgataagggagctgattttgataagcacgttgacttatatataagtacagattaaagtttaaaccagcatatacgacttagccggctacaattctcgacgttatcggctcagaatctctagctgctagctgtactccaagtagacatgatcctctgtatcacaacatgagtacaccctcggtgagtgccgtcgatcttgtacgatgaacctttaaggatattcat

SEQ ID NO: 18016 - DNA, 384 bp, Arabidopsis thaliana landsberg
ctcatactgtcacatcattaaaattgtcaaccaatgtagattatttcaaataatacagctcagtttcatcaaccaataataacattctatttttccacgtcactctctatatcagcagaacaaatatatgggcctaggcctaaccaaaataaatgattaagagcctggctgatttaaacacagagtttgcggttatgaatgcgagagtttgcggaaacgggcggttgcggtttcaagcgttatgaaacattttgaataacttgttaatggttaaaaatagagcgtttgcaaaagtttatgactggtaaccagcaggtgctactacagttaaattaaaattaaccaaaaatatatataattttaattatacaaagtataaaaatc

SEQ ID NO: 18017 - DNA, 543 bp, Arabidopsis thaliana landsberg
  unsure (1)..(543): unsure at all n locations
cctatattaataggtaaagatttttaacctagattcgttttggaactattcgccgtcgtttttttcttttttaaactgaaaagtttctaaattgtacaggaagggctgcgtttcttgatccagatttttgnnnnnnnnnnnnnnnnnnnnnnttgtacggaaccgaccgttacccagacgctagacttaatgtatattcaaagtttgactttatatgtttaattaagaaacatatggaagggacgaacgagttcaaacgaatacttgattctcccttcggtcctctgttttcttttcccgttcaacggtgttctctgtcctgcaaactcatccatgccctagtttgtcggcagttagttacaaaaaaaagcatgaaatgtggacagtttttggtggtcacccattgcgtttctctcttgctgagttcgcttctgtaactggtctcccctgtggggatttctctgaagattacgatcctgattacgagccaaagatcccaaaggaggctgatgattattggctccacaagattgggaagacaag

SEQ ID NO: 18018 - DNA, 838 bp, Arabidopsis thaliana landsberg
tgcataatctatgaagccgtctcctacggtatctcctcgccatttgaatctgcctagccgctcgtagcctgcaatatggagagtcgtaccttatggctccttggactctatgactcctcaagaatctcgaaaacaagctcggtacgtcttccagatcggctacactcagcgaaaacgcctccacatttgtcacacaccttacatttctgctactaagcaatccctttgatggcatccttatcctcgtcccatctgaaggtttcagaacatactcagttccaagctttttcttaacgaagtgtcatctaaggaaccaaactttttgggatttatgaacacatagagatagagtcaaaagggatggtaccggggtttacagaagagcgttcgaggcaccaagtgaggagttcttcaccacaaacatcgccttcatataatggaagaacagaaccatcttctccaatgctctccatctcacctctcactatgaataccattttctcaactagtcctccacggtgcaacactgtgctactccctatgtatgtcctctgtttcagcctctcacggattgcatctaagattggttcatccatcaacgaaaatattctcacctgcaaacccattcaaatttcaatactatttctcagcaatggtttaatctgtggtctctaactattacttgcagttacagcttctagaactagctctttgcaacactatttggaattggtatctatgcatacagaagtttcacatatgtttaccttcttgagaaatttgaagaggtgtcgtcttatatctctttgaagatcatcaggcatattctcaaaaagca

SEQ ID NO: 18019 - DNA, 448 bp, Arabidopsis thaliana landsberg
  unsure (1)..(448): unsure at all n locations
taatgccaataattatacatttttattcaaaacaaattatccatttataatttattgattttataggtgtatttggaatttttaattatattccaaaaatccaattaattatgattgaacaagggaaagaagtattgaagatctaaggaaataaacattattaatttttaaaacaattattcgttaaaatgctatttatattttttgaatttgaagaaggaaaaaaaatcaagaaagggtatttgtgtgttttaatttatgatatatttgtaaaatttaacatcatatatgtcaatccgcatagctactcatatataacatgtatttaaaggtaagcaaataggaattttggaacatacttttaatggagtgaaatgaaaataggaattatgagacacgaacgacttgataagagacggaggctgnttaaaaaacaaattgaaaccaa

SEQ ID NO: 18020 - DNA, 420 bp, Arabidopsis thaliana landsberg
  unsure (1)..(420): unsure at all n locations
ttcttcccatccatttagaactatagagttaaatctaactcgctgccgtctgttagaactttatagtctatactagcctaaaggggatttggttctagaaaatggagtttgaaacttgatctaaccctttcttctgttactcttctttttatttgcacgtgtggcattctcagacccagaggaagaggtattggtagatgtagccaagacagtannnnnnnnnnnnnnnnnnnnnnnnnnnnnnnnnnnnnnnnnnnnntttccaagctgagagtgtgtaaataacagagttagtaggtgttttactatataaaccattacacgggactaccctgaaacataaggactaccgtgtccaattttctgttaacgagagcatcagccattctactgtcagaatattcacagcttgcacaatca

SEQ ID NO: 18021 - DNA, 1300 bp, Arabidopsis thaliana landsberg
agactttaaatctggtttgttgggcattctccggccattttcaaagttatctgaacatgtgcagagctcgtgagggctgggcatacggcaccatatgagccgctcctctcaccgttgcaaaggtcagttgattcccatactctgtgacccagccaccaaccttagttacaatcccaacatccacaagttagcaatcacaattaacttagttagaattgttttgatggtgtagggaaactacctgttctttgtggaaccaagctccatagggaatagtggtcttgaagttgagatcctcagcaagttctcgtactagtgttcttgaactttgaagtggaattacagaatcttgatctccactacaattttaacaagctgagagttaagctgcatagtacaagaaaagaagatctttaatagaaatcttacctgaagatccaaacaggagtttggttctgaataattctcttaagactcggaagcatgtcaatgtacccgtctatgccactgtagtttaaccggctgtgacatagtgaaaagtgaaaagccaatatcaatcagtcagcttcattttttggtgatcaacaaaatgaaaagtgggtcaaacaacttacttgctgcacatagtccattcataaggtaggtgagtgcggttagcgtgaagcgcattctgtacctcggggagattgaaatagaaacttctttcatatgttatacaaacatcaactcccatgctaatcttggtaacctaaaaccattttcacaaatttacacaaatgtttttctgttggaaagaaaaaggtggataagtgctaaccattttcttgagccttagctcttgctggacaatagaagggtaacatacatcgaggagaatgtgatagctgttgatatactcagtgaggacgctggattcaacgactgcatatatacaagcattgctcatgttctttggattggcaaagtcacattggttcatgattgtgagtcttacttcatcagagatcatcccatgtgaccagaagtactcgtatgcagctgcaaagtccctgtcaagcttcagaagtggattcccaatctgatcagaaacacaaaaaaaatattatggcccaaaagttttaaagcaaaagcttccttttacccaagtctctcttagagaattaggttaattgttggagcttagtttttttattaatcaatagagaacccttatataggtattcatcatacaacttagacataacgctaatgcataaaataaaacactttaacgttaaagaaattatgaaacccaatcata

SEQ ID NO: 18022 - DNA, 634 bp, Arabidopsis thaliana landsberg
cccttatcacaccaagaatgatcttttctctaatatgatggcagtttcgctcgttgtgcttcgtcctttcgtggaaggcaggattgtttgcaatgtgaatagttgctgtgttatcacaatacaaaactgaagcttctgaaacatcaatccaaagatcctcaagaagaaacctgagccacatcatttctcgaacagccatggacattgccctgtattctgcctctgccgaagacatggagaccacttcctgcttcttagatttccaagctactaaggacgttccaagaaacatacagtacccagtcgttgattttcttgagtctgagcaggaactgaaatcggagtcagcaaatccagacaactttaaatccacattcgcagagtagaacagaccttgaccaactgttcccttcaagtagtagatgattttgtagactgctttcaaatgaggaactcgaggtgcagatgtgaactgacagagcctatgaaccgcataagtgatatcaagtctggtgaatgtgagatacatgagtttaccaaccagcttgcgataatgttctgcatcatcaatcagctcaccatcttcttgagataatttctgatttgggttcatgggaactgaacttgacttgca

SEQ ID NO: 18023 - DNA, 935 bp, Arabidopsis thaliana landsberg
gaacattactcctttgtctcttctattgagcctttcagggtagaagaggccttgctagatccggactgggtattggccatgcaagaggagctcaacaacttcaagaggaatgaagtttggacgctggtgcctcgtcccaagcaaaatgttgtgggaaccaaatgggtgttccgcaacaaacaagacgagcacggagtggtgacaaggaacaaggctcgacttgtggcaaaaggttatgcccaagtcgcaggtttagactttgaggagactttcgctcctgtggctaggctagagtccattcgtatcttgctagcatatgccgctcaccattctttcaggttgttccaaatggatgtgaagagcgctttcctcaacgggccaataaaggaggaggtgtacgtagagcaaccccctggcttcgaggatgaatggtacccgaccacgtgtgtaagctctctaaggcgctctatggacttaagcaagccccaagagcatggtatgaatgccttagagactttttaattgctaatgctttcaaggttgggaaagccgatccaactttattcactaagacatgtgatggcgatttatttgtgtgccatatttatgtcgatgacataatatttggttctactaaccaaaagtcttgtgaagagtttagcaggatgatgactcaaaagttcgaaatgtcgatgatgggcgagttgaactacttccttgggttccaagtgaagcaactcaaggacaacactttaatctcccaaacgaagtacacgcaagacttgatcaagcggtttggaatgaaggatgccaagcccgcaaagactccaatgggaacagatgggaactgacggacacgtcgacctcaacaaaggaggtaagtctgttgatcaaaaagcataccggtctatgataggttccttgctttacttatg

SEQ ID NO: 18024 - DNA, 1678 bp, Arabidopsis thaliana landsberg
  unsure (1)..(1678): unsure at all n locations
acatttgaaatgagtaaacgtgtatgtttatcgtacacgtaacagaacaaagcatttctatgattctatatatataagatgcctaggtcaactggtcaagtagtatttgatgcaatggcgtagagtgggaacatgcggtggatcgcaatacccgttgattcagcgacctcggtctgatcttctgtagattcgactgataatctccaatcaaaccgatgcactaagttagccaaaacaacctcattcaannnnnnnnnnnnnnnnnnngctggacaaatccttcnnnnnnnnnnnnnnnnnnnnnnnnnaaaagcctgaccccggtaatcaacagacgaatctaaatgcctctctggtctaaactcctccacgtctggtccccacgtcgcagcctctctcccgattgcccatgcattgatcaatacctgtgtaccggctggtatgtggtgatctcctaatctgacatcttgtgttgattcgtgaggaaccatcaatggaagtggaggatggagcctgagtgcctctttgattacagcttttaagtagctcatgttttgaatttcttcttctgacacacttgatttatccttgcaaatcgtgcggacttcttcttggagtcttttcagacactttggatgacgtagaagctctgtcattgcccattccataagtgtagacgatgtatccgtaccacccacaaaaacattctgaaaagttaaaaccaaaacaagaactactgttatatacttactaacacatcatgttgtaaaaaaaaaaaacattacacaataaaacatcataaatctgaattggtatcattcaaaagtgtgtttcctcaccatgacaattgcctttatgctaacacggttgatttcaaacccgacggtcttatctctttgaatagcgagcaatacatccacaaaatcagtcatatctctgtttccatcgacatgatcttgcacaactctctcaaagaacttatcaacatcgtttgccgtcttttctagttgacagtctaaaccgcggatccaatcaatccacgcaagccaaggtacataactccccacactaaacgtccccaatagtttatttagtctctccattaactccttaaaatccgtttcaccaccgtatttccgtcccaaagcaactttacatatcacatcgttagttaaactcaccaagatcttgcttagatttaccggcaacgaaatcgatttcctgatcttttccatcatcagactgatctcttcttctctcacttctcgaaaggatcgtaccattttgttgctgaatagatggaggacgcacacacttttcatttgcctccagtactctccataaggagctgaggccacatcatgcttatcgtaaagaagtttctcgaagatttttgaccgtggccggcttgcgaaaacacggtcatgcgtcttcaaaacgtctctagccaattcagctgaagatactacaagaacggggacacggccaaagtgaagaagcataagaggaccgtaccggtggctgagagagcatagtgatcggtgagggtggcggccgagttgatgaaggtttccgatcaaaggtagtcccggtggtgacggaagtgtgtttcttttcgtccctctcttctgttttctgaaaattatgatggtaattacaaagattaatgagcataacc

SEQ ID NO: 18025 - DNA, 894 bp, Arabidopsis thaliana landsberg
ataacaaataatgtttttaaaaaaatctatcaattgtgagatttgcgatgaaatctataccttgacgatgatcttgtgagaatcaggaagaggatgattatcttcgttagggtttacgatgaagtatttaccaatggacatggcgttttcgtgaatctcctctccgatacatttcgttttcgaagactttagttcgtaacgcattgatagtgtcctaggagataacaacgcaatgatcaaaagcaaaatcgagcttcgacaaagatccatggcgtcaccagaaaagagaagagagagagagaaagagataaaatcttgcagtagtcaatgtttttttgccgtttagggtaagacaaaagagagtcaaagacgttctttgcacacgtgtaattatttaattggtgaagacacgttgacaagtcttctttgtcatgagcatattatgggctttgtatatggaactgggcttagttttgtaatgaactttcacttggcccaatatttgggcttacatagattaatatatccgaaatttaaattttaaattttcaatataggtccgaacattcatatttcatatcggattcggttagaatttttttgtatttggataattcggatgaaaaagtttattaaccattcggattatatgactattcggatttgtatgggtttcaaatcagtttttgagaaaaaaaaactaaaaaattgttcaattttaatcaaaaatcgtttaattttactaaaatttggtttaattttgcaaaacaaagtaaaattataacaaatagaactaaaagaaatttggatattaaggttatagcgaatatttttggtatttagtattttttgggtataaattataactaaatatcactaatattttaagatata

SEQ ID NO: 18026 - DNA, 726 bp, Arabidopsis thaliana landsberg
gcacttgtcccttatgctcatctttgtgtggttggttacagaaaccattgattcttgcactctcaaacccaacttctcaagccgagtgcacggcggaagaagcttacacatggaccaaggtaacaatcaaaagcttattgatactctcacaaaatgtaaatttgcatatatttgatgcaactatgaaaaaagaattgtgttttgattatagggtcgtgcaatctttgcaagtggaagcccgtttgaccctgttcagtatgatggcaaaaaattcacgcctggccaggttcgttgattttcttttaacattttttctctataattcatggctcatgtccttccaataacattcctttttcaggcaaacaactgttacattttccctggtctcggtcttggtttgatcatgtccggtgccattcgtgtccgtgatgacatgcttctagcagcttgtaagtacaacacactccttttaaaactgttattaaaaaattgacgcattgtgatataacactgcactctctaagttggccctaaatggttttatggtactagcctaaaagctaaaatacaactcttttctcataagtttgttactttgttttcatacttaacctgccatataaatttttaggttgtttttagaagaatatttttttttgttatttccgggttcataagtcctttcaattttattttcggtttatttaagtccaaatttaaaaa

SEQ ID NO: 18027 - DNA, 1196 bp, Arabidopsis thaliana landsberg
ctacagtgacatcatacccttacacatcccctcaaactccacattacaattctccaagccatgaacacaaaatccctaagacacaccacatccaaaaccatctatttacagctcttcaccacctccatcatactactttccttctccaaaggttgattacaagtctccaccaccatcatacgtttacagttccccaccaccaccatactactctccgtctccaaaggttgactacaagtccccaccacccccatacgtctacagttccccacccccaccatactactctccttctccaaaggttgactacaagtctccaccaccaccatacgtctacagctccccaccaccaccatactacagtccaactccaaaggttgactacaagtccccaccacccccatatgtctacagctccccacccccaccatactactctccttctccaaaggttgactacaaatcccctccttctctgtatgtctacagctccccaccaccacccacgtattattctccttctccaaaggttgaatacaaatctccaccacctccatatgtctacaactctccacctccaccggcgtattactctccatctccaaaggttgagtacaaatctccacctccaccatatgtctacagttctccaccaccaccatcatactctccttctccaaaagctgagtactaagcttcacattcaccttcgtattacttgaaattgtaatgagattcttatataagctaccaagttttatttcatttcatctttgcttttgttcttcatgatattcatatctaataaattttaattctgcctatttgattaaatattttgcttcaaaatcttcaaatggtttaatgcttttacttttatttgttttaagtttgcttgcaatctatatgaagttctttgcaaatttgaattacgtagttcacattcttgactttgtagctttagataattatgtaatcttataacatgggacatgtttatggactgcatacctaaattgcatggatttttttaaatcattgcatcctcaaggtttttttcacttaaggaagttttttttcctacctactcattgacctaaatctggtatagataaaaatacactcacacatgatgcacttacgacgcattcccaaaattgtatatcaagaactgctcttgtacattatcattcttt

SEQ ID NO: 18028 - DNA, 2044 bp, Arabidopsis thaliana landsberg
  unsure (1)..(2044): unsure at all n locations
gattatatattttccttgtggcaaacaacgaaactatgtacatgaaatctaaacaatgtcctttattgcacagaaaagaagactgaataagaaagactgctattaaggtaggatatttgtcaatagatgtgctttgactctggcacagtgctattgactgtacgagcttcggactgctctctgaagtccctctggtgtggagcatactggctcccttctggctgctggccctgttgcagcggaggtggaggcggaggctgttgccaggaagcttgaggttgactcgccgaagcaacagaaactgcagggtggttgcccacatattctgggatgtagggcgaatgatacgaagcagtatgcatgacctgcttcggctgagcttgttgtgctgcggcttcggctattttcttttgcttctggatggtaacatggcacatcctggtggtatggcctttgttctcaccgcaaaataagcaaaagattcttcttggttgatctccaaatcttccgccgaagcccctggcgcctctgcctcttggagctggtggtcggaaggagctttgctgttgggccgaagcctgtgaggagcactgcggtctgttctgctgactccccttatcatcattctgagtggagttgtggatggacctgacatgcctcggataggatcttcctccgaagcccctggtcatttcagaaaatctgaaggcctcctcccttctttgacgaaagtcattgtcagcacgaatgtactcgtccatcttttggagcagcttctccagggtctgaggaggcttcctagcaaagtattgagcagcaggtccaggacgaagccccttgatcatggcttcgatgacaatttcattgggcaccgttggtgcctgcgccctcaaacgcaagaaccttcggacatacgcctgaaggtattcttcgtgatcttgggtgcactggaacagagcctgagcagtgaccggcttcgtctgaaatccttggaagctagttaacaacaaatccttcagcttctgccatgaagtgatcgttcctggtcgaagggaggaataccaggtttgagccacactcctgacagccataacgaaagatttggccatgactgaagcattgccaccatacgaagatactgttgcttcgtagctcatcaaaaactgcttcgggtctgagtggccatcgaatacgggaagctggggcggcttgtatgacggaggccaaggtgtagcctgcagctcagcggacagaggagaagcatcatcaaaagcaaaattcccatgatggaaattgtcataccagtcatcttcgttgggaaaaccctcctaatgaaggtcttggtgctgaggccttcggtgttgctcatcctgagcaagatgacgaacttcttcagaggcttcgtcaatctgcctctgcagttcagctagcctggccatcttttctttctttctctgtacttgttgatgaagcatctccatatctcgaatttcttgatctatctcgtcctctggtggtgtcggactgacagccttccttttctggcttcgggcctcccgcaaggaaactgtctcctgattgtgatccagtggttgcagagctgcagccccagtcgctgaagctttcttcggcgccataacgaaagatttatgatcgccgaaggtgttcaaaaaactttaataagtggaagtgagttcaccggaggtgggcgccaatgttggggacttgttctcaaatgctatgagttaagaacaaggcaacacagaaaatgttaaacattaagatccttcgtccttcgaagcattatttcccttaggatataacgatccccggacgaaggtcatgaaggattaaccttcatcactataatatacattagtaaaagacgaagcatatgaaacataaaagatagcgtgaataatcgtataacattattcatttaactntattaactcatcatagaggaatagaaacaatattgaattataaatgtaccttcggcttggaaggaaatgaaaatacaagtgtgacgcanaagcaaatg

SEQ ID NO: 18029 - DNA, 757 bp, Arabidopsis thaliana landsberg
ttatttatttattcaatttgacactaagatcttattaataatggctgttatataaccattgttgaccccatggcaaattctggtgttccataattctttgatcgtgagatccactctacggatatctcctccagtggacagttccacataatataaccacgtataatatatcataaaattaagctttaacaaaatggttttggcgggcaaggcattctccttactacagtattgcgtaagcaaagccgaccaagtagttaatgactaaaattttagtgtcctcttacgcatgcgaatctatctatttttgctaccaaaattttcttaggaaaattggtaggatatcatcttgttttcttgtaattatactattgaattctagttccatcaccacaactaacaccatgtgtttcatgctatcttaggttatgagtaggacaacccaatccgattttagaccactaaggttaaaacccataattaatagactgtacagcattttttttttatggtaaaatacttccaaaccacttcgcagttatgcaataaagaattgaatcttatttggataccatagatttagatggaaataaaaagagagaaagtaggctcaaaagcttacctacaacatgttataaacccactaataaaattcgaatgctctcgttacttgctagtttatttgttcaagtcaacaatgtgtgcgttttggaatttcttttgtagtttggacaacaaagaaatcgttttttttcct

SEQ ID NO: 18030 - DNA, 579 bp, Arabidopsis thaliana landsberg
aggtagcatcgctagaccactatccctgcaagagaagagaaagaaaaggatctgaacggcgcaatttttagaattcatcagaaaaaaacaaatctcattagctagacttacatggctactagtgatgtttctgtatcattcatctggtggttggaaggaagacccggataaggtccttaacagtgatttttttcctacatgtcgggcatttagcttggagggataacgcattctttatgcactttttgcagaaaatatgaccacatttcgttgaaacctcctgagtaaatggacacagacagattggacagctaaattttggttcctctacaggaggagccacagccttggactttctctgaacaagaaaatgaaacttggtgagccaaactccaaacagcaaaactttaagaaaagaaaagaaaaccccacccacatctcttaccggcttgttaagctcaactgagtcaacactagtttgatcagagcgacgccttgtggatctattagcaccagctgtacacataccatcacaataacaaaagtgaacaaagaaacacgtaacttgataatccccac

SEQ ID NO: 18031 - DNA, 1515 bp, Arabidopsis thaliana landsberg
gatttatcatggtataatgcaagaatgagtctagaaagttcttgaatattagcttgcttgataagacccagcgatgaaagcctgttggatatagttgtggaacttaggtatgaaatttggaatgttgtgtaagcctagggataattatgtggtgggtaggatttgattagacttgttagacatatgaatttggtttgaataatcaagagaataggctagagaatgttggaagttcctgtgttttcaaacctcttccacgggttcgtttttgtgttttgcttgagggcaagcaaaagctaaagtctggggtagttgatatacctctatttctactaattttagctatgatttagatatagattttagaatctttttgttatttctagattctttaagagtcttttaaagtatttaatgattgagacaataatggagataaaaaggtttttggaacaaaagctgaaggacgaattgagttccagatcaagtcgagagtatcgatcgacacacttttagtatcgatcgacaccagttgcggtccagcaaaattctaagaaggtttagagattcaagaattggaagtttgcccgaaaagatttccttattgatattattagtccctgcacatttttaaaatagatatatatatattaggtcattgtttagacctatcaagttttctatctccaaaactttgttttaagcaattcatatattagaaatctctgttttcacagtttcatcagagatttcaataccttgcagtgaagagatattttctaaactcttttcttcttttgatattttttatgattttttattcaaacatattatttgtttctatgatcatgtttgagtagtctgcttgttaggtttacggtttctcattagggttatagatgatttagtagatcacccacttgttaggatatcgataggattcttcatctttggttgttcttaatgctagttctagggtagctaactagaatttgatctcaggtagtaggtaaattctggaaggttgtctattactagaactactatttgatgagcgaggtttttagatgtgtcataagaatcggcctatctatttaggtgaacttatcaaactcgtttatcatgcatgtcttaatatagggatttgccaagcgaccgctgggaatctttagccctaggcatattgagtagcacggcgaaccaccgcttattctgtaattagggtttgagtttaagttgattcgataacatcctagctatttctatatctcttatcatctatttcctgagaataccctaaacctaacgtttttattatcttgtcttacaacttcacaatccactatctacttacttgctttctttttattttcttatcatctatgtagcttgattttgatactttagcctattgtgtgaacaaaagagttttgtggaattttacccttaagtactaacgacgatctcttatttgagggagtaaacttagagcaatttgacctacattaaattcca

SEQ ID NO: 18032 - DNA, 1090 bp, Arabidopsis thaliana landsberg
gtaaacataaacgaaaatgcaaatacaaagaaaaacagttgatttttttttttttcaacaacaacaaaaataagacaatgtatgatgattgatgacatgatgctatcatgctatgtctttttttggtaaattctctaaaataaatatgatctaagttaaggtttggttggattgtaccggaacactatgagtataagtgaagagttgtaatttttatttacaattgataaattgtaaataaactacatatctaagaccatctttattgggaggatctcataagagtttctcacaattaaaaaaataaaaataatgaaaatgaaggagagagagcgtaagaaactctgagatactctctacaacccatcatgacaattatcatcttattattggttcaattttttaacaaaaatatttttttaatcaaataatcaaattataatataatattaatattttttttgtttaaaaaactatgtgggtttctcatggatgatggagatgccctaatggccttaacaagtatgggttatgaaaaaatagtctatgaattaatgaaaaagctgtgagggtaacgaggttaaaacattgtgagtcattttgtatctaatccaaagtacaaagggatacaaaaaaataaaacaacttttttgttagatatttttaaaacattgtaaacaaagaaatacttgtttctctgtcttacaaatctgaacaaattaaagtacctaatccaatttcttataaaacaaaataaaatgaaatgatagtgttaactgttaaaacatgaaactattgttttgaatcggatttaccaaatattctaatatatcactctttgactagaagataaacgcttttgatcagcagcattaggaaataaatatctcttcttcagagcttctcattaaagtccgtataactaactaaacactcttagtagaatttacttttgacattttccaacgtaaaaaagatttatgacccaaaaaaaaaaaaaagagtttgaccttgtaatcacttaacttgtgtcgccgttcaagtacaacgcatgtgtgaggaaaaaaagaataatgtgtttttataataa

SEQ ID NO: 18033 - DNA, 700 bp, Arabidopsis thaliana landsberg
attaccgtttttgattcattttgtccggctgcatatatttggtataaatcgcatgtttccatgaatacatatccactttaacctttaataactatgagaaaattagttggactaattctgagaaattaaaaattcagttcaacttatacaacaaacatataaagctagcgacaaaaagtaaataaagatagccgtgaaacaactgaaatgtctagaacaaatatcacatctaaatgaaaatttagttaaatggaaagctaattagctggtgttcgattggtaaagtggtgcgacaagttcttgaaaaaaaactatagcttactgacccatgaattcattgacaatttcatctgtgataaggacaattttctctgcatttccactagttgcataaatttcgatgagcttcattgagactggtccacagtccccagacctctcgttgacataaatccctttcattcttgtccaactgaaaggagccaatccatgaacttgagcatacgaggctgacaaaatttgttaattatgtacgggatttgaatcacaatatgtgccatgaactcatcgacttgtcgatcatcgtttagctggtagtttggatcaagtatgtcaacacaccagttccctaatttgattggccagccctaccccaatgctggggttttcaaatcattgacatcaaggatgaggggcaatt

SEQ ID NO: 18034 - DNA, 1739 bp, Arabidopsis thaliana landsberg
aggttatatcaaaaataaaaagcataagaaaacgaatataaagaaggagaagcgtagaaatcttccagatctgataggatttacgagtttttttacacctcgaggatccgattcagttgatgcaaggcgggatccaatccctgctcacaaaccaataaaggtttaaaagtcacgaggctgtgtcagccgaattggttcccgacctgcaccaagcgaatccgagcccgatggtgagactctactatcataataatccctttagacagggatatgaagaaagagaagagagaaggagttctaggttttgtaatggggaaatgaggtttatgatatgtaataagaagaagaagggaccctatcaagcaggacaaccttagcctcttctgtaggtatttaatacaggtacgaccactcattttccgacacgtgttctcttgaaagagattttcgctttcacactgttttgatgatagaagatgaattctccgaccttaagattagatttttttttcttccttttttctctcttttgatgaaattacggaaaaagccatttcgttacgctcgtaaaccacgtgagcgtgatctgtacttttgtcacgtggacttcttctgcgtctcccactttttttactttcttatgtaaaagttatcctggttgttaatatttaattgttttatattttcttctaaaaagaggttattgtgaaaataatgtgtttgcctgcaaaaagataagaaaatatatgggtttaggtggtaatctcttatccttccggtaaaaaagatcatttaatatttaatcatcacaaaaataagaacaattagtgggattaaaatcacaaaattagttggattaaaataataacaagtaagttgtaagagagttattgccttaacattgaagaaaataaattaaaagaaaaaacaaaacacacacataataaagaaataaacagtagataagaaaatgggggaagagaataataaaattaacagctttacttgaaatgctccattattgaattaagtattacagtccgatttttttgatcaaaatgaataacctctactgctctttatctcggaatatttggaaaagattagaacagcggatattcagaagattgttattatattcgtgaacaataataatgcccaccaaattttcacgttgaaattcttcttgattaaaattatcaaagtgagaatatgattctatttctgtgataatagacaattgtgctcagtctatttcattgtatagattctagaccaacgtaatgtatgtgaatgtgttatggtattttgcagtcttttacgacgccgacagtttatggttcttcatcttaaaattgacaattcccattacattattttctgctacactttttgactatgcagcattacaaattccaatttttttcctaaaatgtcagaatatctcaaagtattattgcataactaaatttatatatgttgcatccgagaattttagaaaaagaagttccgtgaatatcgcaaacattaaggcaagaacatttgcaaaaaaagaaacaaattaaacatccagtagaactgcagaagtaatggggggtgtttaaggctgaagacaagaacattagcaaaaaaaaggtaaagattgactggttccatatgcattcatgtcatgcaaaaaaattgaatcatcacaattcacaagcataaaccttaatgaatttctgatagacaaaataacg

SEQ ID NO: 18035 - DNA, 613 bp, Arabidopsis thaliana landsberg
tggcactgatcattgttgtgtgtattcaggaattgtttgatagtctgatttgcgtaatttttcagtcattattgagagatctaactagtttgtttgatgttgcagtaccaaacatgtctgattcagaatggcaaacacatgttctggaatagaaacagattccatttaataaaagataaaaccattatcttaacatagaggtatcataagataaaccagaaacatagatagaacaaaagataaccaaagttgcaagaacaaactgaaatgagacgttaatttagcatctaactggatgatgatgcttcaaagctttataatccgcttactcttccttggtttctcaagggcagattccacatcataaccccaaatcattttcaaccactcggaacttttctggtatagaggttccgaagaagacggatctttatcgtaaatcctctggtttttctttaatttcttcttcaaactcttcatcttctctatgaagtcttcgtcataacagtgcttatgtattcatggacgacgaattcgtatgctccgttatatcatcaacaggattcttacctgttacagatttgaaatccaacataccttgtagcacaaggac

SEQ ID NO: 18036 - DNA, 609 bp, Arabidopsis thaliana landsberg
tccaggataaatttctaagataacaaactcttgtgagaacaagacatacagatcaaagacatatacgatcatttgaagaggatcttacaaagaaatgattctcggagactcattatcgacatagctgcagttaatatccttccaagggtattttactggagcacaagggtccccaagccagctcttcttcactccatacttggacaggaatggagttttgaagataaagatcaaagtcgagtgctttcgctaaattaccgtagttagcgtacatgaaaacgggttctgatcaagaagaagataaaatgaaggtttcttgtggtatttcctcactacctatatcatactgtaattcattaagaagaagttgaaggttacttgttgctcaagaaaactcaagaatctgtaacacttgcattaaacttgtagcgaggaatgtcaaatatagcagagagatatagaagcacaaaacaaagaattctatatataacaagaagtagtcattctctctcaaatcataataagctaatatctcacattgttgagttctaggttactcaccaactgtcaagatagattgaacagctacaccacatgcttcagcagaag

SEQ ID NO: 18037 - DNA, 1007 bp, Arabidopsis thaliana landsberg
agaaaatatacctgccaaaaaagcaataaatggcaagccaaaaagaaagaaagtacaagataatggtcatgaacacctttatttcaacagttaagcattgtttatgatcatcaacatgacctgaaagcagtggagattactaaaccaaaaaccatagactaaaatccaactcaatttgacttaccgaaaagacaacataaaagctcacatcagttttacttgctagacaagtataaaaatgaaacgacagagcttcatcaatagttgattacacagaattgatttaccatgggcgaaaagtgtcaaatcatccatgcgaagcacgaaactgcgttttgttttgctaaatttttggcataacacgatgacatttggcatcatgtactctcgacacttgtccacctctcaattacttcttaattatcactttcaatcaattctttaaaatcaaatttctaacgtctttgtgtttttgatgagttgaaagaggtaaccacaataggaattctaacgcaattttgattccttaattaataccataactgatagtaattattactcttgattttgcatacatatttgacctctgaactctaatctccttgattccttaattttgaatgctatatatattttctcctcatctttattttgtgtatttatattccagttccccataactctagcttcttatcattcgatctctatcaagatgttttaaaggtttgctctcaaactctattgattaatttcccttttctatgtcctggaaatcaaagtggttaaatcttcttagatttgtatgttattttgtttcatctcaattgcaaacgtatatgatgatgattcgtatttattcagtttctttcccattaggccataactattccataatgctcaagggcattgatggtgggaatcagagtttatacaatataaattcgttggaagaagagtcgaatatggatcttagagttaatgaacccccatattatcttaagtccatg

SEQ ID NO: 18038 - DNA, 2782 bp, Arabidopsis thaliana landsberg
acggacatttccaatatgggcttttgggcccatagtgatatgggtctccttccgatatctttgactgcgcgtgcctccaaaggttgctgtagagaacagaaagaggccttcgatcctggctttgtccagacaaaagctgcctcatctacctggaacttcggtcgaggtagtggtgaaggggggatatgtaatctcagacaactccacaggtgacaaaactagacgtaatcctaatggggacagggtcggagctagagatagctgcaaaggctggagagaagctaagagaagaaagaaaagcagtgagagtagtgtcattggtgagttgggagctgtttgatgaacaaagagaagaatacaaagaaagtgtgttaccttgagaggtttcagcaagagtgagcattgaagcagggtcgacctttgggtgggagaagatggttggctccaaaagaaaagccatcggcgtagacagttttggagcaagtgcaccagccaatgtgctctacaggaaatttggactcaccgtggatacggttattgcagccgctaaagacttttgttaagctaagctctcttttacacatcataaagacattttctacgttgttcaagtgtgcctttccacatacattacccggactcactcactagtcactataaatcaatatcgttatgtttttatcttacaataagtgaatttgaagaataaaatagagctttgatggatattactattatatatgcggtctagtagatgcgtgttgttattatattattccttgaagattactctttgcttttttgtaccccatggataaatgtgccttggtattaagttgcaaatttgatttaattaatccctaaacatgttactagttagagtttgcacgtgacgatcttgggcagcacctaaacatgtatttgtgtgcgtaattttgtaataagtaagtgcatcgagtttgatgaatcagtatttgaatgataattcgatgaaagtacatttgttgccataagaaccctaaagtaagatccataaggatgatgaaagcttcattaataataaaagtaaagttaatctacctataataactaaattaatcaagagtgaaactaaatctgtagaaaattaaatgtaagagatagagactagagtgattaattaagctttgactatcccttaaatcctcataatctcttcttgctctttgaccatcttcttcttctctgtgtgtgtgcattttcgagagaaaaagaaataaagaaggcccaaaaatagagaaacaaaaatcttttcaatttgatgatcttcccttattattcggagagcctataaacgctctcaccaaacaaaccaaaaccaaaaccaatccaagaaaaaaaagaaacctcaaagaagaagaagaagaagattctctctgtagaggtaaatatgaagcaaatgtcgcatcttgatgatattccttcgacgcctggcaagttcaagccctacttccaccgtacgcggtggcaatcctccgtcgccaagctcgccttttggtctctcgtcttcgttggtttgatcttcatcttcttctaccgatctcccgtttcctccaatcccgccgatccttctcgccgttctcttcgtacctactcctggggtggacccgcttgggagaaacgggtcagatcctccgcccgtctccgtacccgccgcggtttctctgttctcatcaccggagccgccggtttcgtcggtacccatgtctccgccgctctcaaacgccgcggagatggcgttctggggcttgacaacttcaacgattactacgatccatcgctcaagagagcaaggcaagcccttttggagagaagcggagtgtttgttgttgaaggagacatcaatgacgctgctctcttgaagaagctctttgaagttgttccctttacccacgttatgcatttggctgctcaagctggtgtcaggtacgccatggaaaatcctagctcttatgttcacagtaacatcgctggcttcgtcaatctccttgaggtttgcaaatctgccaatccccaacccgccattgtctgggcttcctctagctctgtctacgggctcaacaccaaagtccccttctctgagaaagacagaactgaccaaccagctagtctctacgctgcgaccaagaaagctggtgaagagattgcccacacttacaaccacatctacgggctctctctcaccggcttgaggtttttcacggtgtacgggccgtggggaagacctgacatggcttacttcttcttcaccagagacatcctcaaagggaaagctatttcgatcttcgaaggagccaatcacggaacagtggctagggatttcacatacatcgatgacatagtgaaaggatgtttgggggctctggacacggcggagaagagcacagggagtggtggcaagaagcggggagcggctcagctaagggtattcaacctggggaacacatctccggtgccggtgacggatcttgtgagtatattggagagattgttgaaagtgaaagccaagaggaacatgatgaagctgccgaggaatggtgatgtgcccttcacacatgctaatatcagttcggcacagagagagtttgggtacaaaccaagcacggatttgcagactggtctaaagaagtttgtgagatggtatcttggttactacaagcaggggggaaagaaagttgctgctgctgcttgaatattgataattcacaagattctttagtgtatagtgagtgagtggattgat

SEQ ID NO: 18039 - DNA, 410 bp, Arabidopsis thaliana landsberg
  unsure (1)..(410): unsure at all n locations
gaattggcgactttttcatctctattgcgcacaggtcagggcaggagaaatcaacaaaatgagggctcaataaagattttttactaatgaatgcggcccggtccgtctaaccgctaggctttgcggggcaggtttggactcacttttaaatctgcggtcgtctgcggtctgatccgtcgcggatcaatggaaagcgggcatgtcgtgatcagtccgatcggtcgcgggtaggcccgtcatctctaagtggacctgttgataaaagaaaacagaattgctgatttataaacaaagtctaacatcggaacttgtcatatgtaaaatnnnnnnnnnnnnnnnnnnnnnnnnnnnnnnnnnggtatatataccttcaatctttaattgattcattggagaccgatcaatattaa

SEQ ID NO: 18040 - DNA, 559 bp, Arabidopsis thaliana landsberg
  unsure (1)..(559): unsure at all n locations
actaccacatacnataataattgttgaattttcctaattttttattggcacatacatctaatatattttgacagttattggtaaggtaaaaccagatccagtttcaccgtaattcagcctatgctttgtgaatactcaatgtgcctctgtcaaatttctgaataattgaattgatatgcatgagtatttctttttggtttcaagacctttttctagcctgtgtgaattttaaagttgaaaaagtaaagctgcaatgagattatttctgtatttggctttcaagatctgagcaagacaaggaaccagaggcagaagctagttctgatgttgtgggtgatgggcccagtgaagaagctgttgctgacggtaagttgcttgtacctcaatgaattgttcttcatcaagtaataatgagaagtctgcttacattgttttttcttttatctacccgtactatcagcgcctcaagaaatagatgagtatgatcttatggattctggggacattttgacacctttggagaagtctgggttctgggacggagtggtgagttttgatg

SEQ ID NO: 18041 - DNA, 907 bp, Arabidopsis thaliana landsberg
cataggcctttgaaatcctctttaagtcgttcgagaactatattcttaacacatacaaaacaaaattttcacaggtaggcatcaaagctatcaccttacatactacaaagttttcattgtaggcttctagcattagttcattatcggcatgtgatgtcttggcttagactcactctactttcatctgcagtttctgatgttctatgcatgctcactagatcctgaaaattgtggtgtgagatttgccagtaagctgttggacatatatctctccagcaacacatgtcgacttactaggcgagtttaatcttgtccttcttggtaaagatttctctgcatgatatgaagctaatattgttctaatcaccacttgtgtattcttttgttttctctttatacttaacaggatgagtgcagtggcttatctagctagctatttgtctcgtggaaagtttttgcctgcttcttttgtggctagcatgttgaaaaggtacgtattgctaaaaaatggaaaatgtaattgtttgatctgatttaagtctcgctttgttgtaacatagtttctcttttgctgaaatcctagattggtggacgagtgtgcggaatattgcggaacatgcaatgatgatgtgaagccagaagcacatcaagtgttctattctggatgtcaggtatagtccaagtttaagaccatcttatggcttttgattccttaagaactcttctgtgaaatcattgacgtctctagttatcaatcattgttaatgttcacacccttaccagaagcttattggcgtttgggatcatatgctattatgtcatgtatcgcttaaagttgttacttttctatgactgtaggcaatcttgtatgtgctatgcttgcgaatgagatccatagcggagattc

SEQ ID NO: 18042 - DNA, 1535 bp, Arabidopsis thaliana landsberg
  unsure (1)..(1535): unsure at all n locations
attatgtccaatggtagaaatccttgaggaatccttaagaaactatattttgaaaattaaatttggtgtttgagttttgataacttgaaaagaaagatatagaagataanctatagaagtttttgtttcaaagctagcaagaggtgtctttttgatgtcttcttcgttgtgtttggtgtcttgattgcttgaaaagaaagatagagaagacaaagtacacaagtttttgatacattcttgattgcttgaaaagaaagatagaggttccaatgagaccacgatcgtacacaacgccaagtgtgtgtggtttaagaacaaacggaaccacattcataacccacattgggtatttgatcaacctgcagcaaaaccacttaatccagtgttcatatcaatgatgtttctgtattttccatagttaagaaactttaactttcatttcaatctcgtagatgtacattccataggaaagataagcatcccctatttccatccctttattaagaaatcccataattcaaacatttagaacaccaaaacttctagagatggcacaagagattgtgttaaatatagacagagagacttaggccatagttctaattccttacgcctataaccctcaaaaaattataaaacttgaggtcataatctcgtgcaaccaacgcaactaaattaaccatttccatgaccattaacctcaaacctaccaacaataaaaacgtctatagattcttaaataaattggccagagtttgtgtaaacctctgttacgaatttgatccacccattaatcactcttcgtcttcctcacgactttactcggtctttttttcttttctctgaggcatttcatcgaacaccttccattcattctcttcctctgtgttaacctcaacgaaatccttcaacggaagctcgtaacacgacttgggcatcttactaaccatcgacttggatcagagacgacgcgtgatgatgatgatcacaaatcgttcaatcgccctccggagttaacaagagaagagaagagaggaaaatcgatttgaaaaacaaaacacggcaaaagaaaaaaaaaagttttgtcaaaaaaacacaaccaatgattagttgccacgtatgcgcaccttaacaactgaaaaaactctaaaattaggtgcgatcccaagtttaaatcacattttagatttatttttttccaaaattacttaaggatttatgttaaaaactgttaaggatctcccaatggacttgctcttaatgtaaagattgatacgaaaacaggcccatacacactgatttggttcagcctgaagcagtcaaagttatggatggttatttacttattttggttaatttaccatagcaatgaaacagacacagtgacgacttgtatcctaagccttttaagtgtccaaaaatgaaactaaacttgtggactactcaactctgtcaaccctcctaaatttagcgtggtcttgcagctgtacgtacctcactcttcttcgcgcatgtcaaacatctttgtctttttt

SEQ ID NO: 18043 - DNA, 1494 bp, Arabidopsis thaliana landsberg
cttttagtgtaaacggaggcaattcagatgtgagtttgggaactaatgcttcttttttcatttttttctgtgagagagagagagagacgtgtatatataatcaaagttttttttttcttttttttttcttataatcaaagatttttatgtcgacgttaatgtattgctataaatagcgtttttcttttacaaaaatttaatgtgtatcgatcaaaaaaatgttttatatgtgtatatctttttactgatatctttcccattttgtattgtgtttcgttagttttattacactatgctttaaagtttataagactttagagtagtgtaaggaaatctaaatcaagaattgattcaataatccaaaaaatatgtgtgggaaatattattaccttatatcaatgtatatttttgttgatgaaaaaattgtatctgttgttaccttttttgcataaggtttacaataatatcttttgcatgaggttcctaagaaaatgtatctctaaccactcttttaaaagggagagatactatgtatgggctttggtatcacactcattctccttttgctattttcagtaatatggctcaaattgaccgagatataattatggaattaattttatacccttaaaccgaaccgaattacccgagtaccgattgacccgaaccgaatttaatttcggttcaattcaggagaatttttcaaaaaccgaattttctcaaaaccgattaacccgacccgaataacccgactctaccgaactcccagggctagtttacatccgtgaaaataccccaacccatatgattacgtaaattgctgatttactcatctaacactctaccacaaaccaatgtatgaacattcacgaactccatagcaagaattcgagaatcattggaggtggttcagtgtccctcttaccttcttctttgtcggcttccttctttgtaacaatgagggctctcagcagcttactctcatttctctcccccttcccccctcctccccccaaaaaaaaaatttcattcatatctatttatagggtcgagtcttactcgtccatcaactctgatttgcattttctcatcacactttcagtatcgttttttttcttgattatgcattagttattaattctttttcttttcatataccaacataacagtttataagttatcggcgttcatctcaggatttcatcttgtgcttaaacaattatttatatcttttaactgataattgaaaacacatgtaacaaaacgtcacaaggtatggtgactatctacttacccagttggtgattatttgtttaatgtgtgattttatcatatatttgctcgtgttagtttgttttcgtcatttcttttgatgctctatctagtttcactgagcttgtgattctattttttatgtatatatcttcatgtactttattttccaagcttgctatttgggtttcttggaaataaactatcttcttgtatctttct

SEQ ID NO: 18044 - DNA, 1193 bp, Arabidopsis thaliana landsberg
tattcaatcttacatgatttatgattaaagtactcaacgacgataataacaagaaaaaagtaagaattgcgttgatcaggaaatcaagatatccagcttgtggaggttttgattcacgatgcaattctcaccttctttcatgcctgaccatcactctcacttagatttgctttatgtttctttgtggtgtaaaaaagagtcatgcacttgtgatcttatataggaagaatcaaggataagagataaggatgtgagaatccaaatattattaatttcaacaaatatttgataagaaaaaaaatctaacaaaatcttaaaatccacacattctattttttctattaataccattaaaatttgttcgaatattgtttttgaaaactgaatgaataaaattaggttattctatttttatacctctatgtttatcttcatgttttccacttttgtggctagttttcactttcactttcactttctatgttttgtaaatttcatcttcatttaagagaatctcatccagaggttctaacaagggttatgaccaatcaaaaaataaaaatagatactaaattatgagtgagtttgagaaacctttctcaattgagagaccataaaaacgtatcttggcacatgccttattataattgtgtaaactgttcttttatactttaatctttataaataataatattatactacaataatatattttgagaaagtaatagcgtttatattgaagtgattctcttatacctctgtcaaaacctaaaagcttttatggccgtgttcggaaaaatataaacccgaactctttctttgtttgaatatctctcagcacctttatcttcttccatgtatatttcctgtcggccactagtctctgcttgcgtgccgttggtgtttggtcctcttaaagatatatatctaccgcttttattcctctttaatttgttacttggaattgtagctctttatctttccctctagacatatctcattttaacatcatccataaaagttatattctagaatgagttcgtaaagtaaaagaacttgttcatgatcaatctttagaactcttcaatttccattatgctttacttttatttggattgcgcctaagtgccaagacttatttatctagaaagcttaaaaaacttaaaatattataagatcaggtactttcttaa

SEQ ID NO: 18045 - DNA, 534 bp, Arabidopsis thaliana landsberg
gatggaggcctacgacgaggtcgctccgtctcacggcctcgtccaacgcgaaggccacgtagaattcggcccattgtaacaggccccgcaaggctgagcgcattacgggcccggtttgtgaaggcttttctgtaatgacagtttgtaaccctgctttattgaaatattccgaggatgacctaagcgcctgagggcacatgcgtccttaatccatgacgctgggcactcaggcacctataaatactcctgcatagtgcccttgagaggctagattaacagagcaatttccttcttgagctaaaaccttgtttgcgtccctttcactccccctgttggatcaacttgttcaggagagcaagttccaacaagggttgttcctctgtttaaaaaatggtttactgttttaggaggttttttgtgatttttattttacttttttatcgagtgtttttttgttaagtgtacactcgaaaaaggctttggacaacgacggtgcgaaggagacattgatcctggacttgcacgcagtagaag

SEQ ID NO: 18046 - DNA, 860 bp, Arabidopsis thaliana landsberg
tggtacagaggtcgggaactcttggaacatagagcacctcagaaagttttacccctagctgtatttcaaaacagccggggcgaccatgtactctgtaaagtggaaatatgtcatcaataaagatagatttcaaagatactcggttcgtttatgattgacttgcattcttacttaactcggggtgaccactatgccctacaaacggagcaatcgacttaagtcggcaacgacttaaggcggtgcaacatgctcacgcttacttaactcggggtgaccactatgccctacaaacggagcaatcgacttaagtcggcaacgacttaaggcggtgcaacatgctcacgcttacttaactcggggtgaccactatgccctacaaacggagcaatcgacttaagtcggcaacgacttaaggcggtgcaacatgctcacgcttacttaactcggggtgaccactatgccctacaaacggagcaatcgacttaagtcggcaacgacttaaggcggtgcaacatgctcacgcttacttaacccagggtgaccactataccctactaacggagctatcggctaaagtcagtggtggctcaagccggtgcagcttactcgcgcttacgcaactcaggggatgacttccatattccgaaaacaaacttcataatcatcatgcagcataccacaaatttgcaaattaataaattctatgatcatgtcattcgaatgataagccgattacccctaacaagtacttgatcatgctaaccgcgcgctcatagcacgcgaaatggttctcttatgttcaatgtctttcttaagaacgactgacgaagaagggcgatacgaagaattgggggcagcat

SEQ ID NO: 18047 - DNA, 679 bp, Arabidopsis thaliana landsberg
tttttttacagaaatatagactttttatatgtgaaatttaatttggattacttattctcaagtatatcttcagaatttaattcaacttcatatcaattgataatttggtatattcgaaaagtaagggacgagaagatattcaagaatgcgaatattttttgcttgtactttgtacatatatatctttctcgagtgaatgttaaactttaaataattataagaggcgggaacatctattaatgattgatttgttggcaaaatcatgactcatttagaaaaaaaactacacataaacaatgaagattctttttaaaaaaagatatgatatatagtagaacatctattaattaatattcgataaacctctttaaattaaccaattattttggttctgtgttgggactagtgtaaaaattgatacatatcgataaattaataagataataaatcatatgtaaacatattgtctcattaatatcataaattaacaattgtataaacttatcaatatatatatatatatatatatatatatatatatattaaaacatatatattttagtgaaacataactccagtattatttgctcctcttaaaattatattaattctttgtagagcccaattctaatatttatactacaacctacaaaagtttgtgttgttttctaaacttaac

SEQ ID NO: 18048 - DNA, 2129 bp, Arabidopsis thaliana landsberg
tccacgtgcttccttttagatgggtttccacgcaattcatcctttactttgtcatttcccttctttgcaaagtcaagaggcttgtgaaacgcctcagatagttttggtgaagaaatgctggacttgaattttccaaaaaatgtatcttgctcctccgtagaaccagattgctgctgctgtttttctccttcagtggttcctgtgcctgatgaacttgctgactctgcactctcctccttaccgagcttgaatgactccttgacctgaccacaaaagatacataaccaagttaacaaaaaaactataccacacttaacaactgaaaggacaacaacaacaaaagtgaaaaattccagcaagacctcttctgtagctgctgagaacttgtctttcacacttgaagagacctgcatcgtcaaagctgttttcttagggacaattcttagccttttacaatatacagagttaactagtcatactcaaaaaaaaaaagtgagttacagttaactaaaacaatttagttaccaaacaagaagagatatagcatacatcaggccaatgatttcagaaagaaaatcaaaaatgcaaaactagcaaggaagacacaacctagcttaaaaattctttgccttttcaaacattctcgaaaaagagagaaactcctaaacagatggtgccaccaattactaaagaatacctttttggccacagattcagcctccgtccagacgccttgaccttgtttatacaacttctcagtagtttgtttcgttctgcatttcccatttcatacataagcttacttttgacatacttagtatctctaactcataagtccctaaaatgcaattgcaaaatgtaaattacctaactttcaagtcctctttaacaccttgcaactcctctgctctttccttgaactccttcactgtcttttgaaattcaggattgctaacaacaccaatgtaaacaaaaaaggattaaactttcatgttccaacaccaatatttccattgaaaaaatgattttacctatcagcttctcctctaatcttcttcgagaactcactgaaaacactaaaccgtcgatgactcgcaaacccatttccctgaagaagacctagtcttgagcccactctttaataatcaaacacaaaatgaatcatccccatttttaagctcgtaatcacaatcaatagaaacacaacaccagaaacgaacccgttggtgcaccaattgctggagaagaggctgctttgtgatcagtaaatctcgaaccagctttctactcgccataacaaaaatcttcgtagtgaatttaaagaactaaatttgaagaaacagagaccctattagcgacactagaattagccgctgcgagaaagaatcagattgagattgaaaacatatctctcgtttactgaaataagaaagaaagttgaaatttttccttgagaaacaaaccaaacccagaagacagaagtttgccttaaactgttaaagccctagagaggtttctctcgataccatttagagacttgtttggatacacggatatgtatatttcgagagtgaatattggaaacgttgtcgttccagacagttatagtttgggccatttggctcgtatactgtaaatatttaggcccatatagtagtaacgaattgaactactaaggtagtaacgcccattaaggttcggttttacaagaaatgtaaatttaacataaattgtttatattttcctccataacaaaatatataaagagaaaagataactttcgaaaatagccagaactttgaattctctatacaagtgttagctatgtaaaagaatctaatacataagaagaaaaaggaagagagtgaaaattgagagagatttaaagaagaatcaaaatacgattttactttaaataatgcaaaatgaagcttgtctaaaattaaggaatcaacatctatgacaacataacaggaccagatgtgaagcttttttttaatccttgtgggcttctagctcgtccggttcatatctcctgtgaaacttatgtcctgcaaaaaagaaaaaaaagatctttatataaaaaaaacatgtggttttagaatccctgcaaaagtataagtgccgaa

SEQ ID NO: 18049 - DNA, 1731 bp, Arabidopsis thaliana landsberg
  unsure (1)..(1731): unsure at all n locations
aaaagtaatgtttacaacaaacttatttattaccgtacaaattatcaaaatctctatgttgaatatattctaacaatctcctaatatatatagtaaacaaatagtaagataatcaacgaactctttataaaaagaaaaaagataatcaatgaactgattaaaatagtcacaaaaagttcccgcgaaattactttattagcttctcttttaaaaacaaaatttagtcgtagaatttctgtcaattatttctttcgacgatatgcattacagaccctgcgtgattatttgaccttcacatcattcactatgtcaacgttattgaattttcagccaactcgataatgatatttggagactttttttcaaatgataatttgagactttgaatcgttattttgcaagtatccacctctttagattgaatcccaatctgaaccaggttcttacttagttctcttatagagggtgacatttttgttccaatatagttagagacaagctacatcttggttagtcaaatcataataatcaaaccaaaaaaaaaaaacttggttagtcaaatcctccattggagatggtcttattatgctcactttatttctgtgaatgataatcaaaagtcttcttctatattcactataaatatttcgaaacccttttactttgaattagacctcatagcaaatcaagaatattacctctaatggcttcccgcccttcagtgagacacccgagccacaaccatccattacgcggtcacaaagcccaagttgaagatgagatcatctgctctggttgcgacctagacctactcggtgcatatttcaagtgcacaaagtcagagtgtgattacttcttgcacaagtcatgtttcgatctcccacgtgagatccgtcacaagtctcaccctgatcaccctttgatcctcctctattccccacagaataataattcaacgtatacttgtgacgcatgcggtgagtatggatcggggttcacttacaattgttctatctgccagtacgatgttcatgttggatgtgtgtctgtgcctgagaccatgaagcatgatgagcacgttcacccgctcgctttgatctacaaggctccatgcccaaaggatcatatatttacctgtgatgtttgcgatgaaactatgccgcataatctgtggttgtactactgccagaaatgtgactacggtgctcatttacattcatgcgttgctgaagaagaggaaaagtcaaagaaaggaggaagaggaagaggaggagaaggaggaagtggtggaaatggagtgaacagaggaaggagctccgcgaattcagagctagctgcaatgttaaaggcacaaagagagatggagcagatgcaaattgctcttcacttggagatgcaaagagctaagattgataagaaatcaagaaagcatatgcttaaaatgatctaagatattaactctcggaatcttgaaacttataaaactctttcactttttgtttgtttttatttcttatctttaaccttttattattgttctctttatgatagatgggcctttnnttcgtgaattggtgcaagcttttatgtgattgttatctatgaagaatcttttaatatgaatctgaggttactcataactaggctaactggccatgttcaacanaagaggatacactttcaacatgtaaagtaaactaagcacaaaaaactcaagttgatgcttaacaa

SEQ ID NO: 18050 - DNA, 1333 bp, Arabidopsis thaliana landsberg
cggcctcaaccggcctagcgaccttgctttgacgggcgctctcattgaggcgagtgcaaccccactggggtttcatatgcggtcgccttgggaccggttgacggacgtctcgacctacgggccctctgggtccgaggaagatgacgatcccagcatctgttgggatttctctggacttggcaaccccagtgtcatgcgggacttcatgaccgcatgtaactactgcctctccgactgttccgacggaagccacagccttgacaatgagggctgcggcccaagccgcgaatgtttccacaatcgagctaggggatccctacgaaggcaaccatctcggcatgccggaggacggtgatcttcctaggccggtgcctcgcgccgacatcccgcgggagctagctgtggtccccgttccggcggggggtcacgacccacagctcgagcaagtacacggtgcgcaggccaggctcgacgggggagcaggagcgcttcagccgatccgccgggacgtcgggcaggtatgggcgggccaacccccgaccggagaaatacgtcacctaccccaaggtttccagcaccgtgtcgccaacgacgtcagggtcaggccgccacccgcattcaatggggttcgtcagaaacctgggggccgaacaatgctactccgagcgatgccggagccatccaccaccgaggggcggcgaatccagggtgaactcaagggtctcctggaaaacgcagcggtccgacgagccgagagctctgcctctcgaaggcaagcgtgcccctcagagcattgcgcaacgtcctcccgactcatgcgggaggcctcggtccgcaccgggcgcacatgggacgggacgcccgcagtcccggatcgcctcggcgacgagcaccaccgccgcgaccgtcgagcccacatcgacgagagggtgcgccgaggctaccaccccaggcgtgggggacgctacgacagcggggaggatcggagttgtgacaccccagtgtcacctagggtttctcttaaaaagccacaccaagagccattacttcctgtgaaccaaagtaagcatgagcatcaaaataacttaagtgacaaagaattcaccaagtatatgtttaaaagtgtcatgatcaaaacaattgagtccttgaaaagataagaatgtgcaaccctaattaagaactctaagtgaaccccatgaacagaagtcaagaaaataagcaaaagggaatgaaaagtttaaaattttgagttgagccaataatataagttaaagtatatttcataagccccaagatagattgagaaagcttagccaaaataattcaagaa

SEQ ID NO: 18051 - DNA, 844 bp, Arabidopsis thaliana landsberg
  unsure (1)..(844): unsure at all n locations
cagacaagcagacangttcctacatctgcaagaacagctgcccaaatcagcggatgaccagcaaatgccaatgcaagaatagctcctttcatagtgattgatatgaccacattctccaccactttccttttcgctctttttgcaagctttatcgcctgcggtattcttctgatatcattggacatcagaattatattaccagtctctgttgcaagtgcagagccggaaacacccattgagataccaatatccgctgtagctaaagctggtgcatcattcaacccgtcccctaccatagccgttggcccttcttctctctttaactgttttatgatttcagatttatcttctggaagaagctctgctctaacaatatccatagcatttcctagctgtgggttcatataacatttaagttttcattagtgtgatttactaagtttcaagagaagcatcacactcattaaaaaaaaaaaggattgctcacctgttcttgagcatgcattgcagcggcatgattatctccggtaagcattgcaatcttaattcccaacgatttcagttctttcatggcttgagctacaccagatctacaagcatctgagagattgaaaacaccagctagtgtttctccaacatatacatatccaattgtctttcctcctttagtatcaacatcaatatctggaactgtatacatgcaccaaagcaaagaaccatcagagactaaagaaagaccaaaaaccttaatgcataaattttgatatgtacctgataaacacccagctctagaagcaatccttttgttaccgatatagacttctttaccatcaatcttcccata

SEQ ID NO: 18052 - DNA, 643 bp, Arabidopsis thaliana landsberg
  unsure (1)..(643): unsure at all n locations
gaaatgtgtttattaacacaggacaagactacaacttgtgtaagccgtattggttatccttggaggatagtggtattaacgaagcataatctgcaaagtgtattgactnnnnnnnnnnnnnnnnnnnnnnnnnnnnnnnnnnnnnnnggtacatacattacatatgttacattccaaatcttgcagattgcagtggtaactgtttaaagctcaaaaaatggacttgatgatgaaagcttatagcatttagacacaaaaaaaaacttataattctattgagagaccatggagatttttaattggttgataaactttttgataccttaatactttcagtagaaatcgaattgatcataagggtgacaaatggaggtttcaaccataatacttaaagaggaaatacatgtatgttaattatatgtaaaataattcctaagatagaacacatttgtatgtttattcctagaatagaacacatcttttttttattactcagatgttttcagttcttgtgtaattacaattaacacccctaactagttattattatttaattcngttttaactaaaaattaaatgaaaaaacagtgattatacatgtcatcattctatgtcattaccataatccacgtcattaatcatc

SEQ ID NO: 18053 - DNA, 2885 bp, Arabidopsis thaliana landsberg
  unsure (1)..(2885): unsure at all n locations
attttgctgcaacatggtatcaaggatatataccatgtgggttttccatcagaaggagaagctctaatgatcttttttctctctgcttttagacaaccctctccaccttatggttttttgaagcttacatatgaagttgcaagtatttgtggtaatcttccattgggtctgcatgttttggggacgttattgcggggaaaaagtcaggctgaatggattgaagaactaccaaggttgaaagactgtcttgatggaagaattgagagtgtattgaaagttggctatgagagtttatatgagaaagaccaagctctttttctcctcattgcagtctacttcaattatgattatgttgattatgtgacatccatgctagaaaatactaacgtattggatgttagacttgggttgaaaaaactagctaatagatgtcttatacaaatagatatagaccataatcgcaaaagtagagtcgtaatgaaccggttgctacaagtaatggctcgagaagttatttccaaacaaaaaatttccaaacgaaagattctagaagatccccaggatatttgttatgttctagaagaggcaaaggtatgttttcttaatttaagggggtttgcattacttaccatgttattgtttgagcatattttctctggccactaacaagttgtttggaatatttgttagggtaaaggatcagctttaggattatcattggacgtagcagagatcaaagaattagtaataaacaaaaaggcttttaaaaaaatgtgcaatcttctcatcttaaaagtctttaatgggacggatccccgagaaagtaaattgcacgtaccagaggagatggagcttccatctagcataaggttactacattgggaggcatacccgagaaaatcttttagatttggtccagaaaatctcgtcacactcaacatggagtacagactgtacagtgagctcgagaagctatggaaaggaactcaggttagttacttacgtgtgttgatgggaaatgagatatttgatgttggcaatagtctaatagcacattttgttctgattttcacgttcagccacttgcaaatctcaaggagatgaacttgtgtgggtcatcttgtttgaaggaactcccagatctttcgaaagcagcaaatctggagagattggatgtggctgagtgcaatgctttggtagagcttccatcttcagttgcggatcttcacaaaatagttaacttacacatggaatcctgtgaaagtctagaagtcattccaactctcatcaacttggcatctcttaagattatcaacatacatgattgcccacgattgaaaagttttccagatgttcccaccagcctcgaggaacttgtgatagagaaaacaggggtacaagaattgcctgcatcatttaggcattgcactggtgttactactctttatatatgttccaatagaaatctcaagaccttctcagcacatctccctccaagtgtaacatatttagagctatgtgatagtggtatcaagacgattacagattgcatcaagggtcttcgtaatctaagacacctttatctatcacggtgcaaaagactcacgtcattgccagagctcccgtattcactccaacagctattagcagatgactgtatatcactggagagagttagcgaccctttaaacactccagatgcagagctccatttcacaaactgcatcaaattgagtcaacaagcacgaagagcgattatccaaggaacgtttgttcgcgggtgggctctcttacccgggagagaagtccctacggagttcgactactgtgccagaggaaattccttaacgattcttcgttctgctttcaacagatttaaggtctgcgtcgtgatgtcactaaaccatccctaccaaggatgcttagagtcaaaactactgtgtcgttgcaaagtcatcggcaactcagttaaatcgactgacatgacattcctatcagaaagtaacttcttgttcaaaacgagacatctattgatatttcacattagcttgccatttatcgacacttctgaagtgagcagaaagatagtgttcaagtttagcagcatagaaaaagatttcaacattgttgaatgtggcgtccagatactgacggacgtaacagacttaatgaacaatggccattgggttacacatgaatccgatgaagcatcnnnnnnnnnnnnnnnnnnnnnnnnnnnnnnnnnnnnnnnnnnnnnnnnnnnnnntggatctgacgatgatagtatctctgacgggagatacggatctgaatccgataaagcatctgataaagaagaggatggtagactcgggacatctgaatctgaatccgacgaagcatccgataaagaagagggatataaatctgaatctggagaggtgtcagaagatgaagatgaagatgaagatagtgccaacgacagtgactatgagtctgtatcaagatagcgtatgaggacgacgacgatgatcacaaatctcaagtggggaataaaaaaacgacgcggttgagaaaaaaacacaaaaatgaaaaggtttttataatgtttttttttctctacattatgaaatgacaatatatgttcctattttagattatctgagttttgtgagcttagacttgtattgttttgtggtaaagattattcaaaaatctatttctggaaactgctagagctataacataaactgcttcggttcatttttcctttcttttatttctttcgctttacttacttgctatatatatatttgagtatatacttgttcgtaaggatgatgggtggtcttggttacctctatgtgtgcattgcttttattaggaattaagatagctccttgatg

SEQ ID NO: 18054 - DNA, 566 bp, Arabidopsis thaliana landsberg
  unsure (1)..(566): unsure at all n locations
ctgagaaaaattngttacgaaaacaaatttggcgggaatttttttttttggcgggaaaaaatttggcgggtttttttttggcgggaattttttttttggcgggaaaaagtttggcggaaatttttttttggcgggaaaaaataaattttgacggcaaaagattggctggaaaatttcagttttcaattatatgttcctattggatgagggtaatttggtcattttgttcaagggaaggggtgattttaaaaatggacaacataaaagggtattgttgcaaaaaagtagtaaaaaaatggtagttttgcaaatctccctaacttatttcccgcaaattttcgttatattatttagttaacttatagtccccgtaaatttaaataacttatatggtatgtcattatgtacataatttatttacttaattaatttcacttatcacattgactaaagtgaccaatttggttaatattctcttatcaatgactatttccaggacacacaatctagattaggaaaatagtaaaatacttaaagtttgggttcaaagtaaaatattattagcc

SEQ ID NO: 18055 - DNA, 639 bp, Arabidopsis thaliana landsberg
gatctcaacaacgtttggttgtccaaacaaatgctgcattatctgaatctctgtcttcacatcttctctaccctgctcactaattagcttcctcttgagaatcgatttgcaagcgtaattgttcccagtcgaaatctctttacacatatacgtaatccctaaaccacctcgacctaattctttccccaagctgtaaaatttcctgatgtcttcgaagggtttacctaaaatccctaatgctttccccttacctaaaattgtctctggatatcgaactgagatgggtgtcgatggagttgggacttgatcaacgatatgggtttggagtggattgatcggaattgttctttcgccgccgtcgttttgagttttccggtgtttactgctgaagcacccattagtaaaggaggagacttttcgttcttcttggattgaagaagtagaagaagataagctttgaggaatttgattgagaacacatttgtggtggctgtatacgtttgactggaactggaattggaattacagtctcacaagcctacggtctttgcaaatgtaattgaatatgatggattggaattgtcggaaagtttgaatttgagctgatctggatacggaataatataggaggcctcagat

SEQ ID NO: 18056 - DNA, 1026 bp, Arabidopsis thaliana landsberg
  unsure (1)..(1026): unsure at all n locations
gaggaggtaggaagatcgatttttaatagccctggtcgctttccgcaagaggaggggggggaagcgccatgttgcccttggaggcgccgaacatggtgtctctagtgagctgctaacgggtaatccgagtggacgctcgtgccccatttgttaggggtcggctagtggcccggagcgcgctccaaaagtacctgcgggtgatttgccggacccggtcaccttttgacggggtccgagggctcaatgcctccctctgatgggattccgttacaaaatcgttcccgttggtctcgaaaatgtcctagggtacctcgggagcgtagtcgagccttggttatgtatcgaacgtacccaaggtcatccctcgctctgcgtctgaggcggctgttgaacccttcgagggccacctacgaacccctgatcagtagtgcgcgcggagccgaagtggcctgaggcggccgttgaaccctccgaaggccggccatcgaacctctaaccagtagtgggtgtggagcccatgtgctctgaggcggctgttgaacccctccgaggggccagccttcgaacctctgatcagtagggaggctcggagcctatttccttcacggagaagggtccttttcggggtatccacctttcccggtccctgttgagagagagagagaaagaggaaaagggaaaggacacgaaatcgaatgacgcggcgtacctctttcgacgcggtcattatggcgaaggcgaacggtcccttgcttctcccgcctgagacgccgcctgtcccgccgcgaagttaatgcgacgaggcgagcggttcgcggggcggccgttgcgcgtgcggnaaccgttcgaggaacggatcacgggcgcgtcgtcttcacgccgtgggagagggcttcccgttgccctggatgggacgtgagcttggctggcaacgtgaccgctgctgctgcctgcctgtcaccgccattactgccgacccatttttgaccgcgtttgacagtcgcgcttggctggtactgcagggtt

SEQ ID NO: 18057 - DNA, 1800 bp, Arabidopsis thaliana landsberg
aaaacgacagcgatttttaaccgccgcagcggtttatgtaatgtataatatgtacacacttcatttacacacgagacgagatcattcatggaggaatcggtttcatattacggattctcatatacgtcaaaaactgcgaaggcaattctgctagaagcgcttgtaccactgagatctctccatctacaaaacccacacacaacacattaaaactcaccaaaccaagaactagcgttctcatgcgtttccctaaagttttactctaagaatcaaataaaactcacattggacatctcgtagtgccacaaactgaacaatgtctcgtgaagccaatcgcccgctcgaactctccaatctttctcctttatctgcgtctagtatctaaaaacccccaccaaaacaaaaaaaaagtacagtttacacaagatcatatgtagttgtaaatcttaaatgtcttattttttatttgttacctccatctctttaaaatcagctcctccaactcctacaatgaggattgataagggcaaatccgatgcactgactaatgcgtcttttgtttcttgaagatcagttataacaccatcctgaaacaagagtttatgatttatgtaaacaatgtttgatttgttattttatgtgatcttggcttttctttttatatatatactcactgttatgatcagtaagacgtaatatttccgtgaaccttgagctagcgacgcgctggcgatcattgcagcagcgttgatcactggaccaaaaagggtaggccctgcaagagagacgttgaaaagggcactggtgtatgaagtcatgattccttgaatcccatccacctgagagagagagagagaaaaaaaagatacttttgatgtgtcaatccaaaaacatcaaaatttagtcttaaagaccagcgagtcgagtttgtttacctcagagtatgaactgcttccatttagattaaagcaatgtgaaactggagcgtcgattggacgagctccgaatccccaggcagggaaacgtttgtctgagtcataaaactgcaacacttctccaacatccattattgcctgagttaaaagaagagatcatgaaggtttgttagtcacagtcgatgctagttacaagaaaatggaataacactgagtcctcactctctggtaggcatttaatcgtccagaaggatcaatgtagtgcaaagaatcagggaggcggggatttccatttgaagctgaaggacaaaagaaatgtagagatgtttagattatatcctttttgcatgatgtatacgtaacaacaacattacatacccaatcaaagtttttaggattttccacagtggtgcaatacatacctgtgaaatcgattgctaccataaagtttaactcaaatccagatgccaagtactctaggaatgtgtggtggacagtctcggtaaacttgtccacaaaaagttggctctttaacacctaaaatgaccataaatggtattagatagcttattgaaaaaggcatgaaaatgttaggagaccttttcgtattggtttataccttgttttgtccagcaccagtaggcaaagaaaaattgattccttggcccgccaaatgaagtttttctaagtctgaaagcgatttctgaactttcctgaccacccaaaataaacgagtaattatgtcagctaacagctaaagtcactccaaaaataagatggactgagctctaagctgttgattacccaatcagactgtgtttgccattggagttaaagtctgagcattctattatcactggactgt

SEQ ID NO: 18058 - DNA, 752 bp, Arabidopsis thaliana landsberg
caaacacttttaaaccctttaaaaaacttgtgtaaatcttttaaatccctttaaaatcccttgtaaatattttaaaacccttttaaaatctcttgtaaatcttttaaaacatttttaaaatcccttgtaaatattttaaaatccttttaaaataattttaaaccctttaaaataattttaaaccctttaaaatctcttgtaaatcttttaaaacccttttaaaatctcttataaatctgttaaaaactttttaaaatctcttgcaaatcttttaaaatcctttttaaaatcccttgtaaatattttaaaatcttttgtaaatcttttaaaacccttttaaaatcccttgtaaatcttttaaaacccttttaaaatcccttgtaaatcttttaaacccttgtcaatcttttaaaacacttttaaaatccctagtaaatctatttcccgccaaaaaaaaaaatttgcgggaaaaatctttttgaaaaaaaaattttggcgggaaacttttttttcgaaaaagttttgcgggaaaattttgcggtaaaagtttggcgggaaatttattttggaatattttagtcgaaaaattattaatatttcattttgttaacctaaaataattttcaaataggggtaaaatggtcattaaaaatttaaagagattagaaatgaaaatggataaaacaaaaggggaaaaatccctaaaaaaaactaaaattaatttttatttgaaagtttaatacccaatattt

SEQ ID NO: 18059 - DNA, 743 bp, Arabidopsis thaliana landsberg
tcgaagcggttaatgaaacgaagccagcttggaattggaccgtcagtgatgtccttggcacgaacaaagattggagaaacgaaggagccgtaacacctgttaaatcccaaggagaatgtggtaagcttgtcatctttatatataatctgtctctacatgtatgaaatttggaagcaatgtaatgtatgaaacggctggataattacactccgtatttagaaaacttattcctcacgtaacctataaatatatatgagcaggaggttgttgggcattctcagcgatagcagcggtggaaggtctgacaaagattgcccgtggaaacctcatatcactatccgaacaacaacttctagattgcaccagagagcagaacaatggttgcaagggaggaacatttgtaaatgctttcaactacataattaaacaccgaggcatttcttcagaaaacgaatacccttaccaagtgaaagagggcccatgccggtccaacgctagagccgccatactaatcagagggttcgaaaacgttccaagcaacaacgagcgtgcgttactcgaaaccgtgtcaagacaacctgtcgcagtggccattgatgccagtgaggccggtttcgttcattactctgggggagtgtacaatgcgcggaactgtgggactagcgtaaatcatgcagtgacgctcgttggctacggcacgagccccgaaaggatgaaatactggttggcttagaactcttggg

SEQ ID NO: 18060 - DNA, 340 bp, Arabidopsis thaliana landsberg
aaacctgcaccattggttactttttgtgaatatgcagggtatataggcgtattaactatttaatattgactaaaaagcggttaatttggcccaaaaaaaaacataacaaaaacagctaagatgtacaaatctgatattatactaaaaccgaaccaagatttacttatagagcaatgatttcatactttcattaattagaaaatcaaaaatcaaaattgaaccgaactgaaccaattttagtgtatctaaactaaacataatcatattatattttaaaaacttttaatattgtatttttttttttcagcacttttaatattggatttataggaaaaatatt

SEQ ID NO: 18061 - DNA, 1866 bp, Arabidopsis thaliana landsberg
ttcctcgcaaattttgcgacgaattagcacgttctcctattggctcgcaaagtcctcgcaattctgtagcaaatttgcaaggtaccttttccatcccatatgttcctcgcaaatcgcttgttttcttttagtgaaaaggattttaaaagaattttaaagtgttgaaaaagttactgtaaggttaacactttaactgttagtaattgggcctagacctcttattttcgaaaaaacgaaccgttttagtaaaaattcattaaagcccaaaattcactaaaaagcaaaaaaaaaaaaaaaaggaaactgtgaaagtaacaaaaagtaaaaaaacaaaattaagtgaaactgtcgtctctctcactgtgtcttcttccttagaaaaatttgaagaaattctgtttctttagcaaaagaatcaattgaaggtaacaaatttgtgatactaaattttgatatttgggtttgttcgattttatttatttttgtcgcatctcttctatgttatagcaatatctagggtttttagttcgcaatgtcctcacaattttgcgagagatatatttgcaggttgaagtgaaatcaatagttggtgttaatcctcatgaatatgaccacttggtttcaaaaaagaatcctaaagattaggatttgttacatatttttgatcttctgatcaaagggtataaaatgagcaagaaagattggagtgagtgatggattgaagtggaacaagtacatgaaagtagaatagatcaggtaatgaaacctgcaattgaaacacttgtgtatcacataagaaaaaggaaatcaatatcctttggtgagaaaatagggctggtctatgaaaactatgaagttcttaggtacaaagtttgaaggatggccgacaatatcggggtcgaaagagtttctacttgttctaatagagaagtggaagaagaaaattttgcgagagatatattccttgcaaattttgcgacgaattagtgacgttctcctatctgctctcaaagtcctcgcaattcattagcaaatttgcgagggaccttttcgatcgcaaatgtgtctcgcaaatcgcttgttttcttgtagtaaaaaggtttttaaaagaattttaaatcgttgaaaaagttactgtaatgttaacacgtaaactgttagtaattgggcctagacctcttatttttgaaaaaacaaaccgttttagtataatttcacaccaaaaattaactaaaaaccgaacaaaaaaaaaaaaggaaaccgtgaaagtaacagaaagtaaaaaaaaaaactttttagagaaattgtcgtctctctcaccttgtcttcttccttagaacaatttgaaaaaaaaaaaaatctccagcaaaggaatcaattgaaggtaacaaatatatgatactaaattttgatatttgggttagttcgattttatttctttttgtcgaatctcttctctattataggaatatctagggttttcggttcgcaaattcttcgcaagtacctagcaattttgcgagggatatatttgaaaaattaaatgaaaccaatagttggtgttaattctcatgaatatgaccacttggtttcacaaaagaatcttaaagacaaggaactgttacatgtttttgatcttgtgatcaaagggtatataatgagcaagaaggattggagacatggatggattcaagtggaacaagtacatgaaggtagaattgattatgtaatgaaacctgcaattgaaacacttatgtatcgcagcagaaaaaggaaattaatgtcctttggtaaaaaaataaaacttgtctatgaaaaatgtgaagttcttaggtacaaagttggaaggatagaggaatagtaggc

SEQ ID NO: 18062 - DNA, 746 bp, Arabidopsis thaliana landsberg
gggggaatcctgaaggtttctctacaacaggcttttaagtagtttagatttggtatgtttgattcttgcacaagcctgtctcttccaactacttcatccaactccttcagagcttttctaagaatctccgggttctttaacatttccccaagtgtccactccatgttatttgccggattatcaatcgctgctatacaaaattcctgtgacaaaacatcacatgatcatcttatttagtgtacacgtctatttttgtatatatatatatatatatatatatatatacatatatgcatacactcttttataaaagtaatattttacttactacgcattgagctttgatttcgtctggtgtgaccaagtactttccgttttgatcttttagggtaatgaacgtatcaagccaatcttcaacagcagccttaccacctttttccctccacaactggaccctctcgtcgattatgggattgttgtaactacgaacaatgttacagttctctgtcaccctcttctcttgaccatcaacattccaacctctcaaccatcgttccacgtaatccgctggactaaaactcggtaaacagttaagagtgttgaaaatcacctcaagatgatgtttttcggcgtttcctagtcttccatcatcagaaaacacgttttctttcgtaacatgtctccttccaaacaacattcgcatggtcactgcgtaaccataaaccctcgagagctctctaacatcg

SEQ ID NO: 18063 - DNA, 1673 bp, Arabidopsis thaliana landsberg
aggaacgtgttctcgtaccaatgcccctacatatgatgacagtttaactgaccctttactaataggctctccaatgttagtgaactctactcttactctagtatttggatccttggaaatatccttcagcctagttggtcctcgctgtctcttacgctgaggctcaacacgatcatatccttcagataattcaagctctccttcaggctcttcctcgttagggtctttatcagggatttggacttcattctttgcatcaaccaaatgatctggatcttttacttgaagtttagctcgtgctacatgtttcgacctcatcgttgatttctggttcaactgtacgaatatactcgacctcttcattggcatgcttagcttccttcgttttattacatccgcctcgctttttcttttgttgtcccattttaaatcacctgagaaaaataaaagaagaaatagttaagtatatacaatggaaattaaatcacatatcaaacacactttggaaatcaaacatcaaacacagaaggaatgaaaatgatcaaaaagatacatttcaaacataaatccctttacaattaattctctcattctcttcttcatccaagtcaacatcgttgtcaatatttggtggcaatgtgccaatgtgccaatgtctgcaacagaatcttgaaactctttctgactgaatcttcttaaaggaccactaattgcaacataccgaggtgatgtatcatcttcccttaaataaaacacttgttttgcttgagaggctagtatgtacggatccctttaaaaggaggcttgactatgattcaggtttacaagtgtaaatccatcttcttgctttactccattaccttctactgcgtagtggcagcggaataaaggaacgtaaaatacataatagtcaagcaagataatgtcagttatgcagccatagtatgatacaaaatccaccacttgagaagtgtcttttgcactagacctacaggttgcagttgtaatgtagcagttagaagagtaaaagacaagatacttaaagaattgcagaaccttaagaaacttgtcaaaagatcttgtttgaatgatgtattcgaacaagagtttgagaaagcaattctcttttattaatcaaaaaccaaagaacaataaagctgcaagtcccctacttatactacttgtgcattaagctaaaaccctaagacaatatcggtaaagtaaaacccagaaaagaaaataaattaataacgaaaagcccaacataaaaaccaaattaaaactctggatgtagcccatgaagatgtgtagacctacaaattgcagttgcctcacagaaaacaccactattctgagtttttttatccactgatattgtatgaaatcgttgccattcactatataactagtatatgaccttgtgcaactacgtggaccatatgctaaccatttaagtgtctcttcatgtctatttgaatcaagacgtatttaacaaaattaaatagaaaatgtcatacacttatataatatacataaagtgtagagttcaagtaagagataagaatgcctgttttttaagccatgatgcaaaattctgagtgcgcatactccataaataagatgcatcacgtctgaatcttacatttgagtcttgtagatgctacatgtgctcc

SEQ ID NO: 18064 - DNA, 607 bp, Arabidopsis thaliana landsberg
aatacttttcatactctttttttttcctcaactttttttttagtcgggtttttcctcaactttgaacatactcaaaattttcaattcaaagttgtataccattcaagcccattattcaaaattttgtgagactaatactattcaatcgggtctatgggcctcagaaaataataaatgggccttaaatacttggaaacaatggatagatcgatctcaactttaaaatgcgtccaaaaatataaacaaacaaacatctctcgccgtcaggttacatctatcgccaccgcaaagagaccaccgtctcctccgcaatcttcataacctaaacaaccctcatcccctggtaagctcaattctctaatcaattcaatctcctgagatgtcgatctgtttctactcaagttcaatctcacgaatcccttctttgttctgtaaattaaggtttcacgatttgcgcgtctagggattcaagatccctaatatctgatcatctagtaatcgtgaaagtattgactcttgttcttttgatttgagtttagcaattattgagattccttttgaagtagaataccttttctcaatcattataaaaacattaggtttttat

SEQ ID NO: 18065 - DNA, 495 bp, Arabidopsis thaliana landsberg
gctatatacttatgcatgcctacttgttctgctgtattcattcatcctcgaggaaaatgaaaagcttgtgttgacaccattcgagaagaaccttgatatctggagacaactttggcgagtgcttgaacgtagtgatttggtatgtctgttttccaggatttcttttttcgtctcttagagctcattttgcatggtttagttaattttttaatatgattggctatttttttctctttcagattgttatggttgttgatgctagagatcctctgttttaccgctgccctgatcttgaggtaactctatctctgccaacttgctgatatctcttaattgaaccttcctgatccatatcaaacattaacgtggagatttgttctgaaacaggcatatgcacaagaaattgatgagcataaaaaaacaatgcttctggtcaacaaggcagatctgttaccttcttatgtcaggtaaacatgttgccttgcttcttttcct

SEQ ID NO: 18066 - DNA, 1464 bp, Arabidopsis thaliana landsberg
  unsure (1)..(1464): unsure at all n locations
caggtatgctgtctttggaaacacccngccgngggagncatgcttttagacccccatcagtagtattaagtttgtgtggaaaaaaaggtcgtgtttggaatcttcctatataacctaagtagttagagataaagtgatcaattatggagtctgtgttaatgtgcaggaaatgagatcccctagaaccttggaggtttggaagctaggcactgtcaactatttgaaatcccttaaactgcaggagaaattagtttcagagagaaaagctcatcagattccagataccctcctctcgcttcagcatccaccaacttatacgctcggaaagcgtagaaccgatcacaatctacttatccctgaatctgaacttacaaaaatcggagctgaacttgattatactcaaagaggaggagacatcaccttccatggccctcatcaagccatcttatatcccatcattaccttacgcagcattggttttggtgctaggaactacgtggagacattggagcggacaatgatcgagtttgcttcgatttatggcgtgaaagctcgagcaggaaacaaatgtgagactggggtttgggttggggataggaagatcggtgctattggggttaggatatcttctggaatcactagtcatggtttggccttaaatatagatcctgatatgaagtactttgagcacattgtgccttgtgggattgctgataaagaagttacatctttgcgaagagagacggatactctgcttccttcagaagaagtgattcatgaacagttggtttcttgtttagccaaagcgttttcttatgatgatgttgtctggaaggaagatccttcactcattttggacacccaagataaagaataatccggtttgatccggttttgatttattgtctacaaaaaatgttattattttttgacgtgatgtggatttctgatattgtcttattcattctcaaattttcattaaaatcagtcatatgaaagtatttctaaggaaaacatttatgctctttaccaagcctgcaagcaccatcagctttgacagtccaattacatagataacatacatcttgatctctgaaagcatcaaatatctcaaactgtttgaattgcttttcctatttaacaaaatgagttgggtcaacccatgaagcctaaactcattggtaatgagttgtgttgaattgggttaaccattttgacatccttagtgagaagagtatgcaacaacaaaccttaagagagaaaaccagtgaagataacgaatcattctcggtttactcccgctttgtgtctaccaaaatatgtttgtttcttactctaagcattccgatgtcaatgagtatctttaagaaacagatctttaaatagtaagaaatgcataaatattctgtttattgatttatngcatcngatatatatatatctatatatatatatatcttcatc

SEQ ID NO: 18067 - DNA, 3690 bp, Arabidopsis thaliana landsberg
  unsure (1)..(3690): unsure at all n locations
gttttagagtctatttgttatttttagagtattttctagttcttttacaggtctttacatgtttgggattcatttggagataatagagcattcagaaggaaaacagagaactaatgctgcagaagaaatccgaagactaaaaatcgcgtaggtgtcgaacgacaccatccctggtgtcgagcgacaccaatacctgacggcaattcgaagacgcaacgtattgaagttttgaagatttccaaattcgccccagaactttcccttatttctaaagaaggcccatcacgttttacgtcagcttcatgcacctttgattcattaaccttcagagttgttttcttccatctccgccccttacccgtttatgaggtggtcgatggatatcattggaccattgcataagtcaactcggggtgtgcaatatcttttggttttgacggattacttctcaaagtggattaaagctgaagcttacgttaatattaaggattcggctatgaaaactttcatatgcaagaatatcatatgtcgacatagtgtcccatacgagatagtcaccgacaacgaaccacagttcatttcgcacgaattcgaggccttttgtttggattagggaattaaaagttagttactccactctgcattatccgcaaggaaatggacaagccaaagctgcaaacaagacaattatgagcaatcttaagaaacacttgaatcatttaaaagaaggatggtacgatgagctccaacccgttttgtaggcttaccgcacgactcctaggtggtctactggggatcgagactcaattttcattggtgtacgggatagaggcagttgtaccagccgagctcaatgtaccaggacttcgtcgaatggaagctcctttaaatgaaaacgagaattctgcaatgctcgacgattcgctggataccatcaacgagaggcgagatcaggccttgatccgaattcagaattatcaacatgcagcagcacggtattacaattcaaaagtcaaaagcagacctttctttgtgttcgataacaagaaagaggaaggagcagacaaacttggcattaattggtaaggtccttatattgttaccgaagtggtccgaaatggtgtttacagattgaaagatttagaggacagaccagtctaacgtccttggaatgtggtgaacttgaagaaattttatgttttaaaaaaaaacgcattttttgtacatgaactacggtggggcttgatcccgaaatgggtacgtaggcagctcggaaacgagttcaactattaataaaatttattttattcatgttgaaaaagagttcgattatacgaacgaatgaaaacagggagttcgactatgcgaacatacaaagcaggaagcaaagctaaatttattcaaaaagaaaaacaaagaaaagatgttgaagtcttagacacacttcgaactaggaaatcctcctcgtcttgtaaaacacctcgaccccttgactggcgatgtcaagaatgggcatcatacaatccgggatgcaggcaaattctgcgattccgagttcgatccagtctccggggtgagagttgagggtgtgtaactcccttaatatcacggtgactctccgcagcatttggttgatcttctttcgaagtttcttcttttccgttgatcgtttttttgttgagccgcgagagctttgataaaggacatcgcgatgtcctgatctctgctcgaaaggtccttgattaacgcacacggagctcggatctgggatctgaagttgcgaagtggggagcgtcctctgtctggtacgttcggaatgtcctcctcgataatcccaatcctcgaaaagtttggcatggattccgagcatcggaggttgaaggccataagcgcgaaagaaaagaacggtattgttagtgaggaatgaagaaaaccctagagaggaaatctatagggaggtttcttagctttcaaagatgcgattctatgtaaagccggagtgattcgcggaagattcacgtcgccttgttcgccctacattcaaagagtatctccaaaacaaaaatttgatgaatcaaggaaaattagaaagttctcttaaatagatgggccgaagcccagtagttaggtccatgcgaaaataaaaaagagggtttttagtctcgggaacatttagggaaggggctcaggaacaggctccttcatcgccggttcggggttcaaagtggacgcttcgtttttgtcgtccacgtcgggttcacttcacgcgcttccaggggttactgtcttcctcctaatcttcaccgtcttcattgtcagacgggatcacttgaaccggagcgtttacaggaccggggacttggcctcgagcacggaggtacatccagagcatgtgcgggatcttcgccacgcagtcaaagttcctccactcccactgaaaagggtcgctctccatggcccttatcttcctctcgatgcgagcaattcgggcctcaagcgtttaggcnnnnnnnnnnnnnnnnnnnnnnnnnnnnnnnncttgtcgacgacctaaagtatggactggttagaaaacaagtagaactcgttccgaaaaagaaaacaagagagactttaccttgtccataaagtcgtacgcctctttcttttccttcgaaggaaagtggaaacaagcgtgtggaaagaggacgccggcgggctcgaagccatcgacagacaaaaacaagggactcccggggtcgaggggacagacggtgcaggctctttcgcgtttcattctataggtgttgttcaagtaaatttctgcgatcatgtttttcgagagttgagaaagtttatgctcttatttatagtgatttagggtttcactcaaaaccacaaagttaataattgtggtgtgtccgaatgagtttatccatttttgggaatcgaggaaaagtcaattattgccttagaagcgtgacacttttccagatttccaaggacaaaaaggcaactgttgaatttaagataagggggccattaaatgcggagtaaatagtaaaggctcagagcccgcgaaataaatcgaactgactaaacccgagtcggggagttcgcggattcgagtccacatttttagggataggtctgatcaacctacaaatcccgtaactttaccacatggttaaacaaaaacgctatttaaaaagatggactttgcaaatccatactcaaaattaacacaaagaaaacccttttgggatcatagttttaaaggaaaggtttaaaagccttcttaggcaaagtatttgtttaaagcctacttagacaataagtaattcaaaaaccaataataaagtttgagtttaagagacaatccccattaagtggacacagccactacgagttctcgggcatcacgggttcgatttgaactgactcgggatctgcggcagttgtttcagtctcatccggctcgccagtagcaggctgctcgctaggaaccacggagtctgagccatcatcgtcctcgatgaccactgtctccgagtttgtggatggaggaatttcaggcggagtgattaccgcctccagaattggcgccggcgcgataggcacttcgggttcaacggaatcgctaacacctaaggcaattatctcggactaacacaagcctaattcgctgtggatcggttttttttgaaaaaa

SEQ ID NO: 18068 - DNA, 1238 bp, Arabidopsis thaliana landsberg
cgtcgttctttgaagatgaggaagtagaaggtgagtattactctagctccctggaatgatacatctctgcttctggcaacggatacactagatagtaaaatagggaatattgcttccacctatggttacaaattctcatcgttttggatagacttgtttataacaaccttaatatgacctacgtttaagaatctgcaagtgttcttgagatagtttgtccaaagccaataacacaatttgcatcacttacttctctctctttgttttcaatcaaattcagaaagggaagattccatgctacggaaactaaaaccaagctttatacagttcaaatgtttggccactaaatagagcactttgtgattacagtgatatattctggtccgtacataaatatagcaatacaaatactttatttcattagtactttaacaccttacacactttagcaatactatttgaaaacctctcgggtctagaaaaggactcaccaaggtttctattttctgcgttatactatttcaaactatgtatacacatatatcaaaagaaaacagatagaggaacacaccaagtcttgtgacttccctgcaagatatctcaagcagcagaaggagcaggaaagtaggtcatttctggttcaagaacggaagctaagatgcttgattttgtaacggtttcttccgcatctgcagggattttcgatttgaaatcgagagattcgtcattatagacatcccaccatttatcaactaacatcttgatgtcttctctgtccatgttagcttcttctcctgtgtacctccatggcttggatccctatcaacatgaaaaataatcaaatttcagcaacaagcttaaggggctcgggtttgaaagcaaagacagaactacttacagctgcacagtagtgaacaactttgactttctccagctccacgttctccgggtgacgccagagcatagccaaaaccagattgtataccaaagggatgggtttgtacactttctcaaagaacatattgagaaaatcctgtccaatcaaagttacaaaatccaaaagtttattaaaatcaggtcttgatttggactttggagcatttcaaaaccaatgaactgatatattactcacttgttctgcaaacggcgcaggtggcgtgatctccagggtctgaaggagaatatcataaatcaaaggactaggctcaaacacaaacataccggcgttgaaatacaga

SEQ ID NO: 18069 - DNA, 3067 bp, Arabidopsis thaliana landsberg
gattatcatggattagagttaggatgagtaagaacgctttatgagactgattatgtgttaactatggtgtttgttgtagacattggatctgctagatctttgcgaacaagctggttctgcataagccgtaacgatcaaccttgcaatgccacgttgcaaagagggggatgttttgtatgaaatctatctatatatgtaagacctaccgtaagagcgtaagcttttgggatttagttaagagtcggattcaaatgtatgtttactaagaagggatgagagtatgtgtggtcttaaggcaagcaaaagagcgaagaggctctgccgaataagcgactactcttgttctgtgtcgtgtctgatgtgtgagtgtgtgtctgtgtttgtgagagattcgatactctttgaaacaaagatttatgtagaagaatatagagaaagaaagactactataagcagagccaaaaaatgatgtgagatactgcctgtgcttgcttgtgtaaggataaaacaagttgacctaaatgacaagtttaacttttaagcaccggagtcgttttttgacaggttcgttatgctgctagtaccctgaaattattcgttttcaattacccattatatcgaaaaacttcttgtaatgtgttctatgtagtctgttattaatggtatttgattctgcgtttaaaaaaaaagtcaaaacaaccaattcaagctcataccaaaaaaacaaaaagagaacaataaaaacattatagcaacatcaatatttaaaactcgaacaatcaataaacacctcatcaagtattaggttctaatgcccacggtgggcacatgttcccgcggcgtcgtctggcaaggaggacgaaacaataataagaacaaaaatataggacgtcgctatcatctcgacttatgaatccatgatagttatatggatcatgaagaatgaagggacctaggcaacgacaatgacaactaatgcaaagtggccgtgaagaactgttgttagataacaattcaaatatgcaagatgtatttctaacaccccattcagcatggtcgatgatttttcctcctggttgggcgtacctgatatccccaactacacagaaaacatgcaaagtgaccccgcaatctttacaagtgtagaaccaagtctttggatttgtttctctttcgcaaatatcacaccaatatttgccgcttgccttttcatcaccataacaaagagtgagttgatgatcatcgtacctgggaagcgttacgcttaacggtagagttgcacaacgaaaatccaaaaagtaactgcatttcatacaacctacaacggctttatcttcatcgacgccacaacactggcaagtcttcatagttccaaataaacgtgagttaaggtagagtaacggatgaggatgacttccatggaaaaaaggcactggcacagaactgcatagtaagtcaaaatttcgactatttctagagtagaagaatcctttgcaaaaaacttgacgacaaccgtgacaaatatttgtgtagctttggtgctggaagcatagagcgagaggtcccggtcttagaaaatgtcgtttcttcttagggagattagcacacgtttcatggagtataaaactgcattcagattgtgaacaatggtagaatgtgttagaaccaatggaacaaacacatgctccacacaagttgttttcctccaaagtaatattgtctttgctcaagttatgttcatgagcaaaatgagtgattgtgttgtcatcattcctcttgaatgactcaatatcttctacttcttcaggtaccccatcaagctctttcttatcccatacgtctcttcttgttgcacatagtgaatgaatagcataacgaggacaaagggaacaagaataagctccatatgaccaatcaatctcttcccaacaaactccacatctccattctccaagaccaagaggatacttgaacgaaacacggtggtcatggtgattgacgtgaataacacgtggtaattgagcacacttttggtgaatcatgaaatggcattgatgacacacataaggagaacgatcacctttcgtcccacaagcatcacatatgaaggagatcaatcgtggcatgagtgtgagtgtttgctaatgaaccttcatatttgaaagagcaactggtggagtattttttactgcgcattccaaatccatgttgaacttacaaatatcacaatgataaagtatattgccaacatcgactccagatatatgacatgttccgtctgtgtaatctggagctccattggtgataagcttaagaaggtgtattgttatgaaaagggtgagaaatctctggtaagtcaaatacggagacacaactctcatgaatcaccaacctacatgaagtcttaaaggacataattgtaattagttaatccctaatcatagggctgtgccttagtatatatatgtacattcctactctaataatattcaatacattaagcattcacatggtatcagagcttcgatatcctaaaacctacttttcttttctttttcttcttttcaaaacctagccgtcaatcatgtctcaagtcaacggcctccccgccactagagacgaagctatcgttctcacccctcagacactctttaacgtcaatacgtcgaatgtcactaagctcacatcgaccaactatttgatgtggagtattcagatccatgccttgcttgatggttatgatctagcaggttatcttgataactctgttgtcatcccaccagaaacaaccaccatcaacagtgttgtctctgccaatccggcgtttactctcaggaaacgacaagacaagttgatcttcagtgctttgatcggagccatctctcctgccgtgcaatctttggtgtcacgagccactaactcgtctcagatctggtccactctcaacaacacctatgccaagccaagttacggccacatcaagcagctccggcaacaaatccagcgtctcacgaagggaaccaaaaccattgacgaatatgtgcaaagtcacaccactcgcttggat

SEQ ID NO: 18070 - DNA, 540 bp, Arabidopsis thaliana landsberg
gatcccctccctctccgacatttggcgcgccaggtagggggttaggcattaggtttttgcttgtttcctcgctcggcatgatggtgcaaatcattgagcaccgcgccgaaacttccacggatttcctggtggaggaagaagttgtttcttccacgccacaggtttccaaccgcccaatgccgggcaccgctgctgtgcacgctgcacggcagcataaagctgcacagacatctcagactccgtcgagggcggctccgagagagttgtcagcagccagggagttgttgcatcaccctccaagctccacggcctcaccaggggccatgaagcagtggcgggacgacatcgatcgactgctcggcatggcgcgttctacctcaaccaggtcgaggtcacggtcatcccggcgccaacatgaggcgtcgacgtctgtgcgctcaccctcagtaaggggcgcacagaccaacgacctccgggccgaactcaaccgcatgcgcgcgggagaggacgccgaatctctttggaaagggcatgcgagcg

SEQ ID NO: 18071 - DNA, 621 bp, Arabidopsis thaliana landsberg
aaaacgggttttctcctttcttaaacctcctaccaacctaactttttctcaagcgcggctccatgaatccaaactcatccctatacgctacaaacacaagagtctttggcaaccttttaaacgccaagtttgatttgaggttcaaaaaatgagtaacgcaagtatactcaagctcaagctcaaactcattacttaaaaaaccgcctcaaaactcgtgtagaatactcacgaacacccatccatggagtttacataaaatcttcatcgatatattattattataataatgaagaaaatcactaaatgaatttagtggtgattctattggtggtgataatatttattaaaatactatagacatgtaacgtctatttttattggaactcattctttaaatatcaagtgtctcatccataagatacaccagttttgtgaaaaaaatctgcaaacatacaagttgtatttgtcatagtaccttaataagctctttgtagaactttcaatatagatttttttatatcaatggtctatagatagctatttatacataaacactacttagaatctagaactttttattttcatgatttgtaaggagagtttccttatatataatatttc

SEQ ID NO: 18072 - DNA, 544 bp, Arabidopsis thaliana landsberg
gagtgcaattctagaacctctgattgctagtacaagttcaggactaatggattctcctttttttgatcttttatcattgaaaggtgtgattccttttctttgaaactccttttgaatatgactaagaaagtctctacggacatcttctccgcggaagctcggaaagacttggtgtgtccaactctgagatggaggaactgatgatgaaggaggtaaagaagcagaatcatctttttctttgttatctttttgtaatctgaattttctaaaaagcatgaagaaacctattgcagctgtaacagtactaagaaaaaaagaagaagtcatttgtagggtgcagagaataacagaaaggttttgtgtatacagaacaatgactctctttgtcacggtaaaatacaaaaaagctcacccaccccatttctagatttgattgcttttaacgaattttaattaaaacaagagcacacagaatgtgaataagtggggaatgtttgactttaatagtgaggtttaggtgtgcatatgatatttccatgagact

SEQ ID NO: 18073 - DNA, 1269 bp, Arabidopsis thaliana landsberg
atataaattagtaccaaaaataatttattttaaaaaaaaatctagcgactgtctatagcgacagtcaaacgaacaacacaacgacaattattagcgattgttgatgtaattggtcgctgagtccagcgacagacaatcgaacaatatatgttgtcgctggttgctgtcgctggtcgttggtcgctgtcgctggatccagcgacagaaaaacgaacagggcataggttttgtttgttttatttagtatttctaacgtaaattttaaaaaagcgccaaaatctagaagaagagtaatatgcgagaaaatcacttttactcttatttatttacttgtcttgccaaatttccatcaaaattattaattacttaattatataatttttgactaattatttactttattggacccgggatatgtaactaaatgggcttttattgggctgtattctgtggaccattaataaacataatctttgaagtgcaaaaaaaaaaatgggacccgggacaactaaatcagaatcgggtcgggttataaacttttccctataaattaccactccgatgttaatacccgcctctttgatccctcagacgatttcttctttccgttgtatcttccaatcacccgattgagctccgcttcacttcctccggctaaatgtgtacatactctcaattaggaaaccgccaatcccacataacgttgaatgtcgtcgtctcggttagatatcaacgagggttttgttcttggttccttactaaacaacaaaatttgacgaaaattggtacttgggtatgaacgttgttattccctaattgtaccggaaaatttgatggtggtatgtttcccttgtaggttttcgttgagtcgtggatttgttcttgctcctgattcttttcagtagttcctttgctatttgggaagcaaaattgtcacgccactctttgcattcgagggttttattatgtctgagtccaacgacaacgagacttccgcaggttatatttgcagtttcttacatggtttcttcattagtgtattgcattctcctagttttgctctagtcataatctacttattgtgggataatttattgctcagcgttttgagttaattaaatagaaggtttttatgtttgagattttgatatacgcaacaagtcccacccatagcagttacaaactgaaactatttgccactaccaattcccggtcatcagcttcactgacttgtgatgatatgtcgtgtagattatgggagcaatgatg

SEQ ID NO: 18074 - DNA, 1121 bp, Arabidopsis thaliana landsberg
catcagcgctcgtcccggatctctggtcctaggcggtttgaaggcttgtcgggacaccaatttgcgatccaagtacttctttttcagagtagatcgtcattcgatcgacagttttgatcccgcgaggatgacgaggacctggtttactaacctgggttagatggagacctgagtctcttgattttttgttgtttctgttgaatccttgactgtttttgttgaacggtagtatcgatactaatgttgattttcttttgatggtttacagcaagaaccaaggaggttactctctcagagatggaactcaagctgttaacccttctccgacgtggtcaggccgactgggccactttcagcagagatcatattgttgctactcttatcgtacctccagcagttcccgcaatcgtccttccagcagcacagcaagatccgatcgaagaggtcccgtgaattgaaccgaaccccgaggcagccctgcctataggtacgagttttatcatcattctttttaagtgcgagttattgtgctagctgttttatcgagctactaaataacaaatgtcgtgctttgtttgttcagttcctcctgactccagctctacttctgacctcccgctcatttctagagtaagaatgaggcgaccaagtctctgtgtttaacgagccaatgccggagctcttgctcgtgttggtgacctgtcggccgcggtaactgcggctcggaacagtctagctgtctccagcgcatatgcctcagcttctcatctgtcgcttcctcagatcaataccgggacctctactgcagcaggtcaggcagataacaatcaggtcgctcaggcttctgagccatctgcggctgttcattttgatggtgcaccgtcttctccgaagagagcgcggacccagccggaggtgcgctaggcggctgagctgatcgtgattgatcaggaggtcgccccttcaagagaggagagggtgaaacccttggctgctaacccggaggctgctgtgtccgtagacaggcgatcatcgggaaggtcccaaggctgaggccgaggatcaagaggtgggggtaggtcttcctctcaaggtccgaaccggtctcaggaggtgaggca

SEQ ID NO: 18075 - DNA, 871 bp, Arabidopsis thaliana landsberg
gtgccttaccatgtacactcatggtctttgccattggttattagacgagcataaataacagcatgagtagaaacttttcctaacccaccaggccaccactaatgtttcaaacaaaacaaaatcaagacacaatttaaacactcagagatcaaaatagataactgtctatacttcttcgccttactttggatgatgtctgagttggactgtgaatgataaactgatctgtctttggatcaaaagtagcggttgtctcaaggccttgaacattagagccatgaccaagctcagtttgagcataacatccaattatctgcatcttagtagctaaagacaaccacttttgttgttgttcctctgtgccttgtcctttaattgcaggcacaaacattccctatccaccacaaaaccaattcaacaccaaaattctaattaaaccacccaagggaaattgtaaattttgtgttatacccaatgcagatccaagaagcctggttgatccatgaaagatctcaatttgagtccttcctcatctgagagacgaagctcgttaatcaacttccaagcgtgaacacttttcctcaacgtgttcttgaacaactctttcctactcatcacagctcttttgcttttctcaaagaccttaacatggcaaaagtttcgaaattcacatcggaaatgtcgccggaaaaacagagaaaggaggaaggagaaatcttaccggatcattagcgacgaggcgagacatacgatttgaaacatcaaaagcgtggcgggaaccggcccagacgatctttatatcgtcgacgttgaactctgctttgttcctctcatcggcaaggtgatcaactctctccattgttctctctat

SEQ ID NO: 18076 - DNA, 1950 bp, Arabidopsis thaliana landsberg
  unsure (1)..(1950): unsure at all n locations
agagagctctgtcatgttcatcaatcaatgggaatacctccatagtagacagcggcttgaccgctactgtaatgagtcaaagcaccaaaaagattggtgttgtnnnnnnnnnnnnnnnnnnnnagaattcctggaacacctgctgctatatgcatagcaaggaaagctgagaagagagctccaacgtgaccggtttggcttgcgaaaaggtagtgaatgaagaagtaggctgcttgaagaagtccaaacgcagcaggccaactcaaggagagagattgtagaactttagctacacaatcagacatccacgttacaacaccgaggtttgtaagctgtcctgccattcccaccaagacagcaaaccaagctaatgtgtcccatgccgatttttcgcttaggcaatcgtcccaattaaggacacctagcacaagaagtatggagagaccgatcatggcagctacaacacttggtattcccagagtctctctgcatataatattaaacccacggaatactcagattttaaccaacgttatgatacaaaacatgaaagtgatctaagacttacccgcagatccaaagagtgacagcaagaagcattgtaccgaccatgatccattcgtttttcgtgacagggcccatttgcttgagtttcgttgcagcaatacctggagcctcaggtgtgtcctttgtttctggaggataaagcttatagaggataagtggagtacaaagaagtgatatgattgcaggtagactagcagccttaaaccaagaaacccacgggtttgagatcactactccaagctcctcagctaacttgagacacagcaaattttgagctgcagcagtcaagaaaagcgcactagagtttccggcgcactgtcaaaaatcagaacagaattagagaagcagaacaaaattcgaaaacttcaaaattctctcaagtcaaatactaacaacaagaaataaactttcatctaaactagaaagcaacctataagaaaatgaaagattctgcatttaaggtagaaaaatcaaagcagccctcagagtaagacacaaactgaaccaaagtgcaaactttgtttctcaggatcacactacacgcactactaactaatcattggagccaaatcatgactcaaaggacataaaacaaagaagtaacctggaattgagattgaatcaagtaagagcctagtttcctcgaagaagaatcattcggtttacttccagccgatagcgagagagacttgatgatgggcaagaaaatgccaccagctctagcagtggtactaggcattgcaggagcaatcaaagcctcactaagcgtgagaccataagatagacctaaagtactcttcccaagccatttgacaaagtaagtagcgattctatcaccaagacctgtcttgacgaatccacgagcgaagaagaaagagatgacgatcaaccagataacctcgcttgtgaaagctgagaaagcggcggagaaagaaagcgttttggtgacgattgaagcggtgagaccaatgaaagcccaagctccgactgggagaggactaagaacgagaccagcgattgttgagaggaagattgagagtaattgccagccttgtggtgtgactccttctggtacaggaacagcgaatcggaggattagaccgacggagattgagagaatcagagggattagtttcgctccttgaggagacggagacggagacggagatgggggaggaggaggaggagcgttgtcttgcggtgcggcggcgattcgtgtggagaatcgaggaattggtttgagaagagggaaggagagaggttgaacggagagagatcggagggagattgttgaaggcggagatctcgaggaggtacgacggagaagagagagacgtgagggatggtgatgatgatgatgggagagtaaggtggaagtggcgg

SEQ ID NO: 18077 - DNA, 1058 bp, Arabidopsis thaliana landsberg
  unsure (1)..(1058): unsure at all n locations
tttctttgaatgcatatgtgtcttttgcgggcgctgaggcccgaacactttattatcgtagtataaggttgtgctccttttccttccgttttgcgtatccggccccgttcgtcagtagcagggtggcttgcccaagtaannnnnnnnnnnnnnnnnnnnnnnnnnnnnnnnnnnnnnnnnnnnagaggtgtaggagtccctcggctcggtcggccttgccacttacatgcgccctcattcgcttcttggggtcctgctcttgatatagccgaggaacgcagaagcctttttgatggaagacttttttcgaggaaaattttgacgcagagggggttccccccttctagcccccgagggagggtcgggctttgccgaggcaaggctgacccttccttgatggttacactttgcatgggagcgaggtatatgaacaacttgaaaacatcttaagggtagaagcgacgtagctgttggatgttccaagcgttgctgtagacctcgccttggctgttggccagcttgtatgttccgggcttcagaactttggcgatgacgaacgacccttcctagggaggcgtgaccttgtgccgccctcgggcgtcttgtcgcagccgaagcaccaggtcgcccacctggaggtctcgggaccagacccctcgggcgtggtagcgtcgcatggactgctggtaccgtgccgagtgtagcaaggccatgtcccgagcctcttccagctggtccagcgagtgttctcgactagcttggttgctttggtcggtgtaggccctcgtcctcggggaaccgtattctaagtctgtgggcaagatgacctcggccccatagactagaaagaacggcgtgaagcccgtggctcgactcggtgttgtccttagactccagaccaccgaggggagttccttcatccaccgcttgccgaacttgttgaggtcgttgtagatccgaggcttgagcccttgtagaatcatgccgttggcacgctctacttgcccattcgtcatgggatcagccacggcgtcccagtccacccagatgtggtgata

SEQ ID NO: 18078 - DNA, 585 bp, Arabidopsis thaliana landsberg
tagcaaaagcaggagaagcattggtgattgaagacatccacgtggatccaccccaagcttatgaagttaggattaagattttatgtacttctctatgtcacactgatcttactttctggaaactaagctttgtaagtttacactatatcacaactcaacgtagaatctttctttaaaactcgatttcacactaatcttttttggcttttctagggaccaatttcaaggtttcctaggattcttggacacgaagcagtcgggtgaatcttgatatactaattttaatttcaattttttcactctttttttcaagaatttgcctaatcagtttttttttttttttttttttcgggggcggttactatagcataataacatgtatttgctgtttttattgggattttaaaccagtgtggcccagagcattggtgaaaacgcggacggatttaaacaaggtgacctcgttttgccagtttttcatccttattgtgaagaatgcaaagactgcaaatcttcaaaaaccaactggtgtgacagatatgccgaagatttcatatcaaacacaagacgatatggaatggcttc

SEQ ID NO: 18079 - DNA, 939 bp, Arabidopsis thaliana landsberg
actatatatgttactacaatctcttagactaaataatttgattttttaacattttttgactttatattttatgaatcaaacatgacatgacaaccgaatacgaaggaggaaatattatttcaattgcttttttatatttttaccttcatttcattaaattttgcatcattctcaaatagattttttaaaagagatgtttaggtttttagaagggttaaatctaattcggcctaaaaattgttttttaatttaaaacaatttatattttagatgtaatctaaaaggaaggacgactttctctcccatgcacggttttcgaagttctattttcggttaagagtttttgaaaactagatctaaaccacttcctcttaccaaaacagcaaaaaacaaccatccttattttcaaaactagactttccggttgacttacagatctagattacaagcaaactgttccctcaggggagaccggcataggagatgcccctcaccctgagtacttgatggttcttatctcaaatcttgtggttaaatctttcgaagaagtttcaagtgtttactaaggccagaacattaaattcaacctaccaaaggtacacttcgattctctctttatgacaacaactattaacctcttgaatgctctcacttttaagtgaagaatcttgttaaacttgtaaaaacagatcttggtccacctcttaaaggacagatcttggtcaacgtataaaacctctcaccttgtgtgaagaacttttgaaacttttcgtcacaagcttctacttcaagccctccactccactcagctatggccaaccgcattccgtactctacaaaaggaaaaggcttagcagactaccataaagagtcaccatcatatctcaagagaaacgatgagagagtggtggaagaaagagaggatcttaccacaacaag

SEQ ID NO: 18080 - DNA, 808 bp, Arabidopsis thaliana landsberg
aaatttcctgatagaatatagttatgaaatttgaaaattcgaccataatattacaaaagatcaagcataccgtctctaaaaaagtatttaaatatttcttaaaacccataacaacacaatacctatcgatcatttttgtaaaaaatttcataatcactcaatcattcaatcagaacatcttgaattcgtagcggcccaaacataagcggtggagagtgtactatatatataaatttaataggtcactagacgtatggattatgtatatccaacaatatatgaatttaaatgctgaatattaccagtttttgatttcctcaagttcgtaaaactccgggtgaaaaaaatttttagagcattcaactctattcatgagacatggttttcctgtaaaatattaaattagtgatgttttctaccgtttttagaaaatacaatgaataaatataagtcaatacctttatactcttcaacatgccagaacatcaaaacacaaaaaacaggatcacgaaggtacgaatgatcatactctcggtaatcctcgcttctgaaactctattgtatacatggctgaaacataaaagggtagcttattcataatatgaataaaatataaaactaaaatatgaacacaatatcaaccagaaccaagaattataaacttcaaaagggactatggtacctcagttaacatcgtcgaacgtcttttcttttatcacttgccgaacgtcttttcttttatcacttggtgcataaggctagccaatttcattttaaaaactcggcaaatgatatcaggcctatcttc

SEQ ID NO: 18081 - DNA, 1602 bp, Arabidopsis thaliana landsberg
tcaatcattgttgagttatttttcccgcagaaatccagtgcttaaattacattcattagcactatcattcaattaataaaatatgatattgcgttaagcttttatgatattgatttttaattttaaattgctaattataattaatcactaagcatttactgtataaattttgttgaagaaaaaatcttcgtggcattgaacgaaggctggcccaaaatgtttatgggcttaaagtcgaagaaattttgtttggtgcattaacaaatacatttctaaaacatgacatatgaaatgaattaaagtaaggcatgagtgatatgacgatttcatttttcaagaatcattcattcttatgaacaaaagaatgattccccaaccccttcattgggactatttctcactctcttgtaaagtgtactgcaaagagtaattctttaatagtccatatctaatcccatatatattgcaaattaaatattttacctatgaaaacgaagcaaaaccgttttactatttctccttcggctcgagaatgcttatcccacaagtgactttacaactttttttataatttttttttttttgtcaaagaagtgccttcacaacttataatttctttattcctttaatttcggatgaatttgtctttagtactaatatcataaatcacttagaactaaaaactgatatactcaagataccactcaaaggtcaatcgtgctaattgaattgatatgctgtttaaattggtattgtatgatataataattaataacgagttaactacaagtagctttatatcgtaattgaattttaatagattaaaaaataataaaaaccttgcttaattctaaaaaaaaagggagcatttagcaacattgaaaaggaagcgttgactaaatcttccacacgaatgggctcgctctgtctcatgcacgcacgtccctggcataacggtgcactctaccacagaggatcattatttcttcttctaacctcagaaaacggaaaagtcgtcgtcttcttcttcgttcccgctcccacgctctctcctcttcctcggatcttccatcttctctctaacagcaaatgactcagtcgtaaccttctacactttctctctctccaatttttcacattttatttttggcttccgagctatgaccccagtgcgtctgcttcgtctcgaccgctgatcggaataaaaccaccgccgagtttcctaggtctatgtgtattgtaatatcctccggaaatggcagctttcctcgtcatgtttatcttcacgatcgctctgttcgtcgcactcctttgggttttcttcaagtatgtctccatttttttgcctcttcatcggcgttgaaatcgtgtttcgttgttttcaccgttttgccagtttctgatttgaaatccattctactcaaaaattgtttcgggaatggattgcgtttcaaattgctggaggaatttagataattgttgttgatttagacaagttttggaacatatagaattgttgagcatagaagaattaggtagatgttgaacgtcaagaatttaagtgtagcatagatagatgttcaataatccttattgaatcta

SEQ ID NO: 18082 - DNA, 896 bp, Arabidopsis thaliana landsberg
cttagaaagaaaaatccatcaaggagtaaaggtatttatggtgaacgcataagctcttataattactatacactagtagaaactatacaaaatctatgaaatttttatattgcagaaaatggtagaacttcaagatcatccgagccaccaagaataacaaaaaagaaaaagtttacttacgtggaagttactgaaatgacaaataactttagaagtgttcttgggaaaggagggttcggtatggtttatcatggatatgtaaatggtagagagcaagttgctgttaaagtactctcacacgcttcaaaacatggccataaacaattcaaagcagaggtacttataacaccaaaatattcctctatgcaagtgtcttttgttagttttcaataaatatggaccatagatttgaaatatatgtgtgcttttgtggttcattaggttgaacttcttttgagagttcatcacaagaatttggtaagcctagttggatactgcgaaaaagggaaggaattggctcttgtctacgaatacatggctaatggagacttaaaagagtttttctcaggtaaaccaaatttaagtattataccagacacctaatcttaatccattttcgatggaacaaaaacatgtaacaaatcattcttggtcataagttaacgtcctggttaaaaaacacacagggaagcgtggtgatgatgttttaaggtgggaaactagattacccaaaaaaaaaatttttttttttaaagggggggggggcccccccccccaaaaaaagagggaggggttttttttgtggggggggggggggggggggggggggggttttttaaaaataaaaaaaaaaaaaaaaaaaaaaatccctccccgggggtggggggggggggggg

SEQ ID NO: 18083 - DNA, 572 bp, Arabidopsis thaliana landsberg
  unsure (1)..(572): unsure at all n locations
tacaagaacgtgttaaatcaccatccaaaagcaaaaggagattgcagaagccgaagcccggcaaagtcaaccaaagcaggtcctgcacactgcttcgtgtcattcaccctacataccagaatatgtgggtaatcatcccgcagcttctgttgcttcggctagtcagccacaagtttcttggccacaacttccacctccgtcgccactacaacctgcctactcacgaggtcagcagccagaagggagccaacagacccatcagcagcgagatcttagggaggggtccgaagctcgcacagttaatagtactgtgccggaatcaaaacacaaatattgagagatatcctacctctggcacagttttacattcactgtcattttctttttaaataaggaacaatcaatgtaaacctagctttcttgtcattttttatttttcctgtactagcttcgttcatgtcaaaatgaaatatatcttcgtcacagacttacgagaatgccaaagctacaaagagatattccttcgggaatgcagaccanaaatcacagtgaaagttcaccgaaccacaaaa

SEQ ID NO: 18084 - DNA, 1258 bp, Arabidopsis thaliana landsberg
ctgctgtccaaatactttgtaacctaaagttcacgtgcttcatttacattgaatctagtttaacctaatcttcttgcttcatttatatttgaattttgtttaagcaatctagtctttatcttgtcttagcaaattcacagagtgtttctcatgcaaaagtgttgcatgatcaaaacaccttgataataagattgaaagagtaatgtgatcccaaaaggaaagaagatctcggatgaactgattcagaaaaagtatatactctgatgttatatatactatgagacaacagctaagttatttacatatttcctcatttcaaatctgtgaacctgaagaacacaagaatgcagctcatgatcaaaattctgaaagaagcgaaacttcgccaacccaagatttaagaacagctacaccatgaatagatatttgagatcatcaactgttaatcgagttgcagagcttccaccatgatcttcaccaaaggcagacgcaaccatttttcttttctcttcctataataataaccaaaaatcacacaaccacaaatgagagaaactgaggggggaaacaagtatcagctataagggatctttacctggagagccaaaattctatcctccacagtattttttatcgtaatacgagttacagtaacaggtcgagtttgtccaatacgatgtgctcgatcaatagcctgatcttcagtagttggattccaccatagatcaagaagaatgacatgacatgcagcaatcatattcagcccaagatttccagcttttaaagacattatcatcacttttacctgtttaagacaaaaaaacaaaaaaaggagggaacacatacaccaccactaagaaaattgtttaggaaaaaatgatttcagatatgcatacgacttacatctggatcgttgctgaattctttcacagctctgtctctggcaattagactcattgtaccatctaatcttctgaattctatactattttcaattagagatagctccaccaagtcaagcataccagtccactgagaaaatataatcgtttttattggtcctccattagaaggagttgacttcagactcgttttctcgacaatggtgacatcatcatcatcatcatcatcatcatcatcattcggctgctgcgaggaagaagccatttgaccattctgtgttgagtttgaagtgccttggttagaaagcgactgcagaatatctaagacagctttgatctttgatgaactaaactcg

SEQ ID NO: 18085 - DNA, 668 bp, Arabidopsis thaliana landsberg
aaagatttaaaaaaaaatttaaaataatttataaagattttaagaagttttaaaatgatttataaagccttttaaacactttacaaagcttttaaaaagttttacaaggttttttaaaagtttttaaagatttctttacaattttacaaagatttttaaatatattttttttgctggaaaatattttattacgggaaaaaggttttggtgggaaaaacttttttgaccgggaaaaaaataattttgttgtctgtcattttaaggaaggatactgttctctgtcttttactttggggttcaacttaaaaaaactatttttcattcgtctgatgcaagcccatatcgagattgtttcaaaacatagagattcttttttgggccatacttctttaggttcagccgttttcagggtaacaacttctgatgaaactgaaaccaagtaaattacccattcttcattttgtgggcttaatagacatatatttgtaaagtgaggatccaatttcgaaaattttaggtatcctattttccacagcgtgatagcgacaatgctaggccacatgtcattatttccttggcccatcttctgaccattaatacaaattaacaaaattaccaaaacattaaattcaaaaaatctcagcaaatatagagggatttaccgtttt

SEQ ID NO: 18086 - DNA, 1420 bp, Arabidopsis thaliana landsberg
acgtgtctatcgagtgagagagacagtggagagtggacagcactgattgaggtttgtaagcaagagtgggttttaggtttttgtgattttggaagacttgtttggtatttgtctcgttacaattcaacaaatcacgcattgccatgtcagcatttcacattgaaaaggaaacgtttccttcgtaagtaaaatgttatctgaacttatctgtagatatttatataaagataaccgctctttgtagtcaattcaatttattagagttcttaatcccaaattttaagttcataatattaaaagacagcaaagatttcttcataatttagaactatcacttatgacttaaccatcggcgcatagtttgcaagtctttttaagttcttttactatcaaaataactgaataagtcattcataactagtggtattctaacgatctaatggctcaacctaattaatcatgaccgttgaaagtgttgttgggcccaaaatatcgtcggttaatacaactttccctctatataaagctattttcttgcaaaatatggtttttttttgttaacataaaaaagaaactagtagcacatatatatatatatatatatttttgttgtatgagtatttcgaaggttttacagaaaagaagaaaataaataataataattcatacgtcgagagtaatgattggactatcaggcttctcgggcccactcgaccgtcggtggaaggcccaatgtaaaattgggaccaaaacaaacaaaaacgttattagtaagggcctattatttttttcttctttaatttcaaggaaagagtgactaaccatcatatgttgagcgcgtgaaaatatcgctcatggttatatatttgcttttttctttgagataataatttccattagaaaaagtcggtttcaaagttaaaaaaaaacatctaaggggtaagacacattcacgtaaagtttaccaggagcaatggagcataaacatattcaaattacacataccctaaatagtaaataataataaaatacatagacttgtatttttattataaatataatgaactacattccaaacaattgggtgtttggtctagtggtatgattctcgcttcgggtgcgagaggtcccgagttcgattctcggaacacccctctttaaattctctactgctacatcaatttttttcccctcggattaaattaacgcaagaaagtcgtagactgatgacatacaatatggtggtggctcactaaactgactatatgcctaattagcccgatgggccacatgggctcaatgcaagtcggtaaaaggtggaatgttattgaatgcgatgtatgttggcagaggagtaaccgtacaaattagactattttatacccatgaaatcattatcgtccgataacataagatagta

SEQ ID NO: 18087 - DNA, 563 bp, Arabidopsis thaliana landsberg
  unsure (1)..(563): unsure at all n locations
cacccggttttagaaggcaaaccgaatgcgaaccatgtacgtgccaggatcagcaattcacgtacacatcatttacataattggacataatcacacagtgctcaaataataacataaaagagggtataatagtcgattacatcatgatgtccgaaaccatccacatagtcattaacaataatcaaagtgcggaaaagaaacgtagatacacacggcctacacaggcagccgactgggggtttgccgctaacctacgcctagaactcatcgtactcttggaactcctggaagtcctcctccacgacttcatcttcgcctgagtagtggttgcaacgctgacaacctagaggggtttggtgtgtaaagcaagggtgagtacacatcaacatactcagcaaaatgacccgtttagctgtagtggactagctttatatggagttaagtcaagcagttgcttttagttggtcaggttattatttactagtagaaagccagattttagcataaacccaagttattaacccgatgtatccttccaaatgganagaatctacttacgagta

SEQ ID NO: 18088 - DNA, 840 bp, Arabidopsis thaliana landsberg
  unsure (1)..(840): unsure at all n locations
taatattaattccaaaatttaacgaacatcaaaagtgaaattgaaaaactaatgagggagatcaagctcataaatggatcaagttgttgaaaaacgattggggtacacctaaagaattccaaagacgattggtgtacacctaaagaattaaaaattgactatattcttacaagttgttaatgattaagttatattgtcagaatgacagtaagtatcatacccataaaaattatatttattgctaaatgaatagtacaccaagcaattcaaaagtctagtataatgattaatgttattaagcattgttgagattaacaagagaagacttttgagttttgagagagaaagaaacacgaaagaagcatagctttgcgatttcagatctaaccttcttcttcttcttcttcttccaaatatcaccatggcttctgagggagtgtcactaccgttgatccatgatctgaagaaaggtgattgctctggacgcctggaatgtgtcgaccatgcttctgactctatcgtacacccatttcaccccattcactctcttcggcttctaagtaaaccacatcgtgtatgtgatttatgtggaaggggaatcaggggtctaggctatcattgtgagacatgtggatttgacgtggatttacattgtgccaagtacccaccgccagaggttattgacatgtccgagacgcatccccacaagctcaccaaccttaaggagcggatcgagttcgattgtgacgataaatgtgggaggaatggtgatggatatcgtacaaatgccatgaatgtgaattacatttccatgtnggatgtgtatggcaccacggagta

SEQ ID NO: 18089 - DNA, 545 bp, Arabidopsis thaliana landsberg
cgagttagctttcttgggtgccatcgcgagtggttttctcgtagcacgaacgatgggcgccaaatgttggtacttgctctcagttgcaaggggatccaacaagggtgaacagggacgttaacagggttctcgcgcgagatggcaatagctctgttaatctggcctctcacgggcgctgtgcgggggtatttataggtatctgagcacccagcgtcttgtgttaaggacgcatgtgccctcagacacctaggttatccccagaatattcccataaagcagggttacagactgtaattacagggatgcctttacagattaggcccgtaacacgcagcggccaccagggcccgttacaatgggtcgggtcacacgtgggcctccgagttggacgaggccgcatggtgggatgacctcgtcgcaggccttcgcctgatgtcgtgtggggcgaagggtgtccctgcccgctttatctccgttggaccaacgactgcagcgaaggcctcgagcgaagggtggcatctttgccttcgccccaacatttgccc

SEQ ID NO: 18090 - DNA, 436 bp, Arabidopsis thaliana landsberg
ctcggtgtttacaaatcatgctagtgtattgacgccaagagtgaagcccctttacttggacacgccatgaggtcttgtatggtcgaacatctctcaggaaagcaaaagaggcagccatttgaaaggtaagcaaagtttcttattttaaaatggaaagatttcttgatagactgcaatgtgtagaaatggtatgcaatatagagtatatttatagtgttgtgagattgtataggattttagattatagagtaggcgtaatctttttcgaatcaatctgtgaatattctctgcaaatatatgaaactggatatgcggcttgatcaatatcattatattaaagtcgattgaatatgttaagtagatactagcatatcttgaatgtaacttccaaacatagtagatacggatttgattgttttggtaactgcattttaaa

SEQ ID NO: 18091 - DNA, 633 bp, Arabidopsis thaliana landsberg
cagaatgattggacgtcatacatttacaatctccttgaggtagtccaccctttctataagatcttcacctattgttaagatacaacttggttaagatgcgcgctctgataccaaatgaaattcaggataaactcaagatcagttccccaaactcaagattagtgtatttttagtctccttcacaccggaaaaacttctagttagggacatgtccaataaacaaatatatctctactttggagctttataatatgcatggccttatcaaatctctgttttgccatcttgacgctgaagtgacttatcatacgaccgaacaatgtaccgaagaaaaacaatatgaaatgacatatgtactaaacaaatttagagtagagaacaatagattagttaacgactacaaaatcaaatactgaaactatccaccatcttgatttttaggactactaaaagtctcaaaaatcaaaagatttcgctttttataaatgtttttgataaaacattctcttttacgtttgtcttcttatattttcttcttcaatccgcaatttatggcgcaatgacccattatacaactcaaaaacacttatcacaggaacaaaatcaaacctataaatcaatataaacctatca

SEQ ID NO: 18092 - DNA, 745 bp, Arabidopsis thaliana landsberg
tatcaccggatactaaagcccacagaaagtagacacaagcgaaacgttagaaaccttcggatcaagtgactaacaatcaaaagatagagatcattaaagaaacagacaaatatcaaatcactaacagaactagagagagatccactaaggtttcttataaaacatgtgaacgtcggatagcaccaataagaccggataagccacaactcaattagcaaaccgtagtcaaaaccaatagcaacacagacatgagtgacagcaaaactcaaatgataccagagaagtagctaccatcacgccacacaaaaacagacaaggagagaaacctgagattcaacttttgtccactctctcctgcatctttctaattttctaattatatatgtgtaggctttgagcttgagaagtatgattagaagagtatatgtgaatatttacttaaggggttaattgtaattatatagagtcttgaaggggactagtttttcctatgatatatattcaacggagttctgtaatacaattgccaaaggctgtccacaaaatgcaaaatcttagttttggaatttgctgaagacagtgatttttgagtcacttttacagagagaagaaagggaatttgtttctattacatacctgaatcatatgccatacacagcgccatgccttgcgagagaaaacatgaaccatgatctccgcaaatctgattttggttttaatagcaagaatgatgagacaagtcact

SEQ ID NO: 18093 - DNA, 1690 bp, Arabidopsis thaliana landsberg
gatcgagcttctccatatagagctttagttctgggttgtttttagctatggaacaagagtttggtaagcctgatctttttccttattcaaattttctccatggaagtgaccttaagcttttaatgggggatttcgtttaaggaagaattagaactttatctataccttgttagaaacctctcttcaatacgaaaccaacgttgctgagaattcaccaaatagaagtcgaaaacgatcagaatctgattggtaaatattttgattttgttgattcatagtcaaattaggatttatttaagccggttcttaaggttttaaaaccggttctggaatgttcagtctatgaaaaatactcgtttgaaatctaatttggaattgattgagttttgattttaaacctatagcaattctgaccggttcggctcttttaaaaccggttttggcaaatcaaatacatgttcgagatttcacttaagagtatctttgcgatggtgtagtttaggtattttctgattaacggttgaatttaagtaaattgtttggtggtttggaatgtgtccggaattaccgttgaccactcgttcgatctgaagatatgaatatctttgtcaggtgagttctaactcccttttaaatattatacaattgtataatattttagaagtgggaaaattaattaaataaattagttgcatgataagttgtaaagattgatttgggtatctagataaactaatatgaatataatttttggtaataagatattttattctatttagaaataaaatatggttttctgttaagactggtacattcgtataatatgttaggtgtgagtttaaatattcaattaaattatttgaaggttaatttccgaaaatttatttgtttgattcgataattaattttgaatatgattatgataataagatatgtttattctattaagaccggtttcagcatggcactctaatttagctagctctattgggcaatctgtggcggccgacatcgccaacagatgtattatgtattttgttagcctattagtggtattgaggtcggttaatggtatggaccgtacttccttatcacctcgttaggggccagcatccctatcgagtatattatgtaaatattatgttagtttatggtttgggtcaatcaataccgggattttaccatttcgacatgcattgctagatacatggtcgttcagttctgatgtattattctgttctgctgtcattattttgttctgctgatattattatgttctaatgatttgatcatatatttttatagtataagttatgtgtttactttatctaaaattaattgaattgaaatttatgtctgttagtaacaacacgtaaatattattctgtacgggatcagaccgtgttggtacttgtttgtccggtttgtagtctcattgggcgatttttcgctcagataaattctgattccgtgcagagatcattgaggaggtggagcgtgcgtctgaggtttagagtttgtatttttatcgtagagcgagaattggtagattttccaacgtttttgatttgttttgtttcttttttagatctggagtttttttttttagattataaactttatacattatgggaatgttagtatattttaattgatgttccgaaaattcttttaattttttagcgctctg

SEQ ID NO: 18094 - DNA, 1324 bp, Arabidopsis thaliana landsberg
ggccgcagtggttctggttagtctcccgccacctccgttgaatcacccggcgtatttctacatggaatatatggatttgctggtggagaatgtgccaaggatgttgatcgtaagagggtatcacagagacgttgttactttgtttacatagtttaaatctcaattttataccaaccatgagcatcaaaaagcctgcccttcaaggtcagttttttttttcttacagttcataatttccttttcttgtagtacagagaatttcatttgttgaaacggattgaattgaatattcctgcgagctatagttttttcttttcatatttttgtttgcagatagaacaatttatgaggttgtatcctgaggcagatcaatacatttcctctcctggattatatctcccgacttttggaagattttgctaaaactacctatggtttttacccgtattatttcaccgctcactaatttttcatgttcataaaattcttcaaaattacatggattattttcaccatatgtgaaacgacatgagattatgttaacatgatggtcaaaacataatagatcaatgaaattttgtgcatatattacaatatcacagcaagaaaggagttatagttcaatgattattaccaaaaaaaggactataaaagaaaacgaagacacttcaaatgtgagcaacacaacacttcaaagtggaactacttgacttgcaggaaattcgactttgcgcttcttcttattcatttttcaagctactttcgtgttagcgtttacgagttaggttctgtgtatttgcaactctgtgacatgctctaccttacagaaaaccgcaagtatgagaaccttgttgatccttcaactttcattcctcgattctcaaacaagttattgaaaggtgcacacaataagcaagtcgtgctaacggctacacacattatagctagtatgaagagagattggatgcaggtgtgtgtgactcctcctgttacgtacatgttgtttgtcttagagttttgtttattttattatggctctgtgttaatgttggcttgcagaccggacggaaaccaagtggaatatgtggagcagctctctatacagctgcactttctcatggtatcaagtgctctaagacagatatcgtaagatgttcgattcaactagtgttttgagcctttttgtttcagtaattcagtgctgatgtgtgttttctaattcagctgaacattgtgcatatatgcgaagcatccctaactaaaagattgattgagtttgtagataccgaggctgcaagtttgactgcagatgagctcagtaata

SEQ ID NO: 18095 - DNA, 852 bp, Arabidopsis thaliana landsberg
taccaaataagctttgagtggtaacatccgctaaattatatattgtcatcatggtaacatccgctaaattacaaatttcaaataatttttacttttaacaaacagaaaagtaagaaatatttttttatcgacactttaacgatatatatatgtaacggtatataatttacaaattcagaaattttgttcgctatatattttcttacaaaattttgttttttgtttatgtgttaacaacatatataactacaaattcgataattttgtttgaatattttttctactagatacacacacaatagtttatattatatatatatatatataaatcttgacctaactaaaacatatagtttaaaagggtgttattagttcttaattaattaaaaaaaattcaagaatctgataaaatcatagattgtaaagaaatgaaagtttctaaactattattatagagttttctataatcttgttgattagtttttcacaatttctaaattttctcaaacaatctttcttttttaatgatacttttcgtaactttattttggaaaaaagtgtagaaaatcataaaccaataacacaataatttaatttattgacaattatagattcttttgttttagctaaataacataaaatttataataattttataaaagtataaatccaataactatagatttatcaagattttaaattattttttacaaatcttaatattttaaatttttttaattgaataacaatagattctttataatattttaagttactaaaactttaattaaatcacaaactaataacactctttaatagtgtatactagcattattggtatgtcattatata

SEQ ID NO: 18096 - DNA, 551 bp, Arabidopsis thaliana landsberg
acctttcccgcaaattatttattcatagtttacaacttgtagaaaggcgacagttgttaattttatgtcttttaacaatttatatatatttatctaaattttaacactattaaaacaaaatgttttacttagatctatttataacattgatttccattattattattatattaaatcgcatgaccttatattctttaatccatatgatttattaagggtgtcaaaatgggtcaaaattcatgagtcaactcaactcaactcaacccatgaaccctaatgagttgaaaattttgactcaaatgagttgatgagtcaattgggttgatgagtcaattggtttgatgagtaaaatgagttgggttataatggttaatggtttcaatggtttacccaattaacccattaattaaaccaactaaaaactctaaaccaatgccaatttaagtttaaccaacacatctaacctaatttaataaaattaatatttttccaaatttcttaaatatacaagcgatgcaattgagaaaaaatatactcgtaatttttccacc

SEQ ID NO: 18097 - DNA, 796 bp, Arabidopsis thaliana landsberg
  unsure (1)..(796): unsure at all n locations
ttcaaaacctttaccaaacccataaagcctaattcattcgtctttttttctttaatctttatgtacccacaagcactcatcacatattctacaaatttcttaaagcaaaatactatcactgattttattctaaaaatgattcgatcttatcaaacaaaaatgaggattatgatgggcaacaatgaatgggttatatggccatacaatttattctattgggctttagaaataagaaggtcttctatctccatgccactcaaaatttcttttctctggtcttggtgcccttcttcttannnnnnnnnnnnnnnnnnnagttgatgagataaaaatcataagtttatatatcttcactgtttttgctcaaaattccctttaatgcttctcttaaagacatagcttaattgtgtccttcattcataggcatttgttgaaagataagtaattaatggttaagaagaccattcctctgtcacttggcttcttatcttgtctttatggatcaagtactactggctcagagaaaactgcatacatgaagatttgaagaaaaatgagactctgaattgtctacttcaaggaatgttcaaagtgtcgaaagcaaagatgagaagcatttcagaatcagactctccttggaaatggatcatcatcgtgattactttaaccttcagtccttgtaaattttaatcttctctatgacgagtcttcagaaaagtaaagactcagctagcctgcgtacaagtaataaggagaattctggccccatatatctggtctcaatcgatagatgact

SEQ ID NO: 18098 - DNA, 1538 bp, Arabidopsis thaliana landsberg
gtagtgtttatggagtcttatctggatgatatgatagatccaatgggatggacttcgtggaatagcagcaccacaggacgtttgtccacactatactatggagagtacaaaaacaaaggccccggagcaaacacaagccagagagttcgctggaaggggttcaagataataaccgatccgatagaagcgaacaagtttactgttggaaagttgataaataaagacccgtggctgaacgccaccggaattccgtacaacgagggtctttgattagatcgttttaccattagtatttaaagcattaaagaaaatagaatctgtcaatccattaacaaaatatattaaatggtgaaaaatatattaaaatatattaactggtacttatcaattctcgatcaatttcgtgatccattattattagtgagaaggcatctttcattgagattacaactcggattggagaagagaagaatcaaatcagagttgtgatcggacatgaagaagaggaagctgcaaagacaagcttaccaaacgacatcctcaagaaggttcagcgattgggccaaattgagaatctaacaaagatcaagcccaacaagcagaaggcccaagcgcagacccaaaacaactcacagctccaacggtcatctccacgtgcaaaagaagacaaagccaaaaataaaacaggattggatcaagtgactaaaaccaggagctgtgcgggcaaagatggagtagttttaaaaaaccgttttgagtgtgtaagatcaatagaaacctgacatgtgtcagaacaaaccctagtgtcactgacattgtaactcctataaaagaaaaacatgatgtaaccttaaaccttaaagagaacaaataaaagaaataaaacttatctttttcatatgtagcttctgagcatctttactttcaattattagatggtgaaaatcagttttttatttttctttctttttcttgaataatgaatgaactagaatttctctcgtactacgtacgggttaagaattacttaacgttacatacagatttattctcggtaaagtaccatattatggagaagtggttttagcttaactttatttgaaaatcaacttccaggaaaagaacattgtccgtctaaattcattacggcccaaaaaaaataatctttcttactattgatctggaacagatgaaagatattattgggtttagggagacaaaatttgtggtcttataaacgcttttattgatgtcatgtaattaaacgactcaccaagtttggaaaataattttttttttagagccaactaaggaaatgcatagggaatcaaataacagtgagcaaaagattgaactaaatatgagtacacgatcatagattcatagtggtagagtttaagaaacttgggctttgagtttaagataatgccacctcataaacttatcttcgtcattaactacttgttcaacaagccttgttgctcacgtaagtgtataatgagtctaatgactattttagagtctcaaagtaccctact

SEQ ID NO: 18099 - DNA, 440 bp, Arabidopsis thaliana landsberg
aacaatacatacaatcactgattttgactatcaattataggaatccatggtggttctgttttgagttggagtactggactacggatagccgtagactccgcactaggtacggaacagtttcactcacgtttttttttttattacagaacatttaagtgatcatattgattcattggatgaagaatttcaaaaatcttacccttttttaaatttatgataccattatactagttgttttaagaaagaggatattatttattatttgaaaacttaaatacgatgacaataacgattagttgtgatgttatttagttacaaatattaactagttccaagtacttgaatattcttgctctagaagtattacagattattataatatcaacatgtagagatgcttacagacaaatttggtaatctttataggattggaatattta

SEQ ID NO: 18100 - DNA, 527 bp, Arabidopsis thaliana landsberg
aggtatgtagaagattttgaaagcttcatgcttcaagatacttcttcgtattattctcgcaaggcgtcaagctggattcaggaagattcttgccctgattacatgttgaaggcatgactcgtgatatcattttctaaaatttgtttttatttcacaatagttgaaattatttattaacttctgtgctttcatgttacagtctgaagaatgtctaaagaaggagagggagagagtggctcactacctacactcaagcagtgagccaaagctggttgaggttggttattatgcactatgtaattatgcctgtacttgtaggtttgatgaagaaaccatagatcttgcataagccttgattttgaattttgttatttgtattgagatactttccagactctttttaaatgcgtagtccaggcatacttgattttaaagattgatatctgtttgacttgtatagtaatcttttgtatgcagaaagtacaacatgaattgctggttgtgtttgcaagtcagcttctagaaaa

SEQ ID NO: 18101 - DNA, 1940 bp, Arabidopsis thaliana landsberg
tgttttaaataaagattttttttctatttaagaaaaatgataatgtttttgttaataactatatattactgacttaaataattatttcaaaccataatatatattttattaaatatctgatttataataaatattatggtattgatgaatattattgaacaattgtataatatataatttacaaaattaatatgatatcttattgatgaatattattgtatttaattaagttatataactaaagttgtgttaaattttatttggggaaattcacaaaacaatttggtttcccaccataattatttgacccaaattttcgtttcccaccataagcccaaatttgatactaataaatctctctccttctctccaaaaatcacattcgcaacacttagagaaaaaaggaaaaaaaatcaaaaaccctaaacacgatcatctcttcttcctctcgcctaattcaattctcttaacttctctgacgacatctccaccctccacagtagctccggagtattctcctcgccacgccatggattccaaccatcgacattttgaccgccgtcgcccacgaccatctgagtctgctccggcaggtaaagcgtctttgtcacttccttttctcgcaattaccatgttttaccaattctcctagatatacttgttttggcttttcaataattctcgcgtttctaggttttgttaagattgaagtttttgtttcttatacttggaacctgttgattgattcgtttaatccatgaatgtttgtttcgaaattcaaaagcatgcaaatttacaattttttggtttttcttgtgcgaattcaattatcgtattcagttttgaaactaaaaccttgacttagttatgttccaagtgagtttttcagttttctatttgagttatattttaactaactccataatgtttgtgccattgtttggggttttgtgaacagccaaaagtctttttattcgtgacattagtttttttggtaaaggaattagatttcttcacctaatatagaatttattttagaacattggactaaaatgttgaacattgttgctgatttagtagaatagatcgtttgatatgatacaatgtacatgtgatttatctatttgtcattgctcaattttgttggagcaaattagtgtttgattaaagaagtcgtttgagtttaaaagagtctttgattgttgtagttggagtcaatgattgaccgagttttacggtctgttatggtcacgtttgttactctgttcttgagtcttacgtttagaagtctattgtgtaaagacatataagccgtgtcttgcaatgaataaaagtacaagctttcatgtgtttagagcttttgttcatgtgtttaagtttgtctaggtttccatttcatgtctcatttatttttttcgttagatatttatagtaacacgtttgatctttttttttgcaagagctgaaccatcaaaggatacctcctggagctttaccaaatggagctgtaccaccaggagatacacgatccccaagtgctgcttcttcacattcaaataactatagccaaagaacgcttgatgcattgttgagtgctcctgagagagaatcccagccacatctgcacccaaggaagcttaatggagctttatggtaaatttataataataacagaatgtttgtttggtttgtataagtttcttcatagtctttgaatctaatgtttcattctcttttctcaggtttggtattgacccctctgtctacaaattcgttcgcacaacatgacaaagcaatttcatgggaccatggaaaaattggtcagatgttcctgaggataggcaagtcacttggtggcacacatttgtggtaattttgattagtttttttatgctaacttacttttattacttaccttacaattactaatctctgttttt

SEQ ID NO: 18102 - DNA, 298 bp, Arabidopsis thaliana landsberg
atgttaaccggtttactccggtatttttaattttaatgatttaaactttaaaaagttttaaaatattggaaagacttaactttttaaaagttaagctttataaaacgttttaaatatatattttaaaactttaatgaagatttaaatattataaatatttgaactttataagaagtttaaatattataaaattaaacattataaatccttaaaaagaattttatttgggaccattttccaaattaaaattgtgggatttaccatcaaatgaaggtttgagcgaatataattttttttg

SEQ ID NO: 18103 - DNA, 1123 bp, Arabidopsis thaliana landsberg
tctctgctctcgaaataattttatatgctcgtttttatcatagaaacctcttcttttcctatcaaaaacatacaattatagattcatatcattctgtgtaaatgtgttgatttactatttgttatttatatcatgatttctgtataaattgtacggttttaaatatgatcacagtttctttagaataatcataacatggctgtaaatgtgtagcatgtggttaagttttttttaatatgtgctgatttactatttattatttatatcatgatttatgcaaaaactgcatggttttaaatatgatcacagttcttttaaataaccataacctattaccttagtaagtcacgtatggcggtatgcattacaacatctggttatatgatgaaataacatgttgtttttaaggagcacatgggtacataatctatatttcactgttagtaacagtataaatacttttagtacatgtaataaaacataatatcatgtggctaaagtctaactctttgtttttcagattaaagtcgtttctatttggagtggaacaccgactggtgacgctttcaagtcaggttgggtcgaggacgaagaagatctatctgttgactacatgttgcaactaataaaagaggagcacatattcaaggggtccatgttttcaggtggtgttgtccttgattcgctacccgatgaaaggaatgacaacagtgatgtatgtagcacttatgattgtgttgatgaggataccatacaacctgatgcttccttgcctggctcttctaaaccccgtaaaactaaagggcaggttcacataccagattcgattaaaaattacattgacatgaaagacaagcgtatggagtcgcgtatgttgaaggctatagctgattcagaggctagattgagcagcttgttgagggaaagccatggcaggaagaataagcgtcacagtggtcctaagtcaagagatgtgggtgagggattaggtgggaagaagggatcctcccttgttgtttcggataatggcatggttccgaagtctaaagagaacattactcctatatttattaatcaagtcctatctgaccggattcctgattttatcctctcataaccttct

SEQ ID NO: 18104 - DNA, 1070 bp, Arabidopsis thaliana landsberg
  unsure (1)..(1070): unsure at all n locations
caacctctatgcacaagagctaagcaaggctaagcatttttgtaaatcataattttgatacttcacagaagtatctataaaggtatggatatcaaggaaagcaatgcatcaaagggtttcaagtaactcctatgaacctaatgcacatttcactagacttaagtgtgcgaaaagtatttaaaaacacaaggaaaggggttgcatgcaccggggcttgccttcgttcacggggtgagtctggctcggatccacaaatatcaaagtagaagcagttgcctgcttgagaatccgagggtggtggtgtcctttcttcggtgacttccacttcttcttcacgttctaacataatcatatatatacatatataagaatgaatgccatgtaatgcgcatgagagtgcgaagataataaagatttattatctaagtcttgaatacaactttccttcacggaactccgagaacttagggtttccggagtctgtaaaggagttcaaagggcaggggggtttnttgggttctagttatcaaacatggtccaaatcaattcaaactctacccaaggcttctaaatattgttttaagttcatataaaaagtttgggcatttttggacttaccaattggtttctaaaaatccataactaatacttttaactactttaaatgccctaaaatttcttattttctctaaaaatcataaaactatttttattaaattctagggaaaataacaagcctaggaaaattggtttcataattttaggatttttctacaattttctaaaattgttttggctctggagtaaaaagaaaaagaaaacagatgaatagtactgggctgatttcagcccagtggcccagctcagagggagaaaggcgcccgcgcgcgcccgcgctggcgatcttgcggaaaggtccctggggttctgggtaactggaaataagttcctgtactattcctgtgtgccgctgacagattacagaaagggcccttcccttttatttcttccccgggaatgcccctgaccacggcgcgcacgcagatcgttccggacacggtccgtaccgc

SEQ ID NO: 18105 - DNA, 224 bp, Arabidopsis thaliana landsberg
tgtacacaatggatggtccaaagaatggcctttagctgcagatgaagagcgcggtttgttactcaaggaaatcaaattgctccttgtgtcgctttgtgaccataaaacgttatcatgcagtgttcgagactgggtgatgcattttccggttaagcatcttgaaaaacttgaagtctctgcacagagtcttgtctattctcgactagtggaaacacctcagagta

SEQ ID NO: 18106 - DNA, 801 bp, Arabidopsis thaliana landsberg
tcaagagaaaaggtctctgaagggtaaaagtgaagagaagatatgaaggatcaaaattgagaaagacctgaaggagaagcatgaagctgccttgcacgatcattgcagcttcccaacaaagctggaggcagtccttcattgttctctatcactctatcctcttcttcgattgcctcaaacacacttgcacggagttcagcctacagaaacaactaaaatttcagcagaagaatatagagaaaaaaaaacaaatcttcaatctccaaaccaaatgttaaagaatccaattcagctgagaaggtacaattttttcacagactcaatttcaaagtacgacaaaaactgggaattcacatgattccagatgcataaagtagatctggaagcacgaaccctagaaaagcaatgtatgttttctcttcttctctgtactcaaatctctctacggaatttgaatgaagtatgtcacagaaccagaggaatcgtggcaagagaaaaacaaatatacccggatcttagcgagaacacctttcttctctagggttcgagtgactaaggtcttgagatccatcatctctcttgtataatcgtccattgttcttaccgccaatttgacggatcagatcaaaataacagattccctactaatgcaatcggattatttggtcaccggagaattctacaatgccgttctgagagaagcttttgcgtcatccagagttggcttcttcgatactttagtttaaagttttaaacgaagaagcgagagagagagagaagactaaagggaaaacaaaaaac

SEQ ID NO: 18107 - DNA, 717 bp, Arabidopsis thaliana landsberg
cttaattaatatccgaactttgtcgacccataattattagttcgcaacatacattgttattgaagtcatatacaatgctctttcatttgttatacaaaattagatttaattagtatatatgtgtgtgtcactattgaaaagttttttagtactcgagtgcttacctcatctcattcagagcttgtccctagctagttctgttatggcatcttaccgtgtcggaaatattacaattgtttcttaagaataagatttaacgaacacacacacacgtatatatatatatatatatatatatatatatatatagcatttatttttgttcttaaagcttacaaaagttcaacaaaatattgtattagattaatattcaccaccaaaccctggatatgtaacaaatttccatttattaattaattttaagagattttcagaattgttgaaaatattatgctgcccaataacggtagctagctcacagtggctacatttttattgttgttgtagatcattttctatagttgtttgttttatttgttcacgaatcctaattccaataaaaagaaatctaataaacctcgcccagtcaatctacataaaaacacttaaactaaatggtaaatgaaatgagaaaacttttaattactttagtatcatatgcttcaactataacttaaaattcactcttaaataatctctattacaatcatatggttt

SEQ ID NO: 18108 - DNA, 588 bp, Arabidopsis thaliana landsberg
aaacaaaatttggcctaaaccgcgtttttgggccgcttaaataacatcctttaagactatcccctttggtcatcaaaataaagggtttttaaatataaaattaataaatataagaataaaaaaggaatttaaagaatcaaggtgagatatgtgtctttctacaaacatttaagaccttgtaaggtttgtttaaagacccttctctatatgttttttttttaatggtcagtttgtttttgatatttaaatattaaatattttgattttgagaagttaaaaaaaaatagttcagcaatgaggatgctctaaggtaagtgaactatattttcctacccatttataaagaaaagaaaacaatttaaacttaatttaaaaaccacagaaatctgttcgggtttacagttttaaaccaaactgcactaatatgctaacaaaaccgttttgaaccaagagagtgttgtactgagctgaggcttgtcgggaagcctgaagccaccatgaaaaaaagagcaaaacctaaaatcaaaaataagcaaaaagactctgattctgactttttttttagcccctccctaaagcctaataata

SEQ ID NO: 18109 - DNA, 1078 bp, Arabidopsis thaliana landsberg
  unsure (1)..(1078): unsure at all n locations
gggccagaagtggaagtgttatctttaaactttcaaactagtctttatttcttttcatttttcatggtagtcttttgagtgtgttccaagtcttgtatcttctttataaaccccttgtaatctattttgagaactcatctatcgttttatcaaaaactctctcttaaaaatagatcatggatccgttttcgtatgtcgaattttgatctttctcgacttatcaaaaggcctttccgcatccttttgtggcgtcattcaatccatcatctcgactttgagtcgtgtatcgtctctatttcgagaatatccactctaaatttccaagtgccgaaattgggattaatctctctgcgggaatctatcagagtatcagagcacacttggaggttaagtcgtttctgtctatcatcttgttttaattttcataatgatttggcgtgtgctaaaattnnnnnnnnnnnnnnnnnagattcaaaaaaagagtatagtatttgttaaaattgtttctagcattgttttgcacgatttgataattattttttgctgatcaagtcaaacagtcgtgattagggttctaggagagttttgtctaagttgaagggtcattttgtgttttttgtgttgaatcctttcaattacaaaaaggaacttgttactgaagtatttttgcttattttttcaggtcggaattgcgaaatctgaggagagatcaagccatgacccgaacaagctcctaattgaagcctttaccacaaacatggagtgaataatagacagcaaaatagattcattttgtcaagagtataaaagcgcacgacaaaggaaggaacaagatcttaaatccaagccaccagacgacataatgagatcaacacggatcagcccacaaaatatctctcacactgccaaatccaaatctttgacttatcctgaatattatcaattggctaatgaacttaataacttttcaggaaaaagagactacctagagtgggagaatgacacggatgaatggttttacgacaaacacatcccaagagagaagagattatcttatgcacttagaaaactcacggga

SEQ ID NO: 18110 - DNA, 967 bp, Arabidopsis thaliana landsberg
aaaatgtaaaaaaaaaaagggcctgaaactttcaaaatttggaaataaaaaaaacatgaacctttgaaaaatattatttttaatcataaaatttttgttaactcctcaataaaataactaagtttcgttaactggaccgtttaagacatgtcgttaaatttccgttaatagaacgaccacagaaataactttccgttagaaacccaaaacgacatcgttttataactaaaaataaaacataaaaatggcagcagcccttgctcgctaatgagacatgtgaaactccttacaagcttttaaaccaatttgccacaataacattattatatagcttcaacaaacaaaatttatatcaaatatctagcaaacttaactgaaagtaccaaaactccattgttgcttctcacgttcgcaaaacccaatcacatttcagtttctatgttgattgctaggttcgcgattcaaatctgtgttttcttcgtcaaaaattgaacatgagcttgaaattacgatctaatggatcgagattccgttggatctcctcctttaggctcaccaaatcactatggattttattctcaattcacttagttttcaaacccaaattattaaaaagtctgagaaggtgaatttgtttcttgagatgcacctttgatacccaaactggtcaatgctcaaaccacgacggaatctggattacggagagagaactccaactctagaaaaatggatggaggagacgaatgagaagaagaactattaagaaaatgaactttgaagtatatatttacttttggaactcttcccaaactctacaaagaagctcttctctttcaatcttcccaaataacaaatccgaatcacgagaaacttctttgacacttgactcataaaatctactcaagcaaccgtcgatatatggcgttcactatggatttctctctcaaatttgttttctcaacgaaca

SEQ ID NO: 18111 - DNA, 393 bp, Arabidopsis thaliana landsberg
ctcaatacaaaacctttgatgtgttactttgtccaaaacgagctaaaataaataatcgaatccatctaatgactcaaggacaaatcaaacccgtgagtcttactgcaagagatagagaggtagaaggggagagtgagacatagtgaaatcaaatccatgaaacagagagatagaaggagagagtgagtgagagagagagaacgcacgagaaatccggcaaagaatagtggattacggcaagagataggagtgaattctagtgagagatccggtgaagaggtccggcgaagtgaatgtcgaggaatgaaggagaaataggtataggttttgctgtaattctttataggtaggtgtatttgacgacatatcatctcttggatggaatcagcgtcc

SEQ ID NO: 18112 - DNA, 598 bp, Arabidopsis thaliana landsberg
gcaaaatggtcaaatttcagctgaaaagacaaaacgtgaaaaccacctttcactttggcaattcctgaaaataaaacatgatcaaagggtgtggcttgcaaattacccttagataaatgagaagcgtatataaagaaattagtaggagcgtatcaacttaaaaaaggaaagtttgttacccgaaccatgtatagcggttagattatcaccgaaccgtgtataacggctagattatcaccgaacctaaggttggtgttttgctctgggctttaaacaaaccctaagtgaaaaggaaaaaggaaacttgagtctcaaacaaataagtttataaatacctgcgtctcgcgtcttctatctccacgagttaaaagatgcaatttctctgattagctttattatcaattctcttcttcgatatctgtctgcttcaagatgatgatgctctgattctttcttcgcccttcgtttagaaagaatcattccacaagtcaaagcccaagaaagactcatacatatacaacggatctctgttcacttgttatagctacgaagaagacgagagaaagagatcatcacacacgcaagcataacgtttcgt

SEQ ID NO: 18113 - DNA, 737 bp, Arabidopsis thaliana landsberg
taatcggtgggcggcaaaactccctatatctatagctaataataaccggaaaagccgagaaactatccacctaaatgtgcattcttaccgagttcaatttttcatcttagtagataggctgattcttattacacacctatgaaccagattcatcaaataatagatccaactatagatacctatggcgggcatatctattgtatggattcaagatctagttaattactctagatctagcattaagcataattaaagaaaaagaattctacagataacctagcagaggggggcaaactactaaaccatatgaatccctaatgagaaaccctattcctaacaagcagactactcagacatattgaatgaaacaaacaacataattgagatagaaagcataaacacagcaatagagataagagttagaaaagatctcttcactgtattaaggactgaaatgaatctctcaagaacaatagatgattagcttctctctctcagtaacagggttttgcaaaagcttgataaaagacttgatcaaagaaacttaggtctaaacaatgtatataaaccctaaaaacgtccagggactgattaatgcaaatagggaagtcttctggagcaaatttcctcttctgtaaactcgaaagcatctaggactttgttgggccgaaactggtgtcgatcgacaccaaaactgtgtcgatcgctcactactcgctgaattctatgaatccaaa

SEQ ID NO: 18114 - DNA, 3303 bp, Arabidopsis thaliana landsberg
gagaagagaaagagaaagaaatggaaggaaaactgagaatcacctaaattttggccaattgtttagcgtgtgttttcccgcaatttaattgcggcgacgtcgctactttgacgcaaattcgtcacaaaagttggagaaaagcccatttggccagaagggaacaaggcccaatatgtatggatttttgttattaagcaagaaactattaggttaagcaaaagtattatatagggaaaaaacccaaaaaaaaaactcaagtaattttgatttggacgtgtaatacccaattgtttttgcttgaaagataaatacacgaagtaataaaactatgcaatttaatacccaaacaattaaatgttgttattttcatactcacgatctcacaacaaaaataaaattccaattttaccattaccatctcaattaaccattaattttttaaatgatatgataataattttataattttggataaaatttatttttaaaatttttttattttatggcgtctaaaaattttaaatgtcatttttaactagaattattttattttaaaatttaacattaaaattaggagaaaatcacaaatattttttaaaaagatctttagaatgtagttttcatgattatattctaaagatctctatatattttcgtctctatactaattatgaaattcaaatagaatttgactgccaatttaccatgtactagagacattctaagtttttgcaagaaaagttgatctatggaccatatcttcgaatttatccctacattattaaaagggaagtacaaattgaaattttgtctaaatttggcttcaattttgatttcaattttggattttgttctttgctatttaaaatcattaagagtaatttggtcttaacaatctcctaaactttatatgatccgattgaatctaaaccgttcaataaaattaattcccttttaatctaaaccgttcaacaaaaataatattcaaattatatattacgattcttcactaatcactaaatatttatatttataagtttaggatatcaaatatattcaaatatttagtataaaaaccaaataaaccgattgcccgcggtaaattgcgggttaaaacctagtagagagtgatagagagtgacctatgcgttattgttgtcaatttaatcatctatttcgtatctcacacacggaatctcaccacgaaatggatctttaatctcttaatgttatttagaagtttggctagtttacagtttcaggttgcactaaactctaaagcctgctttgtaatacttgcgcaataaattttaatctctacttattattgtctattctaatcacttcctgctcaaagccaatccttgcatgtataagaaaaaccaagtttaatgataatccttagaaacaataatcaaaaccgtttttgctagtcctatatatatactataacagtcttacgagaaccgtcttacgagtaatataatagtaaccacaatagcaattatcaccaaaaagaaaacaaaacagcagcacgaaccacaacattgtgtcaaatccagatcatctctgccaagaccatgaaagcaatctccagcatcggctccacattggtagcaaaacgtatgtccacatctgccatttatcaggtaaattgtgttgatacataaattcgaaataaccgaaaagagatgtaattagagatgatacctgcaaactacactgatgcatccagaagaaagttcaatcatgtgtttacacttgctgcattgacgccacgatttctcattcgctagatctcttagccttccatcgttttctgtaggatttggatgtaacgtcttgtactcgtcgcacgacgagttattatgccacgaaactttgcacttgacgcaaaagggttcgccacattttacacagcatctcctcactccaatgttaagtccagagagctcggtttccgacattaaagtcgagcacctcgggtttgggcaataaactctatccattacaggaatcaactcatctttagtcttttgctcccacatcttatttagtttaggtgttaaaaggttgccacaacgaacagaagtcagcagagaattgcaacgataatgaggacatgttatcaaacttccttcaagtagtctcacctctatatgtcgtttcacacattcagaccaacacatatgaccacttttatcaacggaaaacatctgatcagcattgatgtcatcgttcaaacatatattgcaagtttctttctgagcaggaatatctatgatgatctcagaagagattgcttctatcgcaaaatcgtaggctaaattagactgattttgagtcaacataacagggatgctagaagtcaaatattttctgatgccttgcacatcacgcagtagcaaggcaatgctttcttgcttaggagtggatattcccatgacctaaaaatatttcaaggaaaaacattaattatgagattgaagcaaatacgtgtgagccaaggaaagcttaccaattcgaaaatatattcatgatcgcagcaaattaagatatgattgatccccaaactcacggcttgatttaatccgctcttcaatgccataagctgagcctctaaacccgtaatagcggagtcatgaattgatcctttcatgatttgggaggtcgagatagaagagaagacgaaaaagggtttttatacgttactgctttaaagacactctttaattctccttttttttttttttttttttttttgggtctttgtcatcatcagtttactttacgttactgatttcaagagccgttgtggagaaatgtggctgcttctaattttgtatctaatttatgtacgctttgtttcacatttgacatctgatctctttttactgtatcatagcaattctttcttctatctcttttaattattatacttctataccttcatttgttaggtagaatgagtggttgtggactgagtgcttgatccaaacacgtggcttcctggtgggtcgctaacaaacaattgagatcacaagctttggtagcaaaaaaattgaattcataaaaagaatacgtcgtcttttagatcacaagctttgaacgttagcaaaattatgttacctaccaccagtccctggcttattatatagagagagatattcacatttacaatttcgatattgtttctctaagtcgtaaaatagtaccccaagccatttataaatttcttcactctcagattcaaaataatataaattagaaagtaagtcttacactctttgcagtctttttttt

SEQ ID NO: 18115 - DNA, 1805 bp, Arabidopsis thaliana landsberg
actttctatctttagtatagatagatattcaaaaaggttaaactgtatgaagattaataatgatatctcatacttgtccaggacaacaccaacatccctcgtctctgcattcgcctcgagtaaccaattttcttttacaaaacacagtgcagcctctatcccctccgcgttcacacggattgaatttgaaaccttggcaactttccccgatgtcaaaactaggacaacaccaacatccctcgtctctgcattcgcctcgagtaaacaactttcttgtacaaaacacagtgcagcctctatcccctccgcgttcacacggattgaatttgaattgtttgcaaacttctccgttgtcaaaacctatttaataataatcaatatgtacattaagaaatattatagaaaaaaatatgtttttaagtaaagtgtggacagtataataataagccaataccaggactgctagcggatgtagactggcaatgaacataagatatgataaagagaagagtgaaagtatacacgactaattttttttttgtgatagccattttatgatagacttggacctttgttttttacacttaggataagtatatatatatatagataaagtgtgattttgtggtcaaagatatatgaaaaggaaaaaatcttccaatttcttttcttagatttatagtcaaaaaactaaacaaagaaaaggttttcttacctaacattaattagtgattttttaaaaacttcaatttgcgataggttttacagagtataatggttgtaacgtgttgaaattctattaaaacaaaaaaatactttgtttaaaagaattagttcatacgccatatgttgcacacaaaatattgttttgtgaaaaaagaatgtcatttcaagaatattggtcgtcaaacaaccactttaattgcttttgatacttttcagtgagtatttggtgaacttaacaagaaacaaagcaaaggacaatatcaaagatattgaatattacaatgtttgatgatgacggtaaacagatataaactgaagtgcccttatcaataggcaccatcaatataaataacaatagggcttctcacattatgtgtgccatcagaccatattagatttgcagatgaaggcagttttggatcgctatcgctacctgggacagtggccgtgaaagacttcttttcactcaccgtcttaaaagacagaacactaggtgtgaccttgacgttgagctttgatccttgatttaagaccacctttgatttgtatgttgagttgggcgttccaacattagtgacagttctgttgaaagtcactgtgagtgagctttcagatcttggcaattgagctgacattgaaggatagttgaggtttcttggtaaggttttgttttctttagtgcaagtaattgtttcaccagctatgagtgcaagggtatccgcagtgtaattcaagccgcagagaaaagcaatgtgatctgctttgtccatttcatagacgagtccaggatttgtcgcagctattggatcgacatgaccagctccataagttgctcgtttacccatttctctacaaaatatctaaagttaattctctaatttctatggagatcaacatgaaggatatatatatatatatatatatatatatatatatatatagaaatagatcatgtatgcaccctgtaaaagttcttctaattctattttttctttagaaagttaatcacaattcattataaagttataacacaagatattataatctagtgatatcattaactaaaattaaagttaagt

SEQ ID NO: 18116 - DNA, 693 bp, Arabidopsis thaliana landsberg
agttttagacggaataattctgcgtagaatctgaaattactcagtcagtcagtctcttatgtatgttctataatgttccaacggtgattagttatatttaacgttttacatgtctgtatatatattaaattgtcaatctgatccgattaatgttagcagagtcaactcgtaaaccaataactcattttaatataggagtctcatgtacactctcaactaaaatttaatgtttcgcagcaaaaaagataatgtaattagttgagaaagacattacaactgcattgattaagtttatgtaacatctcctctcccaacttcaaataattgagtctgttcccatctgaccagctcttggtatttaacgtgtacaagacaaaactgttaactcttaactaaaacactccaattccaaatgccgattatttagtttttcaaccataccgtgaaaaactaaatattcgatgaacttggacaaatatgcaataaacatacatattttcttacgggccacggtgaaagggatatgtaccatgataatgaaggttgaaaaaaaaaacagattatgataatgcaagaagtatacgaacaaaaaaaaccatacatgttttcttatataatttttgggaaactcttatatttagaagaaatatcttaattaaaactgtggagatttggaggagaaatttttttgac

SEQ ID NO: 18117 - DNA, 677 bp, Arabidopsis thaliana landsberg
tgttaagtttttattatcgattagtgtggggcacatgccccacctcctgccaacgtaggtccgcctctgcttacatttgatatggtacaacttcaatataaagaacatttttcgtaaacttaatgcatcctgtatatagctcttgattaaaatcagcaagtaactcatcaaaatcttctcctttttcacaacttccacttgcagttgatggtctatcagtgtctatagggttctcagatgatccagcttcatatccaccatcattatttgtactaatattaagaaaaatatcatccaagagagtcctagttgaatctaattcaactgaagcaatatcaaaaggcggtactcttgtattactcgtgacacatatatcttttccatgtagtacccaatttgtgtaagaatttaaaaatccataacacatcaaatcaccatcaatatcttttcttgaattagttttaaggagacaacaacggtaacatggattaaccaaatgcaaaatccaataaatttttcacccccaatatgtaatcttgagataaacggggtttgtttatccatgatttatccatcaaaatctaaaaaaacaaaaagatttgtatttgtaagctttagaatttgacatataaacattaaaattttaaaaccttaagaaattaaaaataaatctatct

SEQ ID NO: 18118 - DNA, 512 bp, Arabidopsis thaliana landsberg
tagggttttcgagttgaaccgtctaccgtatggcggttatcccggccaagacgatgtggatcgtcgcgggaagaaaccggtggtagagactggagacgacctcgcgccggggctgccccgtcctctaagaagaggaaactaggtattgctatgggaggactgggggtttctgatggttttgctagggaattgatgaggacatgcgtggccccggggggaaggatgtcttcgcccgagctccgggagtcttcggcgcggatgctgagggttaccgggggttggtggcctaggaatgttcctatcccccgcgcggccgacgaagacttttttacatctcgcatggttcgtgattggaaagtgtttccttacgggcggaatattgctgctgttgtgtcggcagtgatggacaaggatcgtcagggagctgcgcagaagccgcaggcggtcgtcaggcttcatgaggccaggccgaagaggcgcaggggggctgcgaaggctgctgctcctagcgg

SEQ ID NO: 18119 - DNA, 776 bp, Arabidopsis thaliana landsberg
tgttttctacttcagtatggacacctctaaagaatgttatatgcggccatacttaataattgtttattaaagtttcgaatgttacctttaagaatcggtgaagcacctgcacacagctcataaaatatatgataggatctttcaccattgaacagctgaaccactcttgactggtcaaacaagactaccaatttaatcaccaatgctaagtagttaaagtcaaatgaaaaaagcttctcaatggaaacaaaagtaccttctctagcagaactatggggattcagcaagagtagttatgcaaaacatggggaagaagacaataaaaacaagtgagcttgcatactaaacaatatgacaaacaataatataaatgctcaaatcatacttacaagtttcaagtttggctccacatatctttcccattgcactaaaatgaatttctatgagtttaccctgtgccaattaagatattctgttaaattaaaatagaataacttctcagtctacaaaagtggtggtcaagctaatcaagtaacacattaataataacttgaaaagatatggaaggggaaaatggacaaacaagcttgtaaaaataactcacaaatcggctagagttagcatttcttgatgttctagcgttttccaaaagctttcgagtatgccaggttcgtttttagggatttcataactctacttccacagcttactttcacccgagagcctgcccaagtacttgcatttgcaaattttttgcaggtcctcagttttttccc

SEQ ID NO: 18120 - DNA, 2242 bp, Arabidopsis thaliana landsberg
  unsure (1)..(2242): unsure at all n locations
agatgtctataacaaacttatcaagcgatgggcttggtttgtgcaccatcatgtagcaaatctggaagagataactctcaatacctgataagggaagcgtatacatcctattgcataagtaatccctaacaccagcatgagggtgcttgtacagataactaacagcaatccactcacagaagaaagcagaatcgaaaaacctaataagccaaccattagaaccagtatcgccgatgatattactctgtgaggtaatctcacgaggtgactcagccgagtctcctcggaccaaagatagaaagcgtcccatcggcatcctaatcagccaagcataaaaagccctagctcacagacccaaatcatccgtcgagacaacagatccaggagactcttccaacaaaccagattaacggagcctctctcttccccaataactaaaccctaggattacccgtaaaaccttaactcaaaaaacctatctataaccacccaaagctcaaaatctcaatgccaaatcgacgaaatttggctttataatgcttaactttcctaaatcgcgaaaaaaacacagaaaatagagatttctccgtatcctactcactccaatcgccgtaaaccgaaggcgatcggaaatttctccagaatccaaaactaaatctcacgtagagaaccaagcgatgagctaattaatcccgttcttcctgctatccgagaaattctgcttgttaaaattcagagcagaatcaagtaacagaattagccggagtagatcgccgtcgtctcagccggaagcagtttgtggtggaagatacggtcgtcgtcctcggctgttggtggcagacagagagagagagagagagagagagaggggaaagtaattatcgttcgcaatacttttaaattattttcatttttttattaattttaatttttttggtttttagtaattcgtactatttaattattattttggtttggcgagggaggagatctaacgtgcgctggaaagtccacgcgatcataataaagttgaaaatccttggtgggaagtaaacgtgatttgtccacaacgggacacttggacagttgattaacttttgttgacagttgatttttcgttatttgcttgtcaaaagattattactattgagattttgaattttgaatctgatgagctcattacaagaagtgatattctgagttttaaaagagacgatatatatgtatatctttcacgatgccacgaaacattttgtttcctttcactttcacgtctctaattttcttaacacatgcatttccttttcagatgaagaaattttgtactcgtttgatagaacaagttgtaattggtactatagtcaaactacactgtaacaaaatataaatatgatactcttgacaaaaaatttgggacttacttactgacaatgacgatattaatgttgttaacatcaaatcgataatagtgggaataaatttgagctatgtggaccatgatattatattccagaaggacctatacttcttccctgaagagggaaagttctgtttatggggaggttgagtcacttttgaatatttccaaatttcatctactaaaatgatatcatatgatttcctgtattttattacacagttttgttgagaaaattaaacgaaattaatgaattttgttgttagtcattgcaatattacaccatattttttttaaaaagaatatataaatgttacttgtagtatttcttttttgtatagtggactttgagaatgtttctgcctgagcttttggcgaatataactatgagggtgtgagagaaaacatagatgaaggaataagcgatagatcgaataaaaggaccaatgttgtgagacaaagtaataacataaactaaaagagtaaacgctagtaatagagaaaccgatatggtctaaaaacagaacactccaaaacatacatagattaaccctaataaaaaccattaatcaatttcatacagccaaatctagctggtgaaaaaagattcagttttttttttacgcactagagaagaacaaaacgaacagtacggcactgagtacagttgtgaacgaggtcggaatcaaagaagatccatcgttccctgaagaaggatttggagctagatatccngctgtctcaggtccagcagcagctactcctggagcaagacctgataaaattaggttccacattaagaaatctcaaaagcgtaaaacatct

SEQ ID NO: 18121 - DNA, 1932 bp, Arabidopsis thaliana landsberg
tcaaaatgccatacatctatttttgcttctttccaatgattccaatcccatctagggatctccactcactgctttccaacacatccttatattaatcttaagagattggtttcaattccgaagattgatattggtttgtttaagaagaagattgatttgtgtttttctcctctttctcccataaatatatataggaaacagaggaacttccagatgctaacaaataatgcagatggagaattgcatcgcactctaccttttgaattttgatgacctcagactcttcaagtatgaaaaacttttaactcgccaacatttgagaccaatacagatttatagaatctgaacaagcatcatagttttatttattatataagtctcaattccatgttttgataagcaatgccaattgccaaacaacaaacattgaaacaaaaatccaaaatactctaatatacccaaaatactctaatatagatcgatcgttgactttgcgctctggacaggctgtactcaaatttgagattgtctcgtcatccgcaagctacaaagtgtctcgttgaggaatcaattagtctctcaaatctcaatctatctctctctctctctctctcggtcggtagcctcaatggattcagagtcggagctgaaatcactgttttttcaaattgtatcagtcccagatgatagggagaagaagtggacggtcagaccattggttattaaaataatctctctggtgagctcaatggatttgactacagaggagaagccagagtctgatgagctagtgttactcatccaagagatactctctctagtcaactctagggattcagattcccagccaaagcggctggtggagctaatatcattcatttctcaaaagatttctctcattgatgaaactttggaagtcaaaccggagccggaacttatctcactcactcatcaaatactctccctcgtcgtctctatgaactcaaactcgggggagtatatttccttgtgccctcaagcacaagtaaaactggaaaacggaagatttcgtgttcttgaagacgtctcgtggcgcaccaataacaagtggcattgcctttctgtaaactggcggacattcaagttatcaagagaagaagacactctccattttatctgcataggttgcaatggcgataaccataaagaatttaacaatgttcctgttgagatcaaccatcctcttcatccaaatcattctctccagcttgtcgtgttgcaggaagatagtaccagggaatgctattgttgtgatgaagctcttagccgtatactttattattgctcggcttgcgattttgctataagtatactttgtgcgaggaaaccaccagtctttttgataaaccatcaccgtccggagtggcatggtcatcctcttgctctgtttccaagacaagctttcttaacttgcaacctttgcgccttggccgatccaagctctcctatctatatgtgtccgccttgtgactttgtgactcatctaagatgtatcaacttaccacgtgtcataaagatctctcgccacagccatcgtatctattttactccttcgtttgaccaagaaggtttgtcttgtggtgtttgtcgcagaaagatcaacaaattatacggaggctattcttgtatcaaaaatggttgttggtatgcggcacattcaagatgtgcaacacaaaaaaatgtgtgggatggtgtagaacttgagggagtgccagaagaaaatgaggaagaagtagatccaccgtttgcaacgaaaggaagtggagtcagacgacatttcactcatcgtcatcttttgagacttgatgtggacacgggaagagattacgtcgaggataagctgtgtaacatatgcattacgccaatctattttggtaacttcaactcgtgtac

SEQ ID NO: 18122 - DNA, 2053 bp, Arabidopsis thaliana landsberg
aaactacaagtgttatcatcgatctaaataaagtaaatttcgatttttgtatcattgaatcttccaatctcttacagtggttactaaccacactccacgctctctttacttggaataaacaagttttcatattaactcacgagatttttattttttggtgattccataatatgagatttgtgaaattatcatgttcattgttcggaaaaagtaaaaccaactacacaattctgtctgcctaacatttttcatatacaagtactagtgaacaagagtaaatttataacatgtgaatttagagaatgtcttcctaaaaagaagaagatttatgatattttagtaaacacttcgaaaatggataattattatgttttttgaccatgacaatagtttattcccactctccttgcttctcaagcaattatcgcaaaccccaagaaacaagagttgcatataaaaaggcaaaattctcatatttttctgcagaaacaaatttgactctagaaaagttgaatatattaagaattaaacaaagattagattaacaacagcagctacgctcacgtctgtcttattcccacagagtttcaaaaaccttttcgcttttagcagcttctcgccacatctttcaggtctgttctcttttaacttctttcctttttaatttcagatttctgattggttttagggttttaattagatctctgattttacgggcaagcaaaaagcatgtgacactttcccttaacagactctgtttcatttgtgattatttctgggaactctctagattgaaatttaacataaaggacaaatcttttcaggaatcacaagtgggttttttggatttatattagtaaactctgagattgtcaatataggactggcactggattgaaatgtttccttaaattctttatttttctctgggttttaggaaaaaaagttaaaaaagctttatttttcaaaacctgaagaagaaagctcgtaactttatagttctttttggttatatacccgcgatttcgatctgggtattatcagttttcttaaaagttaaaagctttctgatttttgtcagcgccgaaatatgaacggtgacggcgccagagaaggcgactctgtttcacacgaaccatcaacatctaaaagtcctaaagaaggagaagagacgaagaaagaggaaaaaagcgaagaaaaggccaacacagttcctttctacaagctatttgcgtttgcagattcttctgatgtgctcttgatgatatgtggctcaatcggagctattgggaatggaatgtctttacctttcatgacattgttgtttggtgatctcatcgattcgtttggaaaaaatcagaacaacaaagacattgttgatgttgtctcaaaggtaaaaatccaaactttactaattagttgtttgacaattgttgtttggtgatctcattctacttaatgatgtggcttctaataggtttgtcttaaatttgtctaccttggacttggaacacttggagcagcttttcttcgtaagtttacactttacttggaattgaggaaggaaagttttctttttggtttcttcattgcatttttggtgctcttgttattgtagaggtggcttgttggatgatcacgggagagagacaagccgcgaggataagaagtacatatctgaaaacaattcttagacaagacattggattcttcgatgtggaaacaaacacaggagaggttgttggtagaatgtctggagatacggttcttattcaagatgccatgggtgaaaaggtaatgcagttaacagagaaacttccgtattgcgatttcaggcttagatataatgattggattcgtttttgaagtttgttacacttttcttgaatgttgcaggtggggaagtttattcagctggtatctactttcgttggcggatttgctttagcttctgctaaaggatggtcgctaacattgggtatggtaacttcgatttcttttctggctatggctggtgcaaccatggcgctattagtgactcgagcttgttcta

SEQ ID NO: 18123 - DNA, 668 bp, Arabidopsis thaliana landsberg
ctttctactttttgctaatgtcagacaaaacccatgtgatcctttcttcactttccactgtttcttttattgataagattcatttggttacacaacagatgaacagagtccaagagggtacggaagtaattaccaatctatgcttgaaggttacgatgaagatgctacactaatcgaggaatattccggcaaccaccaccacatgggtctatcggagaagaagagaagattaaaagttgaccaagtcaaagctcttgagaagaatttcgaacttgagaataaactcgaacctgagaggaaaactaaattagcacaagagcttggacttcaacctcgtcaagtagctgtttggtttcagaaccgtcgtgcacggtggaaaacaaaacagcttgaaaaagattacggtgttcttaagggtcaatacgattctctccgccacaatttcgattctctccgccgtgacaatgattcccttctccaagaggtacaatattagagactttaaaccataaaaattgaaacttcagagacgaaaatgcaaaaaggtttgatttttaaagtttttgggtgcagattagtaaaaataaagctaaggtaaacgggtgaagaagatatcatcaacaactaagctattaccggagggtgttaaggaaagaggaagtttcaca

SEQ ID NO: 18124 - DNA, 853 bp, Arabidopsis thaliana landsberg
  unsure (1)..(853): unsure at all n locations
atcagaaacctgatagattcacctctagcaagatgagtatcgatctttgaaccgtcttccatcagaatatagccttgagccagcagaatatttctaagtcgcattgcaagacctacttcatcaatgatctgattgcagatattggaccccaataacctgatggactttgcaaagttcagttcccactccatagcgtcttcccagttgctaacacaagaagaatccgaattcacttttccccccctgaatctcgtccatagcactggtgttgaagagattgcacattgtatttgttgttagccgacttaaatgattgtagtgaggaacaagaactgagattgtttgcctcttgagatcatttgacctttcccccaaccacctgagccacgtaagccaaatagactaatcaaacacaaaactgaacaattgcataccgttttgattgcgaactcgaataaagcctgccagcttattgtacacaactgtaaactactgtacagaactcataacttcactcatctgatcagattcatcagatttatctggtagagacactagcgtttgatcttctgaatcagattcatcaaccaatgatgcagtgcaacatgattcnnnnnnnnnnnnnnnnnnnnnnnnnnnnnnnnnnngttgtccttccatctgtacaaatgcttgtttgtcaacagctctacattatgtttgtgtaaaaatgacacttaaactcacatcggagaggttgactgatattgatcagattcgctttgagtccatcgacatggtatacacctgttagatgaggcagagcttgtctgaagtgtgtcccttttttttaccanggcatgtccaaattgac

SEQ ID NO: 18125 - DNA, 663 bp, Arabidopsis thaliana landsberg
ttttttgaatatcgtcccaccgtgctctttaaaataacacactatgatgcaggaaattatatatgttgtaaccctcctataaatctaaaggtaattgcaatttaaatgctctttgtaatttcgtaagtatattgatttttaaaaagtttcgatcaactaaaaatcactaggatatttttttgtacactagaaactgatagttatgtgtcgacaaaataaaagagaatgataattgtgtatatatataatatgtttttgttaagttgataattaatattattcttaccaaaaacagggttatgtactcgggaacccgataacgcacgaagacgacccaaactatcgcattccattttctcatggaatggcactaatttcagatgaactatacgaggtatgaaatatgtggcatgcttaaattcgactagtcttgttatccttggcatttttcacaactctttttaatgttaaaaacattttcttattaaaaaaaagtcaattagggaagcctgcaaaggaaattatttcaatgtggatccacaaaacacaaaatgtttgaaacttgtcgaggaatattataaggtacacattgcacactttgaaatttggtcgatgttcaataatttatcagaaagtggaacatctaactcagatttgtttttc

SEQ ID NO: 18126 - DNA, 1812 bp, Arabidopsis thaliana landsberg
aaaatgttatagtgtgaaaatttataatgtggcaagaacaaaaagctcatattttatgagcttgtaacttatggtggtgtactggacgaaagatttattatggtaccatcttaagtggtaaaaactaaagagatagagacagaatattctataatacagatattcaccatccacagcaattggatattcattcacatatttacaaggttgaatccaatacatatgtgatcatggatttaaattaagggaataacaaatgaacagtgtattgtttttgctacatggtattatggtatcaacctacgacttatttacaatgtcttgattgtcatttgtttcactttctttgacgaccacaaagaatgaaagaacccttcttctccctgcacatttgaatctcccaacctccctttcaagcaagcattcttgttcgagactcgaatcaaccaactcctatagacttgagattccggttttggatatactttttgttttgattacgtccgtggaaggaactgtccgcgaaaggaatatgttaccccttgaatctttcctactgtaacgcaccatatcttgattcatcactatgctgcactgtctccaactctcacacttcaactctaccccaaagtaccttaaatggtcagaaatgctatttccccttaccgatctgaaacaacaattgcctagagagttatactggattcatgtaaaacctatatgcgtgttgtaacgatttaagaccaatagccatcgctctggtgaaatctggtagtaaattacgatcacaattttcgacttggaagtttgttcttgctaatgtagtggagagaaattatatcagtaagttgtttcagagggattgatagttacctgctgcaagtaggatcttcaccagtgttgtcacaaactttctccaaaccaaaaagaacaaaattcgaaaaactgaaatctttcacccacacctgcatcccggaacacaccattactgctttcttcgttttttcagaaagttaataaaccaagcggagaaatttgtctgatcactactgagtattccagatttttgcaaaattaaaactgctattctgataaacacccagtgcactgagaaagtgatgttacctctgttgggaagtggtggtatgttttttgagggaaatggtaatagtaaggaggcagatgaggaaccatatcacggtcatgcgtgatccggaaggtattgggcacaagcaaactgtaataagatgcaaaagcggcattcccaacacgaggttgcccaaatgtcataacctgtacgttttcttcaccttcatttacctgcgatttgtatccaatataagccattaacaactcaaaggacaaaacaataagataaaaaaaaaattcaatgcaaggatgattacaactaggtctagaccacaaaaggaagccatggctcctcttattgtatgaccggtcactatgatgttgatgggcgccccgtagacttttttcactcgtgttattgcatccaaaaccgcaggccgtaaagttgtattgtgataagcactgtaaaagccatggtgcacctgccaatgtggataactattacaaattccaccgtactacaagaccaactcaatgacaaatacttgttgttaaagtgtaccattgcatctggcatgtcagggtaaattaacatcgagcttgttccagaacaagtctgagacccaattttgtatgctgcacaagttttggattgattaagcattaaccaagtttatgcgaaggagtagcttttagattacaatgactagaataaaacctgtg

SEQ ID NO: 18127 - DNA, 493 bp, Arabidopsis thaliana landsberg
  unsure (1)..(493): unsure at all n locations
taaagactattctactctgtttactcctttattgcattgtcttttgatatactannnnnnnnnnnnnnnnnnnnnnnnnnnnnnnnnnnnnnnnnnnnnnnnnnnnnnnnnnnnnnnnnnnnnnnnnnnnnnnngtgtgacagaagtggtatcaaaggaatgatgaccctaggtcgttagactagttagaaatggaaagcctagtttgttccaaacttgctaatttcattcttataaaattattttatcagccttacctctttaaaattcaactgagttggcattttctcttgtaggatggttcgtacccttcaaaccacccgagtcaacaccaactacgcccctccgccacggcaagctcctgtctacccagtggtagtggagnnnnnnnnnnnnnnnnnnnnnnnnnnnnnnnnnnagcatggagtcatcttggaggatagttcggaggaacttctgtcgacgcccacctcgtttgcagagttactagcct

SEQ ID NO: 18128 - DNA, 260 bp, Arabidopsis thaliana landsberg
atgtgccatggcttactttacttagagccaagaatcatgtatcaatcctcttgtatctgccagaggaagtggtttgggacaaacgacggacctcgcatctggcaactgcggattggattccatgctggtgccagagagacaaacttgctgtaggtcagacatgtcctgaaaggatccctcagtcttatgtaactcagttgcacccatgaaacatctagacttcaaggcttgtgagatctttgatgtttgggagagcttct

SEQ ID NO: 18129 - DNA, 355 bp, Arabidopsis thaliana landsberg
aagttctcttatctgcttgcaaagtcctcgcaattctgtagcaaattttcgatgttgttcttttccatagcaaatgtttctctcaaatcgcttgtgtttcttgtaaggataaaaggtttttaaagcattgaaaaagttattataatgttaacactttaattgttagtaattgagcatagacctcttatttaagagaaagcaaaccgttttagtaaaaattcagcaaagccaaaattcactcaaaaccaaaaaaaaaaaaaagaaaactatgaaagtaataaaaagtaaaaaaaaaaattagagaaactgtcgcctctttcattgtgttttcttcgttagaacaatttgaaggaat

SEQ ID NO: 18130 - DNA, 779 bp, Arabidopsis thaliana landsberg
gtattcaaaagatattattatttttagaccgaataacaaaaaatatcgagaatacaaaaaaaaacctataaaaaaatacttaaatattcaaacatatattaaaaaacccaacctatcccgaaaatatcttacaaaacacccaaaaacatccaaaaatatttataaataataaatattaaatggattatgaactccataactacaacaaaaacgtcattttacatcatttgttataaatattgacattagttataaatgatgttaaataattttgcatcctttaaataagtgacttaataattggtgatgcaaataatttacatcagtttattactaattgatgttaatatttaaaatatttacatcgattactataattgatatcaatatgtatcaattgctaaaaaaaaatgtttacttttacttcaatttatttaagtgatgttaatatttgtttcggttaaaatagtgattttaaaaataataatatatttaccgaataataatttttagaataataaataattatttttaaaaatatattttccaattattcttttatttgtttcatttttaatatataataaatcatggtagatattttgtcccaaaatcactcgttgcaatatctacaaaaatcttttcaagattttataaaatattttttttaagaataataaattcttataacaaaaataataataattgggtgttcttcgtgtttaaacacattctttcagtttcatactttttccttccagaaattggttgttcttctt

SEQ ID NO: 18131 - DNA, 399 bp, Arabidopsis thaliana landsberg
gaaaaaaaaaactaagtaccgaaagaagattttccacagttacgatcttgaccgttgatttcacagaaggtgatgtctgaaccgtctgatacggaaagtgtccaccgactagtcttcaaacaccataaaaagtagcagccaataacttaatactctaaaaacttgctttctctctagatatttcagaccgagccgactaaagtagcaccatcatcctctgcttttgtttagcgttttcttaaactgaaatgtgtgactctgctaagaaaactatgagtagtaaagttaataataacattacatcaattcatttcattttaaaatcattacctaaaccaaacaatgctcaaaaagtaacccggcaagtaattaagttgttgctttttttttgcctaagta

SEQ ID NO: 18132 - DNA, 2626 bp, Arabidopsis thaliana landsberg
cctaaatccatatataatgaaacgtaccaaaaaaaaaacttagatattcagtcaggttatgtttgttaaatgttatacttctagtataataactagctttaagaagtctacgtatatttgtaatatttaaaaatgagattttttttttcttgaaggtaagcaaaaatctctcttttctttgcgaagcaacaaaatcttgtgtttagaacaaacacaaaaggagtatttacttggacgtaggttaaacttcaacggtcgtggagtccaatgcttttaagtctcccttaacttgtgatttgtgaaaaagtgtagtgaaattaataattacgagacagtaattgtatcttgcaaataaaattacattcagggaattaattaccaatatcagatttcttaattgttaattcatcattaattttgttgaaagccaattagtggggaaggtttttttacaaagtagctagtgaagtacaatgctaaaatagctgtattacatacagctgagatgaataaatggcattgaaatcatttatataaataggttaaataagtaaatatattcagatagttggtaacgcatttggttttgggtacgtacacacattaaacgcatatatcaactacatggttgacaaaataacacatactattgaaaagtaaaattatgtgacttaagcattctagatcttaattaattagtcttcttgaatcaaatcaaaataataccactcaataccaaaaaaaagtgattaatttttttcagaaaatttgttgattatcaaaaatatttagtatgtcttaattaattaagaacttcatataagcaacaagtactgatcagttgacaaaaatatgtggtggtgaaaatactgcttaagttgatgcaaggggaaaaactaaaggcttctgctatcattcgttgattaacacggacaagaggctgactaatctatatctactaaatcacagtcattttaacaaaaattgcaacactctctttttgacatgtggcaaaactctcaaattttgctctttaactttcataatccacaattctattatttttattatagataactattttttcgtttgatcacttccactcttccacaatttctgcagtttcaacctctttttcctttttttctatttaaattgtttcatacctttctatcgaaactcaagtcttctatacgcaaaagttagtgcactattcattttagtaaacatctattaaaaatttacaaatatcatggtaatataaaatgaatactcttacaggaagtattgaagattggttttcatgaaggattattcacacagtgacaagaagggctcgggagatgaggagctattaggatttgttttgatttccaaattcccaagcaagaatatgttcacatttcatgggttcatagattcatcagcctcttatttttgatcttggctttttaaaacaaacaaaactcatgtccacaaattgttaaatttaaagtataaataccctttcctatagttttgcccctgctttgcaggggccataatgctagtatcaaagtaaatgttaaaagcatacctaataatttacgatatatgtatgaatagtaaaggaacaattttacgacagagacatttactcctcaaacctctctctataaataagactgttgtcaaatcgattctccaacacacaaaagaacaacttcatacaagaaatgacatcaaaagagccaaaacacatgttttccattttcccattcttctgtttcttcttctccttcattgcacaaaacaccgtcccaaacatagcttatcctctctccacaagctcccgttggatcgtcgacgagaacggtctacgggtaaagctcgtgtgtgcgaactggccatcacacctccagcccgttgtagcggaagggctgagcaaacaaccagtggacgcagtggccaagaaaatagtggaaatgggtttcaattgtgttaggttaacttggccgttggatttgatgactaatgagacattggctaataatgtcacagtaagacaatcttttcaaagccttggtcttaatgatgacattgttggcttccaaactaacaacctctccctcattgaggctttcaaggtatatctccactctcttggttctaaatattagtgtgtttcaattataacctttttgtggtagatggacttatgttcaagtttcaacggttttagttttaaggaaataatattattttaaacattaaaatatatctcttcaactaattttcaattttcatatttaaattagtttaactataattctgaaaaacaaaggaaaaagacaatttctctttttcaataaccaatggtccaacaaaagaatgcaagtcattatacaaaaccgaaaacctaaaaccaaaaatcgaaaacttataaacaccctttttgactaagctacatacttgaaagtgttggcattttctgtatccctctccaaataatctctattgatcaagtcctcaatccgtttctttatcatctttatatcaggctgcaaaaaaaaaaaaaaaaacattatgtaaatattaccttaattctcttgtcttatatatcaagtttccttttgtatattaaatc

SEQ ID NO: 18133 - DNA, 636 bp, Arabidopsis thaliana landsberg
tgaatggatgaaaggatagagctagcgatgtgtttgaacaagagtccgcctctcattcggggcagtttgggtggatgccataattgagagaatagggtttcattgattagggttttctgataagaataagtataaggtttgggtggaagacataattattttaattaattaatatttttttttaacttaaccgctaccgcccgcaaccgcaaatgcttgcgggaaggagcttttgaaatctggcgatttcgagcggtccgaagcggtatctagcggtttctatgattggtgccaaccgctaataaccgctatcacccgcaaacgcagcgtttgcgggtggcagagggagaaccaatcaagcccttacttacgtcttccggcttatcaatatttcaaacattgactcccaccttagtattattcttcgtagatatatcaaagagcataaactcttttagatactaaatgattgataaatgataaatgattcattcatataaagcatgtcctaaaacagatgaaataaataatagttgtaaaaggagaaaagaaagtagacaaatccaactggtttaactaaattaagcaatgaagtgacaaaaatttccctaaaaaagggtctatcaatgcaaacat

SEQ ID NO: 18134 - DNA, 1353 bp, Arabidopsis thaliana landsberg
caaagtggtgtcttggagcaagatcttagcattggatttgagccatcatcttcagatttggaatgatgcaagtttcttgataggcgaagagaagaaagtcatcatgtgtgagagattggttgatgtgcacacgtccaaagtcatggtctacattgttggggagaacaatgttgtcacacaagtggaatttggggttgttgaaatggatggatgttgggcagttatctttaattatgttccaagtttgattcaaatcgagcaagctggaggcaataggaacataggtaaataaacaccgtctacatgtaatatctttgtgcgtgtgtgtatgtgtgtgtgtgtgtgatcttgttctttcagtttcaggcttttctaattcaatgacttaaagtgattcagaaaacatgtacaaagatacaagttgtgtgtgtgtttttcttaatttaccctgtctcttgtctgagttttctttttcacccaagatacaagttgtaaaactataaatcatcgcccaattcaccttgcaagttctaccactaagccaagcatgtgaaataagtatgtataataggagttttctctatatcttacaaacacacagcttaaagttgcaaatatttggaccagaaaacaatccccaaattacttgaaaccacaacttggcttgttttatatattgtaacgtgcaaggagaggagcaagagatatcgctgagatttgggtaaacatggccaagatatccagtccattcggtaggacctgcttgtgtagaaaaaacagcagtaacatagaatggccagttgggaactctgattccatgtgaccacaaattatattatttattaccatgtctcagtttggaataacaaagcttagcaagttagcaacactaagatcacaaaaggtaaaaaaaaaaaaacagagcttcttagcaagttagtaacactaaaatcagggttatacatgcatctagtctttttagcaacagaggaaaaccttcacagttctagtgttctaccaagtagttccagaaagtaaacacatatattcaatctaataagctattacaagaaattcaatgctcaatatgatctcatgggaacgaaacaggggaaatttgattgccacaaatatatgggcttttaaagtgggccttgttagattcttatcaggtccatgtcactcactattcaacattttactgctgaactcaactgtgggaagaggaaaccctagagatttggtaacagcagagatcaatgaagacaatacaggagcagcttccaaaaaacttggataaaggagatactctgtcgcgttccggcaacatctctgagacgtttacgatcaact

SEQ ID NO: 18135 - DNA, 2096 bp, Arabidopsis thaliana landsberg
ggaacttcaatatttccaagtcccccaaagtcaatttccaattatctgactttagccagttttcaaaagatccaaagtagggagcttaatcccaccatgttggttggtaacttttcgttgtataacactaatatctattttttgtattaagttatgattcacagtatggatctttgtttttatgtagatgtaatcggtcatattataattattggtgagttagaagaacttgagactaataataaattcacaaccaaaactgattttgatatcagagatgaagcgtgagtttactcttctaattttttgtactatatccaacaatttatcttatttcaattagtaactattttagtaaagtttaaaactaacatttaaattaactattatagtgatgagcgcattggagttaccttgtggggtacttttgctcaacaagtttacagaggatgtaacgaggctggtgctcgacctgttgtttgtgttctccggtttgttaagataaaatcctacaaaggtaaacttatcaatccaatgctctcaattgtatctttgtataaagtaaacataaattacatattttacacattgttctaatgtcaggtgtcaggaatttatctaactcatttgatgcatcacaagtctttgtgaatcctcagtttcctgaggtcgatgctttcttaaggacgtaagtttcagaactctaatataaaatgtgtatcgatatcagtctatgttatgaaattatataaattaacaattttgatgttctaaacagacttcctcaggatggaattctcttgacataccgtgagagaatcccaaagttggagattgttgtttctaaaaagagtgatagctgccttgagtatcctcgaaacacaattcagcaactccttaatgctgttgatgtatgtttttgatttctacttatataattgaataatattgttgcataatataagctcattcatcatatacacttatttgttgtatgctttatatatattaggttggaaaagcaaggttgatgtgtaccatctatgcaattgacacggactgggcttggtattacattagctgtcgtgcttgcaataagaaagtcacacatatccattctggagttcatggtgtgaacaacaaggggaaaaaacctaggttttggtgtgacagttgcaaaactgtcgtcactaatgtgattgctagatacatgatttatgctaaagttatggacaacactggtgagtcaaaacttttgttgtttgaccaaatctgtactgagataatcggtgagacagctccatctgttttgaatggctctgttgatgaggttagtttttgaattttatgtcttttaactatattgtctgtatgtataaattataagtaatttatctatgtgttttgttatctagattgatgacccggacgatctccctgatgcactaaagaatctgtatggtaagactttcctttcttggtgtctattgagaaaaaaaacatttgggacgggaaggaaatctacaaggttacaaaagtccttctcaagaatgggttacttgaggaagaattgttggaggattcaactgatgtggtcaatccagcctctattgtctctggtgaccaggtaatatcatcagaaataaatagtttagttgttttcatactttaactctctctctcgctaaaccatatttgtgttttactgtagattccactgatgcttgagtatagtcaagagacaaccgactctgttactcctgtttctaaacgtgtgtatgctgataatccaaacgggtctgatcaagcatctgcttcaaagaaggtgtgcattgagcccgtcgacttatatcagtctaatgatggattcggtgaacagattccttcaactaagattgaagattatgagcctaaagaagcagtgacttcaaatgatttgaagtcaagcattgctgagtctgattccacagctgttggtcacccggctcatgtccgtaacggtagtgttgcaccaatcatagtgaaaaaggaatgggtgggcaagaagggacctgtgaggatcaaggttgagaagaagtagaggtggtgaatcgtgg

SEQ ID NO: 18136 - DNA, 1900 bp, Arabidopsis thaliana landsberg
  unsure (1)..(1900): unsure at all n locations
aagaaagtatagataagcttatgaatataattctgtatataattttatttttataagagttatactaactaatgcatcaaaaataaaagaaacaaaatagtgaatttttgaataccaatatgaganagtcatcaaagtttttctccataaaacaatttatttcatgagattcaattaaaatgtcttatgtaaaaagacgcggtcatccaatatatctaaaactatagagagagttattaaccaaaaaaaaattcttttgataaatgttgtaaaacctaaaagttgtattagagttatttttatttatgtatttcaattattaataataagtagatatataaaatatatatctcaaaattttcaatatatatttttattcacatcaaaatttattaaaaattataaaaatagatcacgcgtagcgttgcttcgtaatctataaaagtaaaaatagagatgggatggaaatgctctacataatacattaaaaaaatatagcaatttaatcgatgaaaacctcccaaaaaaaacataagttttaataaaaaaatgcctcaaatagttttttgccttaaggtattgaatattgttgggccggggctggctggatgcagtgtatatatatgattggaaaaaatcggttttgtttatactactaagtctttttaaaagttttaataagatagtcgataaaaaatgtcaatgggtttggtaggaatggggtcatcctctgctcatctctctttatctttttagtacatttaatgatattaacccatcaaatgcagtggacgtggaggaatggtgcccactccacataatttatatgatggtccctccgtggttctacttacattagcactcaatataataacaaatcatcattaagattttacactgtttcttataaaactaattatgtttgtttgtatccctttgttgaaagtttcacaattatttcacattcaacaaatgaaatcataggaaagatttgaagaagcttgtagtgatcctaagatcatgatagaaacgtgtgttacattagagacgtatccctagtgacattgcttttatacttataacattgaccttatcttttcatcatgagtcatgagtatgtcatgaatgtataggacatgactcaagatggtattagtttactcattaatggacatgtaaacaatactagctaccaaaacaaaaaaaactttatactccttatacatgtattttgcaacacaatcaccattatggcccttccgttagcataattttcttggtcgaaacataatccgattatttttccttacaataaaagtgatcaaacacgtttatgatgatgaacattaaggagagggagccaccatgggcatgaaagcactagaagaggaagaagatatgtgagaatatctacaagagaaaaaactatggaaccacatgtgaggacagtagtacttcttaggttttacaaagaactccgcacattcttgcatcgatctttgtcctgggaagaaaggtatgcaattgttaccaacgtcaagaacacctttttcaagtaaacccctacaccaaggccctacgtgcgtgaaatagttatccgacaacgacaagttgacaagattgtcccggagcagcatgcatactgcctccgggacggcaccaaacaatagattcccagcaaagttgagctgctctactttctctaaacacattagggaaagcggcaaaggacccgtgagcttgtttccaccgatatcgatcactgatgctccggtgaggaacccgatctcgtgagggatacaccccgtcaaatcgttattgaggaagagtacaacggtaaaagttgacattgatcttaagatgcttctttgggagaggaccgttgaactttgttgtttgc

SEQ ID NO: 18137 - DNA, 580 bp, Arabidopsis thaliana landsberg
ttttggagagaaggaggtgttgaagcaattttagccgtggtgttatacttaaagacaaagtggggcttgtgacaggagcttcctctggtatacgaagagagatctgtcttgatctaggcaaagctggttgtaagattattgcagtagctcgtcgtgtcgatcgtctcaactctctctgctctgaaatcaacagctccagttcaactggaatccaagccgcggctcttaagctagacgttacatcagacgcagccaccattcaaaaagtggttcagggagcttggggaatctttggaaagatcgatgcgttgatcaacaatgccgggatcagaggcaatgtcaagtcgagtttggatttgtcaaaggaagaatgggacaacgtcttcaagaccaacttaacgggaccttggttagtatctaaatatgtttgtgttctaatgcgtgatgctaaactaggtggctcggtgataaacatctcatcgattgccgggattcgcggtatattgcccggtgcactcgcatatgctagttccacaataggtgttgataccatgtcaaagatgatggcagtgaagtagtg

SEQ ID NO: 18138 - DNA, 1165 bp, Arabidopsis thaliana landsberg
ggaactgcaacttagttctctcacagctgcaaaaccagatcaaagccagatctcaacatcctctacatcccagtatgtctccagaatcttcaaagccttcttgtagatctccacgctttcgtgttcttgcaggttcccaatctttttgactcctttcgcatcttcaatcagttggcgataacagttgacgtctcctgtgttatttgccgcctctccggcttttaaaatgttttccaacccatcaagacacactgagatgatcattacatctggacataccaagagatcacatagaagttttgtgcaaccctgctccaccaagtatctgaaccacaccagtatatggagattgtgatttagtgatcaataaaaagctatatcaaatagagagaagacagggatgtacttgatttgattaggagaactacccacggtggcatttgaaattgcccatgcagcttctttctttacgtcaaattaagcatgttgagccagattgaccaacggtggaatcaaatttgcatcaataaccgactgttatcatcagtacaagaaagacaattagaaaacaattagtgatagcaacataagggtaaatttgtatatgttctgcaacagaagcttctcacctgaagttgttctgtaaagcctgcagtgatgcttgaaattgttgagaaaatttctatctttatgtatttctcatagtctcgagtaaacaggttggcaagaatgggtaaaacatcacaattgatcacaatctaaagaatatgttcaaagaggtttattcagagcacttcgttgtttggttacaaaatctaatcgcaacattgtaaacaaggaacatataacaaagcaagcactccatcctctctactaaaagcggtatagtgatataaacattatgataaacatagattttgacagtttttttaacttgataaaggataactccaaaaggtggcaacataggtggaatatgattacatacttggctctggtgattatattgtctagctatagtcccaatgttatgaagtacaggagcaagcacatctggggaagggcgtctgcaaaagaagaaaattgtcagtcttcagtatctaaaccaaacttgcacaaagggtttaatatgtatagatattatgagaagtactaactggagaac

SEQ ID NO: 18139 - DNA, 589 bp, Arabidopsis thaliana landsberg
  unsure (1)..(589): unsure at all n locations
ggagtgactactatgtccttcatttacgactagttagcgactggacaaaatatataagcatttacgtcgaatttagaacgccaaaaatcagtggcaatatagtctctatttcacgactacattccgactactttctgcctataaacaaaaggtcgcgatttgcaactactttcggacgtatttgctactcgcgatttttgaattcaaaagatcaagtaagaaaattattatatatacatatatacgttgattgaatacaactcaatcattataagtttctaaagctttaaatcatattgtttggacacaataatatcattaattctaaatcattcttaagtttaacatgtttgttttggagaaggatttgatttttgtaaatttcaaaataaagttattaaattaatgttttaaactcttatcctaatagggatactctagaatcatttctgtttggttttagtgnnnnnnnnnnnnnnnnnnnnnnnnnnnnnnnnnnnnnnnngaaaaatcaattggtgacttaaaccttggagtcacaagacagtaacactttgcgactacaatcggactcctttgatactcgcga

SEQ ID NO: 18140 - DNA, 1696 bp, Arabidopsis thaliana landsberg
  unsure (1)..(1696): unsure at all n locations
ctatccgatcctaactcgacggctgtatcagttgatccattcattcaaatcgggtatgtacgggattttcttggtctatatatgctgtttactgaatgaatcttccattcaaaagacttaatcttggttacacccgtccaaaaatgcagagttcttaacttctcggaagttagatttagagtatccatggcgatgtcccccagtcaaaggccgaggggagtgcttggattttggtcatccctgatgactgctcttgggaatacagaaaacatgccagtaagtattccagagtaattcattggtttatgtccattggtttctacttggtactcgtaggacatcaattatagtcgacaagttttgtagtttttagaatttgttttgtcaatgtactacttgctacactttcagtccaacccagtatgtattttttttcttcttctaatttttcttatcttcaaataggtacgcataagtgagagatttcatgagaacatatccatgcgccaaagtactatgatcaataatgctattaggaacgtaaagaaagactctccttggccagcctcttcagttgctctcaggtgttgatattcttggcaatgtcgcagttctcttggacatatgagncaaggcatagctgcattatcaatggataaaaaattcatccaaagtcgacagagacaggtttcttcctgactttgttttttctccttgtacatgttgctgtttcctgtggatacaacataaacaatccaagttgccttccattagcctaatatgtagaaaattttcctcttaacacttgaatttttgaatggcttctgatactaaacggatgtatgggcttgccagtgtttctttcctgtgctccattttgttagtacacgctaatgcgtttcttgatttggcaggaaaacaaaggtgttgaggactttggcgatattatcagagaaggaggtggagctctagcgaaaggcctgtttagaggagtcacaggcatattgacaaagcctctcgaaggtgcaaagtcttctggtgtcgaaggctttgtctctgggtttgggaaaggaatcattggtgctgctgcccagcctgtgagcggagttctggatcttctgtcaaagaccactgaaggtgcaaatgccatgaggatgaaaatagcagctgccatcacctcagatgaacaacttcttcgccggagacttccaagagcggttggtgctgatagcttgcttcgtccttacaatgattacagggcacaggggcaggtacaatttttacccgtaaatatgttcaaatttgtatttcgtggcttgcactagtcgttttgctcttggttagctgatgaggaatggatttactggtgcttataatatatttggtttggtttacgtagcatatgattattcttatacaaatttcaaacctccaatattttgcatttgcaggtcatattgcagttggcagaatctggatcattcctgggccaggttgatctgtttaaagtacgtgggaagtttgcattaacagatgcctacgaaagtcatttcatcctaccaaaaggaaaagttctgatgatcacacatcgaagagtgatattgctacaagtgagttagacaaaacctttttgctctctatgtttaattggtatagtgttcgtcttctgtatctatccaagaaattctatgaaatt

SEQ ID NO: 18141 - DNA, 1924 bp, Arabidopsis thaliana landsberg
  unsure (1)..(1924): unsure at all n locations
gtagaagatcttaaagaagtgggtgacaagtcacaagtgttgaagatatgaacaaaattttaaagcaaaacgttgtacacgaaagatatagtatatcaaaatcaccgacgaaatcataattatccaaattttatattagatacaactcacaagagaaagcaacgcccatgttcaattcgaagcgtttgggtccattgggaaaggtagatgttaaattttatggtagactatgaatacacaatacggaaccgaaaactgcgtacatacattcaaaataaatgagttatctttaaaataataaaaaaaaaaaaagacaaaaaggtatggtttgttgtatctttaattttttttaatttcaggttctgcatcaattagccataaaatgtatttcagtttagttatcattgtagtgaccgactcatgccagagacttcaatttggtatttgatatttttatgatttttctaagtaccatatatattatttctgtggatttgtgggagatctagaagtagtgggtggcaaggcaagtgtttaagatatgattaatttttttaagcataacgttgtacacgagatattattgtaatgatcgactcaaggcttgacatgtttaaacggagctgacgcgatcacgactgcgagaatttatggatgcctgcgattgcggttttaaagcattttgaacgactattttagcggttaaaaattggtacgtttgtgaatacggacgactgcggttttacatgcatatagccatacatgtagttattctgatgtttacaactacatgtagaactgaaatgcagttccatgtgctaccaaaatcatgtgatcatgagttcatgaccatgtacctctcactctcagtattcagatttttctgtggaaataaaatggcaaatgttgtataataaaataaaataaaattttcaattcgaaatccacaactaaaatcagaaacaaatggagcaccgaatattttcgggtgataatttgttaattactccttctgtttcttattatttgatttttttgaaagaaaaaaaaatgtttttaacagattgtttttttaggtttcctaagcaatattaattagttattattgatgaatatcaaatttcaaaataaataattaaatattattggtttaaaattataacaaatataaatcacaaaaaacaaaatatttagaatcattttttaatatgttttcttaacatatgttttttttttttaaatcaaatattaaggaacatagaaagtattgtacatggatcaatcgttgataataatgtgacacttttacccactgtaaaacaacaactttattttattatgaacaatatttatcttgtatcaagtgacttaaaacacataaaaattgtatgaccctggagttttcttttttatgtaagataccaaacctgaagaaagcatattataatacaagaataacaagttggtctcttattactgtatgttgttccccatatgacaaaaaaaaaactaaggaaaattagagaaagaatgtgatcgatcaacaagctcaatcagttctcttctcaacgtcatgctcatcttcctcgagcataaacctcttccagtaccaatgtagcttccacacactatctctcatgtcatcaatggagactcctttcgtttccggcacgaagaacaaagcgaaaagtcccatcacaacgatccaannnnnnnnnnnnnnnnnnnnccctgacttcatcgcgcaaagcatcgataggaaggcctgagcgatcacgaacgtgaagaacatgttgcaagacacgggcaatgcgaacccttccgttcgagtcttccaggggaaggtctcactagggattagccatcctagagggccccatgaccaagcgaaacccatcacgtatacacacacgaagatcaccac

SEQ ID NO: 18142 - DNA, 551 bp, Arabidopsis thaliana landsberg
ataagaaatacatatatattattttgcatatttattaagtttcaggtttcacatataaaccagaataatccattgcagtaatttggaggcacgacatattcctcgtgtttgttttcattgcagagttttgtgcaagcagtctcacataatggaagagttgccttttgagaaactttcatgcattgattcgggacacaatgcttaacacatacttccaccgtactcgcgtatgttgaaacaatcatcgttaataaaactacaatcatcaaaacactgtatatcttttttattgtttgagttgccattatttgaagagataagtttatgagtgttcaaagttattaaaattttgcttaggttatatagcaaaaaaaaaatgtaacaagtggattattgttgagttgtttctctagtttttactttatatagcaaaactagttttgactacttaaaattatttattttggaagtatatcccgttggatttttatttttttcataaattagttttttttggttattgttggttgacctggtcccaaaccaaatct

SEQ ID NO: 18143 - DNA, 686 bp, Arabidopsis thaliana landsberg
tggccggaagtcgagcacggacatcgatatcatctaaagagattgatgactccattgatagaatcgttgctggtatggaaggaacagtgatgaccgatggcaagagcaaaagcttggtagcttaccatgaagttggtcatgcagtgtgtgggtaagtgagaaacatattaaaagcctgtctgtatattattactatcaaaaacttactttaaagttataaactttggttttttacagaacattgactccaggacatgatgctgtgcaaaaggtaacgttgataccaagaggccaagcaagaggtctgacttggttcattccatcagatgacccgacactcatctccaagcagcaactctttgcaagaattgttggtggactcggtggtagggccgctgaagaaatcatctttggtgattccgaggtgactactggcgcagttggtgacttacaacagatcaccggtttggctagacaggtacgcaacacgttcagcttcacattagttatgctggagcctgatgatttttttttttttttttgtgcacaaatctggagcctgatgataagtttgatcttttactagttgatgaaactgagtgtttgcgactgttgaatattttactttgcagatggtaacaacatttggaatgtctgatattggaccatggtctttgatggattct

SEQ ID NO: 18144 - DNA, 511 bp, Arabidopsis thaliana landsberg
aattcaactgctgcttacatcgggttacgtataagtaaaaatgttttaaacttttagaccatctccaatgcctaactctattttagaagaaatatagttgattttgctccaatgtatgactctaaaatagagaaaaatatagagtagtcttattttttactctatatatagagagcaatctctacacttttcctctattttagagttaactctattttgaaaatacaatggagcaaaattaactatattttctctaaaatagaatcatctctaaaataaaggaaaaaatagagttaggcattggagatgttcttacataaagaagagaaagagaaggaacacacactcacagttttgatcttgtcgatactctcctcggaagcacattctgtttctgattctaagtctgatattatgatcgttggcattttggacgcttctcatgcggacgtttttttctacgtcggaattcaagccacccgtgtaggagtcgtcgctgctggaatcattt

SEQ ID NO: 18145 - DNA, 2474 bp, Arabidopsis thaliana landsberg
cctataattcttccggcctgagaagagcttgatccagaatatcaatacgatttgtagccatcaaaacctgcaacagtcattaaagagaatatgagtctgtcagcaatttcagactacaataacacagactcatcctattcaacttatggttttttttcctttacaacttaatacgtaccttgattttgtttgacgcttcaaaaccgtcaagttgattgagaagctcgagcatggtccgttgcacctcactgtcaccatttccacttccagattccatacgagcagacccaatactatcgatttcatccatgaagatgattgatggtgcatgctccctgaaaaccataaaccggtgtaagccaactggaaagagtattttcaacgaatcatctcacctatttgtaatttgctccttacatgagacttggcactgtggcctaaatgctaagcactatgacaaataatactttatagaacgatattcattcacaacggaaccatattcattgtagcaacaaagaacactttccccatttaacttaacagctcatgtccattttatagcaactaatggcggacatgttaaaagatgttatcttatcaacagttccatattttcctatcaaccactattaccatgcttgaaatttaaaatagggactaccatatactaaccttgccatcacaaaaagttctctgaccattctagaaccttctccaatgtatttctggacaagctcggaaccagaaactcttatgaaagtacagtcagtgtgatgtgcaacagcccgagccaatagtgtcttcccagttccaggtggaccgtataacaacacaccctagaaagacagagagatgagattacgtctaatccacttagcatctgtcacaatatggagaagaaggtttaagattcaagtgtacctttggctgcgcaattccaagagactcaaacaattcaggatgcttgattggcagctcaatgacctgataaaccagaaaagatatagatattatataaacattaaaaggatgaaacaacagaggagatagccaatactgtagtgacttttagtttcggtttctcattcactaagcatacctcctttatttccttaatctgctggtcaagaccaccaatcatgtcataggtggagtctggaaccttctcaactttcataaggttaaccaagggatctactttacttggcagaaccaggtggagaacatagctatcattacgaagagcaactctcgttgatggagtgattttcgtaatgtctatacttttgtcaatatcaacaacatacttcccctctggatgaacctggaaaatgggagtgtaagccttactgacaactatgttcgtagaaatacaaacatgataataaaaaagattcataccttaaccaagaccttgttttttcccataacttttaccacttctcccacataggacccaggttcttgaaggagctgtaactcttctctgagcattctcactgttcaattagaaataattttagtgttaacgaggtttgagatttagaactaactacaaattataaagactagtaagaaaaccttcatgcataaataggatggtgatcatgatgacaacagaagctgttctataactttaaatgtgtaactaaaatcatggtatagtggaaaggactatatgggctccttccaaaagtatatattcctcaatgaagatagtgaagaaataactaggctttcctgaaaaaagccacatactttgcaaaagaaacaacaagaagacagaatctagaaatctaaacaagttaatgttgctaaaatcaagactaatcacttccagatcggaaacactaaatcaccacaacaattttgaaatttgaaatcactcagctccaattggaacgaaatcgaaagccctagcacagaatctgagattacgaaacacaaggagatgataaaaaagatccaattttgcagagaattagggtaagagaaggaagaagagacctcgagaattgagttcattcctttgagcttcaaggcgattgaggttattagtcttctgacggagctggcgctggagctcatggatgtgctggagatagtactgcttaagcccttccccttgtttcgccgccgctcctttcacgttacaggtttcctccatcgctgtctcaggacgcctcgaatctactcctacggccgccattttctcagtgattgaaacaaattatcgaagacagagatctctagtaaggagatgagaagaagaaggagagagattaattttcttcgatcagaatctcagaaaccctcacgcgaagcattatatgatatcacctggattaataggaaggaaattaacacaacaatagaaatatttttattttacttttagcatgtcaagaccttctagttcgtttagagtccttcctcgagtctacgttttctcaggcttactctaactcgtt

SEQ ID NO: 18146 - DNA, 543 bp, Arabidopsis thaliana landsberg
tcccataccttaattgcatggtatccataaggatcgcagatctactttcacttaactaaaaatataaaaggaccaagtcgttctttaaatctttcctattggagattaaacaaaaaaggattgacttgaaaatatttccaagggatatccatttctatgcttaactaattttaaaatatgggaaggaattatagtatcaacgtacgttacaacttacaacatgtgagcacgtgacccaagcttcaagaaaatctcaaatattttatttatttatttttctaataaaaatgttaatatttcattagaaaatgaaaaagttaggaattacaagaatgtaaaacctatactttggtctcatagcaaaaaagaataaaaaacatggaagcaaatatcaatcggtccatcgacatcaacaaaaacagttaagcttttgaaaacaatgaatcgattcaacaattctaatgaatcgcatattagacacctcagagaggaagataatgctgtcaacggcataagtcgaacaatgaaaacccagtggatgga

SEQ ID NO: 18147 - DNA, 1114 bp, Arabidopsis thaliana landsberg
ttctcgtcgttttaattaagtttctttgagaacaacacgggtcttatgatctttgtttgtatctcatgtgatctggaaccaccatcggattcttgatcatcttgcttaccattagctatatacaacaaaaaatgaggcaccgaaaaaacaccgagctgcgacaacaattcttcgagcaaaatggtggtggcatgttgatacagagactctcaggagcagggccatcaaatgtggatgtcaaaatatttactgaagaaggcatgaaggaagcaactgatggttatgatgagaacagaatcttgggccagggaggacaaggaacagtctacaaagggatattgccagataacactatcgttgctataaagaaagctcggcttggagaccgtagccaagtagagcagttcatccacgaagtgctcgtgctttcacaaattaaccacaggaacgtggtcaagatcttgggttgctgtctagagactgaagtccccttgttggtctatgagttcatttccagtggcactctctttgatcacttgcacggttccatgtttgattcttctcttacatgggaacaccgcctcagaatagcgatagaagtcgctggaactcttgcttatcttcactcctctgcttctattccaatcatccatctcgatatcaaaactgaaaatattctcttggatgaaaacttaactgcaaaagtagccgactttggcgcttcaaatataccaatggataaagagcagctcacaactatggtgcaaggcactctaggctatttagacccagaatactataccacagggcttctgaacgagaagagcgatgtgtatagctttggggtagtcctcatggaactgatatcaggtcaaaaggcattgtgctttgaaaggccagagacttcaaaacatttggtgagttactttgttttggccacgaaagagaataggttgcatgagattattgacgaccaggtgttgaacgaggacaaccagagggaaatccatgaagctgcaagagttgctgttgaatgtacaagaccgaagggagaggaaaaaacaaggatgatagaagtagctgcagagctagaaacgttgagagccggaacgac

SEQ ID NO: 18148 - DNA, 1334 bp, Arabidopsis thaliana landsberg
aaaaacatcttttacaacagtccagaaatattttctattatcatcttgctttcctacaagcttctcacattccggtcgaagcgcaaactcatatgtgctccgctgattaacattcttcctagtgtcttctctgtcacaaatggtctcaacctcacacaacatcttctcatagcttagcatcttccgtcgcttatcatagtagctttcctttttcctaaccaggccctgtacgattctcaaaactgctaaccatatctcacgattgtgtaagccctttgccacctttgccatttgagacataaattccttatcgatttttgggcagtcaagaatccaagagactatcttatcacccttaggcatcacatcctcataaatgccagtggattcataatgctctactgtccctatctgatccgattcaagctcttcttcatacagcagtctcttgtccagaagcagattataagtagctactccctcaaggtcgattctttccttgacctgggaattttcccaaaactgattcactacttttggaactaaactcgcgcgaacatctgtggtgagctgtctaaaatacttgaggatgtgttcaaggtgcttaagatctaagaagcagatgcattgagggttcttaaagaagcaacattgatcaagatagatcccaggaactccaggtagttccagattctcttctgtgtaatctctcaaccagtcccaaagggtacatgaaagagtacaattctccttggcacaagaagattttagaacctcggcaaactgtttgagtacgttttcccgctcgcgatctttcgcttcaggccaatcactacaccatccattaacataaacaaactttttctggctcttaattctatcattaatcagatttgctgcctgcgctatatccactggcttccaatccccacagcatatcatgtcagccaaaatctcatccacatacttaggacgatcactgaactcgggttcatatttgtgcacatgcttatctaagatgtgcatcttgcaatctgtaaaacagtagttaacctgagaacaaatgtggcacttccagtatctccaatgaagtgatatgaggctgattacacatttccgaaaatatcgttttacttccttgccatactcattctgaatatattcaataagctttcgaaagtctactaccaaaacatcccttttagtcttgtcatccaaattaacccaaaagaatttcaattgttgaaaaggatttttctttttcataccatctgattagcaggaggcttgactcagaaacagtcacaaccgcaacgctattcttctccctcttc

SEQ ID NO: 18149 - DNA, 494 bp, Arabidopsis thaliana landsberg
attgggcacataaagttcgtgtccaaccgcatcatatcatttatttaaacaacatttttcaggaatgactcttatgaactctaattaagagttctaattaattttggattaaaaaaaaaaatcattactaatgataaaagaaattcattaccatcaagtataatttatcatcatctccgccattaattaaggggccaggttgttacactttccattattgtcaagagtatatttttccaataatgctttttatttttgttttttgagagaatttggttaaaaaatgttggatacgagttcttgtgttggatcatatcaagggccacctttgttttgtgtgaaccgagtgtgttcccacaagacaaatcatacggtgtaagatatacaagagtagaaagtggtccatatcttatcttcgcacattcttttgactgctagagaaattacttattttgatctctacccacatccaaaatccaaactttgatctattt

SEQ ID NO: 18150 - DNA, 1933 bp, Arabidopsis thaliana landsberg
tggttatggtttagctaataatcatgccaccaattcatattgatgggaccaatgagaagcttttgggatggtgcacttttaaagcgtgtcttgatgtttgaaatctcatgactatattttacagtgactgatcactgagctatactcaaaactgctttttctcttcaaacaccaaaatgtgtaggttacttttgtctgaaatccatgaaactgaagctctttcacctaaatcttcatctgcagcaacactaactcttatgaaccagaaagatccatcttcaagctctatagtgtctgttttatgtttagttatctctgttcttgctcttatcatcgtcttcctcggtgtcctctacttgatcttcaaatttctccgcaagtcctcgactttatttcccattccccatttcaactacaacccagatctcttttctttctcctcgcctcagctccagcacctgttcttcctccatgactctggtctagaccagactgccatcgatgcacttccagtgttcctctatggtaatgtaaccattagtcttgaacagccattcgattgcgccgtatgtctcaatgagttctctgacacagacaagctcagactactccctgtttgtagccatgctttccatctacactgtatcgacacatggcttctttcgaactctacttgccctctctgcagaagatcactctcaacctcaaacgtctgctacaaccactcggagactcttgtcgcccccttgtctgggcatcagcaggtggatgacggcaaagcctcccttgctaaaagagttttctctgttcgtctcgggagattcaaaagcacgaacgaaagtcaaagtcaacgacatgatgtcaaagatgaaatcggggtaagaatgccaagaagatgttactcgatgggcacgcaacagtatctcgtatgcgatcaagattttgtggtggctctgtcttcgtctcctcgtgagggaaatatcggtcggtaataaatgctccattcacgagggtgattcggtataacaagactctggtagttggggtaggctctaatgttttgtagtgaaaagagagtatgtctatgtcaaagatctggttttggtcgaagaagaagagagttctgtttattaaacaaaaataggtggttttttgtttgcatcttagtcttcttcctttgttactacagacatgaaatcgttagataattatgatatgatataaactaataatgattctaggagataattcctaatggatttaagataagtacatatcttctatatctacctttacacacacgttaacttagaaacaatctactttgttttcttctgtttgcctagtaaacaaatggcgtcgatgatgtttactgattgctcctcctccacaacgtcgcgtctcatccatttatacaaccgcaatggtgttttcctcccccgcccgagcgtcagccaattcagcttacggacaactgcgtctacttggcgctgcactctctccattcgctcctcttcttctccatctgcgattgtaattgatggaaaggctgaggccaaaaagattagagatgatatcaaaatcgaagtttcaagaatgaaggaatcaatcggtgtggttcctggtttagcagtaatccttgttggaaaagaacaaggaatccgctacttacgtgaggaacaagaaaaaagcttgtgaatccgtcggaattaaatcagtccaagttcgtctagctgaagattcatcagaagaagaggtgttgaaatatgtatcaggattcaatgatgatccttctgttcacggagtccttgttcagttgcctctaccatcggtaaacaaagtctatcttcatattcttcttcataacttaaaacaaacagtaaattacaacggtgttttgggatgtcgtgtatatgcagcatatggatgaaca

SEQ ID NO: 18151 - DNA, 865 bp, Arabidopsis thaliana landsberg
tttaataattcacaacaaaggtacggaagactttttataagtacgacagattttttggtttttattttcttatatgaaaagttattattaaaaactaataaatgacaacacaatataacttaccatatatatttagggttttagaaccgtttctctgtactcacgataccactttcatttttcgctctactcacgacggcacaatttttatttttcgatgtactttgaagatgataaagtattattccttttagggctaaaattctacttgatcaaccgtattatttcttacttttttggtcaaaatctttctctttgggttataacaagagataataaagtgttgggatggatcaggtggttttcgtctatggcaagtgaacatttgaggataacaaatggtttttcttcattattaaccgtaaaggttgtcgaattctagaagtcaacctagaaaccagttatgatcaatgcattcgtttgggttattgaggatttcagactggagagcaaaggtcgtgatgttggtttgcggtatgagatttcaaagtcgatatcccaggatttatacacctcccgtcatcatatcttattctagacagttgcacattcttttggggtagttaaagaaggatgcaattcgactttgtgttgaagtgaagaaggatttaaagattgattaaaacgacattgatggtgttgatgtcaaaaagttacaaatgaaacgaataacaaaagaagatgatttttttgaggaagctacagagttgttgcatgaggtggaagttgttattgttgaagacaacgaagacgaagaaacaatatttgatttctatgacgattccaactgaacagactccgatga

SEQ ID NO: 18152 - DNA, 3197 bp, Arabidopsis thaliana landsberg
  unsure (1)..(3197): unsure at all n locations
aggaccccccaacggtatgaaatcactggtgatctactccataaggtatcttttgattaaccaagaaaagtatgacatttttatcggggaagatattggttctcttgattctgaaatctgcatttccaggaaatctcgatgttctttatggacattgttaatgcttctcacagctatgcaacaggaggaacatcagtcagtgagttctggtactaccattacctgactttagtctttggttcattgtaacatgactttttgttttaagttctaaccatgatttgggaatggtaatattaggcaagatcccaagagaatggcgactgcactgcaaactgaaaacgaggaatcatgtactacttataacatgctcaaggtaggattttaaacttttccccctctttctatttgctcaaggtaacatactaacatatcaacacttgtacaatttcaggtctctaggaatctgttcagatggacaaaagaggttagctatgcagactattacgagcgcgctttgaccaacagtgtgctcggaattcaaagaggaaccgatcccggactgatgatctacatgctcccattgggtaaaggtgtttctaaggctgtgacttatcacggttggggaacaccttatgattccttttggtgttgctatggcactggtaaacttttaaccacaattcatctggttttctacatttttcttgtttcaaagacagattaattttgaggtaatggtagtaattgaatctttctgtccacaggaattgaatccttctcaaaactgggagattccatatattttcaagaagatggtgcaactccagctctttatgtcacccaatatatatcaagctcacttgattggaaatctgctggtctttcaatatctcagaaagttaatcctgttgtgtcgtgggatccgtacatgcgtgtgacattcactctttcttcttccaaagtggtaaaacttttgcacaacttgatgcaacatgttacattgaagaaagagtctgatggatccaattttgttgcagggagtggcgaaggagtcgactttgaatctaagaattcctgtttggactaactctataggtgccaaagtatctttgaatgggcgaccctgaaacgtaccaacttcaggtgatttgagcattaggttctaaaaagcagaactcgcttgactgttacagtcnggagtgggtgaaatgagaatcatattgtacctgtctttttctttgcaggtaatttcctatcaatcaaacagaaatggaaatctggtgatcaagtaaccatggagctaccaatgagtatcagaaccgaagctattaaaggtataaaacacaattacgctgagtagagttggttcttgattattgtgtataaattgtatgcaactctgtagtgtcaaagcaataacaacagaactgattttacattatgtcagatgatcggccggagtacgcatctcttcaagccatactctatggcccttacttgttagccggacacacgagcatggactggagcatcacaactcaggctaaagctggaaactggataacccctatacctgaaactcttaacagtcaccttgtcacactctcacaacaatctggaaacatatcttacgtgttgtcaaacagcaaccaaaccatcataatgaaagtatcacccgagccagggacacaagacgctgtttcggcgactttcaggctcgtgactgatgattctaaacatccgatttcgagtccagagggactaattggaagccttgtcatgcttgagccgtttgatttccctggcatgatcgtaaagcaagcaactgatagctccctcacggttcaagcttcttctcctagtgacaaaggatcttctagctttcggttagtatctggacttgacgggaagccaggaagcgtgtcgttaagcctagagagcaaaaagggttgttttgtgtacagcgatcaaacattaaagcaagggacgaaactaaggcttgaatgtggttcggctgcgactgatgagaagtttaaacaggcagcaagctttagtttaaagacaggaatgaatcaatacaatccaatgagtttcgtgatgagcggaacacagaggaactttgtgctatcgccattgtttagcctaagagatgaaacatacaatgtgtacttcagtgtgcaagcttgaagaaataaacccttttaaaactcctttggaatatagacatgtgttcagatgttcagcctcttaggtggtttgtgactctgcgtttaatttgcaatatcatctaaatatgtatgttgatgttacaataaatataaacaaatgtgtttttataagttatgctaacgatgaatccatgtctttctgaaatcagaatcatagtttgtgcattcatgaaatattctcatggtgtagaaataaaatgttgaaagcaaaacaatgtttgcagacataaagtatattcggttgtgcaatgaaacaatgatgtagacaaaaaaaaacagtcctatcaagcattgattttcttaaccactaaattcaaaaaagtatgcaattttgatccacacacccttagcttaaattaaatcgtcacattttttttcaactgtcgaaactgaatcatgattctaagaacaacatcgtcattataacactctttagaatcttaatcaaaaaattaattgtgtaatatatagaatgtacatgtatccaagcaagggcaacaacattatgaggttcacttgcccgtgatgaatgggtgagctaatgcctgtgacactgtaagtctcttttgaggatcaagtgtgaaaattttgtccaaaagattcctgaaatgaaccaacaccttgggatcttcatcctcataacgtcgtctaattactgaacctaaatcttttggctttacgttgaccattattctccttattgtctttccagtaacactatcctcctctgtagcatagaagcataagtccttatcaaagtgttgatcgataaatgctcctttgcgaagcatctttttagggaagggacctttcagttccatatgcaggcgtaacatatcattgtttgtggagccagggaacataattttcccgttataaagctcatacagacaacaaccaactgaccaaatatctaacggatggtcgtaaggtagtcccaggaatgatttctggagctctgtagaa

SEQ ID NO: 18153 - DNA, 1537 bp, Arabidopsis thaliana landsberg
  unsure (1)..(1537): unsure at all n locations
tattgcattggctagtccgcgatggaattgacgtcacagaaacatcagattcttcatccatcccatcttggacaatagccaaatcacttcgtctcctcatcgaagaagccgacactctctctttccagagtctcccgtcctgtgatcataaaaaatagagtgaagctttctacaaacactcctatctttgcagttttcactataaaaaaaaaactaattttttcttttcttggaactttttcaagaatcttacattgagaatggatggctctgggagtggacattggatcggttgatcgttgtctaagggctccatcgggtgatccaccggtttaaactctgttgctacttcgatcccatgagtttcagtggttgtggtgttagttgccggagcaagatcagatcttggagacaatacttccctgccatcctgatcataggagaagatttcatgtcaagtgtagcctgaaaccaatttagggcttttccagataaataaaagggtctcagattcaactatagcttgaaatctattaaaggtaatcagattacaaaagaacagagagaatcttgaaccaatgaaaggaactcaaaagaacagaagaagcactaaacatctcccattctaatcatcaactctttgagcctagttagcatctatgatatgagcaaagaatctgtccaacaattaaacaaatgtactggagaagtgtcatactaaaaaggaatcactatgaacataaagctcaaggacaaatctaacagaacaaaatctcctgttccatataacctctactggaatcagacaagcaaatagaaaagagagcttacgatggcactctgtgttcgtctatggctgcctctaacaacagaaaacctggagaaaataccaaccatgctattgaattcgattatacgatttttttggaatagacgaatttcttgatcttcactttgaatttcacaagctaaaacacacaaaataaacagtagaagaaaagaacaaaagcagagccacaaagaaatctccagaatattgcagtggactgatagataataagaaatgctttctcagctttaagctttaagctttgcttggcttgaacagattctctgttatggcttctttctttctgtctcttctaatttatccttcaacaacttttctttggctttgaaaattagtattaaatgatgattcatcgcattattaaaatgaaataattcccttattggaaaatgacaattttttctggttcagctatattgttttgttcttgagagaataaactattcattcaatccacatcgagaaagctacaaatcaactagacggattatttaatatgactaaaatactagtaataattaagctatttgaaccaccagctcaagaactcaagtgttattgaagtatcttgcattctttntcaagacaggctaggtactaactaatttgtcgttcttctttttcaggaaaaaaagtatattaaaaaaaaactaatctaatcagctattgctacgtactacgttcaaa

SEQ ID NO: 18154 - DNA, 1499 bp, Arabidopsis thaliana landsberg
gataaagattcgttagattggggaagaagtacacacgtggaaggtaaaaaatgtagggttttgtaaacctttttttcattgccttatgattaactaggcccattcttattattagtaaaaccattagcacccaatacggcccaatattgaaaacctgtaaatttaaactcgaatttgtaatcggagttgagttttttttgtagaggagccaaataagagaacatcttttgtagaatttttcattttactctttgctaaacaatttttaaaaaaaaaatatgttttacatatattaacgaagagatgtacaccgaattaagagttctttgtttgtctattaagtttaacgtaaaaataaacaataaaagatcagcatttttataaacaaaccaaagtagagtttctaacgaaaccacaatgagtagagtttgcaacacaataaatagaaattaatactaaaaatcttaaaccacacaaataaaagatagataacgaaaacaatcacagagaaataacttaaagagtcaagtggtagaacattaggctaagcgcgaacctcaacccaaactccgtcagtgtaagaaacgatttggttgttagcaccccaagtgcggtttttcactctctcgcgatcagttttagtgccgataatgtctagagtttgtggaaatatctgaagtcgatgtttgatctgatcaaaagattggccgtggaaaggattccattcgatggtatcattctcttgagtatttgagacattccaattttgggttcggaaggtgaagtcaagagtatggccccataaaataattgatattttgtccacagatggggagagggaatctatagtcgaaccacaaattggatggttaaaggtagggatacgagtcactgaccagttctgatcccagtctccgttactcttggctacataatatattcgtcgactaggagcatgcatatgcgctatcaccatatgattattttcgtgaaagctatcggctaggagacaagcataagtgttgtcttgacggggatctccggtgagcacaccgtaacggatcacacatgggttatcagtggtgagaaggggtagttggtaccgttgtgaagtgaacgggttgtataagaaagcttggtggtcttgacgtcggtgtatggcattggagttggacataacaacccaacccaatgttgatcttcagaatttggccccttcaagatatgggtctttcccatgatgtagctcctctctcacagggtcatagaaatgggctactcgggatcccctttctcggtacaacaaccacggcctttcctctgcgaaacctccttcacggaaagaaagaaatgtgttcctccaatgagtgttgacacctcttagtgccccaccttcggtaaagttagggttaagcacacttgtacaacttctcaggagatcttgaggcaaactaccccaaaaatccctgcgagagaaacaaatttgagagaagtgagat

SEQ ID NO: 18155 - DNA, 1477 bp, Arabidopsis thaliana landsberg
tataactaattttatcaaaaacctaacccgtcaaaatctagtaacttacatatatcttaaccttttagcaaagaaaaaaaaaactcacatctattaacttcaaatgttcgtttaaacataatcacatttgtgaatcacgaatacattctttcatgatttcatattggtgatagccatctttaaccatatttatacaaattaattgtaactcgcatagtcgcatcacgcatacatggtcatctttcataaatggcatggcaaaacatgaattttttcataatttttaagtttcgccactattattgtattttgtcacaatgtatacgagagaaaagtaaaaaaaataaacgtcgcctgagagattcgaactctcgcgggaaaatccatgtacttagcaggcacacgccttaaccactcggccaaagcgactgttttgataaggtttctcagtttaaagttatattcttcagaatttgtacgatgctgatcagcaagattatgttaatttatgaaggcccaaacccaaaagcccaatttattttccttctcgtttttcctaattgtaacgcttttttctctcagcaaagatttcaaaggcacgatttcgaattcgaaggctcagagaagaagaagaagctccttcgaaagttccaatcgatttgatcatccaaatcaggagacacagcaacctactccgtgtaattgataatgttctacagagggtaagccctataatttatctctgacttgttctccaataattccacttcaatagtttccgcaattagggtttcttcgtgtgtctatgggttcaaatcaatcctgaattacctcagttaacactcctgtttaagtttaatctgttgcgatttcctttacttgttcaactttatgggaatttttgagtttattgagtaaagtgttgagctttagctgagatatgtttgtggtgaatgtagatatggagatggtcctgatgggcgtgagatgggacctaagcgtcaaagaatgattgatcaaggtcctccaggaccattctatggacctcatcctagttctggctttatgtataacccttatggatttgttgctcctcctccacctcctccttttcctgcggttcgactccgtggtttaccctttgattgcgcagagcttgatgtagtagagttttttcatggtttggatgtggttgatgtcttgtttgttcacaggaacaataaggttactggagaagccttttgcgttttgggttatccccttcaggttgattttgctcttcagaagaatagacagaacatgggaaggagatatgtagaagtttttaggagtacaaaacaggagtactataaggctattgctaacgaggttgcggaatctcgtgtccatggtatggctagtggtggtggtggaggtttaggtggtggcaatggacaacgagcgtgcagggaagaaggacatcacgtgcgctctcatg

SEQ ID NO: 18156 - DNA, 552 bp, Arabidopsis thaliana landsberg
aatggcgcactggcattagttggaatggccgcagtagtgagagcgacttttggtggcttatagtcattggaatttcccacatcgctagtggtgttaatttgtgtccactctgtatcaaagaacgaagtccattggcggtcatagatatcatcagggtacctgaggatgggaacaatatcgttttagcagaggaacataaaaataagatggaaaatatcatttttttcttatcttggaccttggtgatcttaagagactttttctgttttcatcttgttgtaaaatttttctagtttctaaaaaatattgttttcattgaaaatatcacccacgttggaaacagatacacacttgcaaaaacagagccaaaaacaaaacagagcataacagaacaaagagcgaaacagagcaaaaagaggagatgatgttcagttgaagttgataccttagagaagaatcggacttgctaaaatattctcgatagttaagtttcaaagagccagacttggtgagataagtaccactttccatttgccgtactttcaaaaccga

SEQ ID NO: 18157 - DNA, 614 bp, Arabidopsis thaliana landsberg
caagaaaccgacggtagcagatgatgatgttatggaccaaacggtatatacatattatccattcaatttcctatcacggattgcaacaatctgaggttttctgaatatttcaatttgcagcaatactttgagaacagattgaggtatcttgcagcgcagaaggaaaagggagagaatccatacccacacaagttttttgtgtccatgtcaatctctgaattcattgcaaagtatactactttaagcaaagaagagtctgttgaagacgatgaagtttctctagccggtatgatacacccatccatgaagtttgttgcactgaaaaaaagtatatttgttcaatgtttttttgaattttggtaggacgaataatgagcaagagatcttcctctgacaagcttttcttctatgatctacataatcgtggttctaaggtccaagttatgactgatgcgaggtgactaattggttttaattagagagatagttgttcttttttgtttcctatatatgtagtttaactagatttttttttcccttgtgatgcctcagtacttcagaattagatgaagctgagtttgcgaggttccactgctaatgtaagcgtggagata

SEQ ID NO: 18158 - DNA, 540 bp, Arabidopsis thaliana landsberg
agaagccctcctacatccggatactcaacgtcctcatgctcatcagaatcctctttcttatcttgtgactcatagtcaccactaggagtgaggatcatcaccctttggttcagacattctctcgccatgtgtcctctaccttgacatttgaaacaagtaatgtaacgagaacgagattgattagtactagggaacttacctagtttgggcctagaggttttaggtgcctcattagacttgttcttgaacctatgatcactctctacggccttgcttttgtccatggctcggttgttgcttgcattccaaggcgtgttgtttctggatcggctgcttaaggatgccttacgcctgatttgctgttcgacttgtaccgctaggtgtagcaactcatggagtccattatattgggctctctccacctttcgctgaatcctctcttgtaatccgactatgaattgagccatgagagcttcgtcagattcctctaacttcaaggcgttcatgagcttctcaaactcctcaaagtactcatcgacg

SEQ ID NO: 18159 - DNA, 491 bp, Arabidopsis thaliana landsberg
agctgactctgtaaaggtagaagctgccacacatttgcttcagaagaacacattaagaacagatgtgacacgcgactcattctctgcacagaaaggagaaatagccaaaggattgatatgtctaagtttaaggttctctcccactggcaagacattcctagtagccttccaaaggaggattttcatcttgggggagctcttaagattccaaatctcttctttccatttgaaaccaactagggaagggtcaggctcattaaacaattcgtcccctgcacaagaagtatagtaaccagatctcgtactatactcccccgacgcattaggtaaccacatccacttacccaatcctcctcttttactgatctttagcttaaggatatcagtttcatgttcaagaatgattgatcttatctgattcaaatcccagtctctagtgataggggacaagagtgaagacaccagcgtcttttggtcttggatattgatcg

SEQ ID NO: 18160 - DNA, 598 bp, Arabidopsis thaliana landsberg
  unsure (1)..(598): unsure at all n locations
aatcatccaccctctcgccgcgcgccgcctaagacacaacacacaggttcagcaaacccacacataacccacatccagcaaatatcaaacaaaagccaaacgttacctgagccctcgccgtctcggcccgctccctgaccacctctcgaccgtgcgggccccacatctggtcgtagatggctccggcggactccttcactatagggtcctcaaccttgtagatatctcgttcaaaatcctcatcggcttggtcgaagacctcgaagtgccggcacccttcgtgagagagtgcgttcatcgccccctcgcaggtgaccaggaaggcatacgacataaacccctccatgatagtggggagtgcctgcaactcctcctgtacccactccaggcagcgaagtccgggctctcggtccggcacttcgaagtcaccggtccgcgcgcnnnnnnnnnnnnnnnnnnnnnnnnnnnnnnnnnnnnnccgctcagcctccgcgcgcgtcgcgcctcggtcctctccacgcagctctgcagggcgttgagcactcctccaactgcgtggcacgctcctggcaagattgcctccgcccgcacaaattgg

SEQ ID NO: 18161 - DNA, 1465 bp, Arabidopsis thaliana landsberg
atccaagcactccaatccttcacattcaatagaagagctagcaatccattcaaagacacaatcaaagctttcaatctctccaagttccacaactgagacaagtgatcactagtaattagtgacttgagagagagagagagtgatacgtgtgttgtttgtcgctcttgtcacttggtttttgcaatcgtgctttcttcttctcccattcatattctcaagtgacttgtaatcaaagcaagagacaccaagtgtgtggtggtccttgcggggtctaagtgacccgtttgattaaggggaaagctcactcggtctaagtgaccatttgagagaggaaaagggttgaaagagacccggtctttgtgaccacctcaacggggactaggttctttggaaccgaatctcggtaaaacaaatcaccgtgtcacactccttattcgcttgcgatttgttttgcactctctctcgcggacttgattatatttctaacgctaacccgacttgtagttgtgattaattttgtaaatttcagtttcgccctattcaccccccctctaggcgactttcaattggtatcggagcccggtgcttcattagagcctaaccgctcgaagtgatgtcgggagatcacgccaagaaggagatggagaccagcgaaaagcccactacaagcaatgagaaagctctatcgggagagtcccgcaacaaggagaagaggaaggaaaagaagaaggacaagaagacttcttctcacaagtcgcatcggagtggcgacaaaataaagaagatgaggaaggtggtctactacgagaccgacacttcatcaccttctacctccggctccgacgcgccctccataacttctaatggccatgagcgcaagaagtttagtaagagccccttacattatcctcgtacttctagacatactccattactttccgttccattaggcaaaccgccaacttttgatggcgaagattatgctaggtggagtgatttaatgaaatttcatctaacctcactccacaaaagtatatggaatgttgttgagtttggagcacaggtaccatccgtaggggatgaagactatgatacggacgaagtggcccaaatcgagcacttcaactctcaagctacaaccatactccttgcctctctaagcaaggaggaatacaacaaggtgcaagggttgaagaatgcaaaggagatttgggaccttctcaagaccgcgcacgagggtgatgaactcaccaaaatcaccaagcgggaaacgatcgagggggagctcggtcgcttccgtcttcgccaaggggaggagccacaagatatgtacaaccggctcaaaaccttggtgaaccaagtgcgcaacctcgggagtaagaagtgggacgaccacgaggtggttaaggttattctaagatctcttattttccttaaccccactcaagttcaattaattcatggt

SEQ ID NO: 18162 - DNA, 488 bp, Arabidopsis thaliana landsberg
aagcgatggggataatttccatttttattcgtgcatgtcatattaatcatattttggtgtagcatacgtacatttgtttttgtttgattagcatagcaaacaatgtgtcttgaatacataaccttacaatgaactaagacgaaagaatttttttatcgaagaaaacgtatgttgcatggaaacggaaacgtttccgaaacgagaaactatattttccaaaactagggattgaaaatatatatatataacgtaaaactatattaaagaaaaacggtttaaacaatacaagtccaaaacatcaatattaaatacgttaattaaaattctaaaagataaattaaagattaaaacgctcaggttcaaatatctagaccaacattttcattagttacatcaaagatcatataaagataccttcaaatctagtttatcaagagtaagatcttaaaagtcagcgtcttccgatgtatatatatgttataaattgg

SEQ ID NO: 18163 - DNA, 1459 bp, Arabidopsis thaliana landsberg
ggggggacaaaaagaataactaagagctttccgcattacatacccaaaaccattaaacaaaaaattaaactactaccctagttaacaccttccactttctagtttttctaaacctctgcattatgattcaaccagagattcaataccaaacatcatcattattatcaacaaccaaaatccttgataatgtcaaattcttgatcatcatcaaaaaccaaaccatcctacaaaatgatggaagcaataacatttataagaatatgatctcactaacatttatggacatataaacaaacattaagagtgccttagaatcaacagccgaagatccatgacaccactttcttcagaagagttacatctggaaattaaataaagacatttttgttccttttggctgaaaccttctacttgggttagatactcttagacactttaggcaaaacctcacaaaactccaccttgccgtagtgtcgaatcctttacttcacctttctagattccttgagttccatcttggtccctgagatcttctcaggattgtgatactttgagaagctccttatctgcttgaagcattctccctgttgtcactttagtgatattctcagcttgataagctttttcactcctaacaaccttgaataccaactctgcaatcatttctcctatgacttgcctgctggtatcaaccccctttaatcttcttaagcatactatgatcttgaccagagtagactcactcttagaatcacaataaacttcaacaatggcgtgttgaaaaccatcttctgcaaacagctttctcatcctgtttactacttgtgtttcttctgcaaaactgaaaacaacagcctcttgaacctttgttctcctgtgacttatgatttcacctgctgtgaattcaattagaagaaatgatattcttttgtcttgatcagtttcataaacagatttacagtcacttttcaccttaggactattttgctctttgctgtttaaacagacctgcagcttctttgtgtccttctcactgccagcacagagtcatcttgttgactacccatgaagcttcttataacacctgcagggcacgaatttgcaggtctgattcttatcatgatgttcttttcagcttttcatcatgtttgagatgcacttctcagcttgtaagaacctctcttgtctattcttactttttacctctgacacacactggtttctcttctactttgaagcttagactgttctgctgtcaagacttgacttcttctgcatactccacaactttcagtccagattctttgtgagtattgatttgtcagttgtcactgacctcggatcaaaacttggcatatacatgtatgatataggaattctttctagtcattgacgttttcgaaaatacacacataaaacaaagcagtatttttacagacttaaataattattttatcga

SEQ ID NO: 18164 - DNA, 349 bp, Arabidopsis thaliana landsberg
cccgacccagttatctgaaatggataattttgcgggatctattattttttactccgaagacgataacaaacagaactcactcggggaaatctttacaatttcttttagactgctctatcactctaagaccgaaaccgctttatgcttttcagtgtcgagaatctgaggaaaacgtgctgtacccgcatgcctagcacaccatcacacatgcgttccctgacaatttttagcaagagcccggcgtctagcgctatggtccgggaatgtgatctactgctcttggggccacaacctgaaccccggcgaaaactatgccggctcgtttgaagacgattagcgctcttgctac

SEQ ID NO: 18165 - DNA, 3321 bp, Arabidopsis thaliana landsberg
  unsure (1)..(3321): unsure at all n locations
atatttgatatatattaaagtatgttcagtttaaaaagaataatgaatttttattattgttctttaatcgatttttcttttatttaaaatattaacgttcaatattgtgtaattagttttactactaaagccgtttttctattatttcaccattcaacatagattttgaactgtttgatccgcactttttcttcttgatgcgcctaatacgcttgatccacagttgatctgcatgaaccgcttgatctgcttgatccgcttgcataattcgaaacctatgtttttattttggtatgcggaaannnnnnnnnnnnnnnnnnnnnnnnnnnnnnnnnngctttttgttttagataaaatgtccaatccttcacttaaattatgtagggtgaacaaaaaattaaaccatagaagatgttataattaaggatctgcaaacggaaaaatgataattaaatctctctcttctaacatacaaaataatgacgataatatctttacccccgacacaatctctattgcaaaacataacaagattacagacataaaatcagagaagagagagcgagagatagcgagagatatatgcggtgctatggagaagagaaagattttatcaaagaaaatgattacacatatatttctcgaattgtggaagtatatgtcatttgggtttaaatatttattaccgcatctccttaaacgttgtccacacaaaatcaaacacagcaaccataaaatttctgagaaaaacagagcaaccataattaatgcggaaagaacagaatagaaaaagtaagtttctgggtagcattaaagagcgtcattaaagagcagaaggttatatgtcgtgtgtcccagttcttcttctttgtacctaaagttagtttggtaatatgataatcggtaataacgaagttacaactgaatttttgcaggtacattatgactatggtagtgcgtttgggtagagagatccaaaaataagcaatgacaactgcttctactatatatggttacctcgagaaaacaaagggaaaacgccgaacttcaatcggaaaaacggttttgaatatcggaggaacaaaacgggaaaacaacgaagaaagatagaaagagaaccataaaagtgagagaaaaggaagataccaacaaacgcaactcttagaattcgaaccgttctcatgataattatcacacctattctcaaaaaattctcgaaaatcaaatctttaagagagatacgatgtctcggttatgacacacgcctattgttgtgcataaatctcccttttgatgtgataggcaggtagggggtaagatgtcattattttgctacagtcaagaatgccattgaaccagaaatttgaatcccgatatgtgttatccctattttactctaatgaatgattctttatcctacaaaaacgctggttttaatttagtagatgtttttactcaacatatggaccatactaaaaagtattttgtctttttgcggcagaagatactcatagttgtaccgttttaccatcgtattcatagttgaactttccacagttttcataatttacagttgaactagacggttaataattaattataagttgaacgcacactttttctctattattttgcatttccaaagatttcataatatgacattggtgaaaacttggttttcacatattttactacatataaggtgatcatatactaaatgttccttatattagaaggggtgttttatattaaaacaacttctttttagaaaatatcaaattttattgtattgatctaaaattatttatttataatttaggaaattcgtatataattttacgtgtataataaattattaattttacaaatttaaatattttagcgttacttagttgaactagttgaactaattatattaaatgttaccacgaaaaccaaagaaagacatttgaactagttcaactaattaaattaaaaggtaccacgaaaacaaatacattcatgtttttaatctaatctaataagttgaaccaagttgaaatagttgaattgttcatacaaatccgagaaatacaaattcaaaacacaaattaattttttaatgtgcaacaaattctacaagtttatccccaggcatagccttgttcttcctcttgcgacgcttttctccggttgatgaaaaccatatttttctttgtattttttaccattttttggtgtataaattcaattggctccgtcgactctggaaaaaccatctatggccgactcatccatttcggcagccgtcgattctcaggtgttgcgtcttcctccgtcgatattgttggatcaaaatctagatcgatatcttgatatttactttctccactctagaaacgttccttctttagagatattatctccggtcaactcatatatttcaccggccgccttttcctccgtcgcagcgtcatcttttctttacaagcgccttgtttgttctactttatctatagatctcgattgaagaaagtcaatgaacgaaacgaaaatggctctttagatatttgcaatggtagtcagtacaatgtagtaattgaatcgtgttgctctcctaatcaatccgtacctgcagaatacaatgagacaactgaaattggttcaactgatctagttcatatggttcaattgatctaattcaaatggttcaactgatctagttcaaatagttcaactgatctagttcatttggttcaatcggacgagttcaactgatatagttcaaatggttcaactgaatgagttccaatatatttttccggcatatgctacaaaaacatcagttttaataaaactattttattgagtaaatttaaaaaatgtcttctttatgagtttttatttgaaaaatactctatcctattttttcttgtaaaaattaatttttttaagatataaaattaataaaataacttcattataatttaatataattaaaaatttaagcagaaaaaatctataaattaatatttgatttaactataatttaaaagataattcttatcttaaatattttaaacaaaattttgtccaaaataatatatatatatatatatatatatataaataaattttattaagtgataaaattcaaaatatatttaaatattaaattttaatataaaagataaataaactatatttattttaaaaatagttgaaaaatttatcaacaaccaaaacatatttcgaataatacatacatttcgaatttatcaatagccaaattctttttggaatctattacttatattttgaatttatttaattttcattttt

SEQ ID NO: 18166 - DNA, 1816 bp, Arabidopsis thaliana landsberg
cttcttcatctcctcttttgtattcaatcacagagagactctcttctccagatctatcatttggtttaatcaagggttgttcgtcggaattatcgaagaattctcgtagatctatccattcattgattcaatttgatcttttccgattagttccgatctgatcgagcgatatagagtctcgtctgattggtttggttagctcaaagttatagtgcagatcgagacaaatgtacatttttgtgattcgttgatgatgaatattgtagcctttatgtatcgatgcatgtagattaatctcgttagtggtttcgattatctaatcagaccaaattgatgtttgatcatatattttaccaatgcactgtgttatagtgcggccaaatgatgagtcttttgaatgatttactctgatttttgccgaaatggctttggtctaaggttagctagtgaacatggcaacgggggctgagaaccaatggcttaaaggaagagtgaaggctgttacctccggagactgcttagtgatcacggctttgagccacaacagagctggacctccaccggaaaagaccattactttttcttctcttatggcacctaagatggtgagttttaatctcaagttttttttaccagatattagtgtttgaaacaaaagcttgtgatcatcacaaccaatcaaaaaatctttttgatattgatttttttcttttcatactgcttatgaagtcttaaaccgcagattatattatttgttgttggaattaaatgtcatgttgtttgttttttcctctttttaggctcgcagaggaggtatagatgagccttttgcatgggaaagcaaagaatttttgaggaaactttgcataggaaaggtgcaaagtcaaaattaataactcagttattatacactagctattgtgagtgactatattttctcatctcaagtttttatttgacaggaggttgcattcaaagtggattacaaggtggaagctattgctggaagagaatttggctctgttttccttggcaacgagaatcttgctaagcttgttgttaaaactggttgggcaaaggtgataagcgttttctttcactcgagatgatgttgtctgaattatggtggtgataccttagctttatgacatgacaggttagggagccaggtcagcagaatcaggacaaggttagtccttacattaaagagttgctacagcttgaagagctggccaagcaggaaggatatggtcgttggagcaaggttggtcttatcttccttacttattctccaaattctttactgccttaattgatttgatgatggatttacccgactccaggttcctggtgctgctgaggcatctatcagaaatcttcctccttctgccattggggattctgctggctttgatgccatgggccttttagctgcaaacaagggcaagcctatggaaggtattgtagagcaagtgcgtgatggaagtactattcgggtttatcttcttccagagttccagtttgtgcaagtatttgttgcgggagtccaggtatctaaacttgtttctcagttcttgctgcatgcaaggttaacgttttaacctatcactttgaaacacattcagcaatatttctctttcaatgtaggctccatcaatgggaaggcgaaccacaaatggaagtgttgttgagacagttccagatgagccgaatggagatgtttctgctgagtcacgaggtcctctaacgacagctcagagacttgctgcctctgcagcatcgtctgtcgaggtttcctctgatccatttgcaactg

SEQ ID NO: 18167 - DNA, 733 bp, Arabidopsis thaliana landsberg
acaggatatttatgatgatagcaaaccgcggtgattccaccaactggctatgaagtctcttttcactgatttaaaatgccaaaggagttagttgcttattcatgttctaattttgtgttttttgcgccctgcaaccagcatctcgatagacctggtgtgagcttctgctcacgcacaacttacaccgaaaacgctatcaccaatgcagtagatatatatagaaactccaggtatctcttcactttcatattaattttggttttggacgtccaaggttagacgataggacgaacagaaactgaaactagttatatggctttattagcggcgcactgcatttcatggcctcaaataatgactgtggagtcagagactttgacatggagagatataagcttgtccaactcttccgttatctatggcccgtcaatgtaagctcacttattttctcgtttttctggatgtttagcagctaaatgaaactcaatcttacaaatttattttggaaaatttcaacagcatagttccctaagtcctgatggaaaactagtagcagtcgttggagatgacccagatggtctactggtagacacaagtaacggacaggtacttaacattcttcttcccggcaccatctatttcactgcgggtaggtcttggagccttacggttttgagttttgtttcagacgatcgggacgctaaaaggtcacttagattattcatttgcatca

SEQ ID NO: 18168 - DNA, 935 bp, Arabidopsis thaliana landsberg
aagcaaaagtataaaattggcctaacccttctcctgaaaattcgtgtttccaccataatcaaacttcattaccaaaaaaattaccaaaattcagagctctaacacaagaaatccctagaagagaactgaatcaaaaaagatacgaacttcataaaacgaagtcaagcatcttcaataagccgaataaaacaaagggcaacacacagaattagaattctagaacccagatcaaacttcaatcattgaagatgagaaatcaaaaacctcgtaccttgtaatccaaaatcgcggcaaaagggaaattacaattcgcgctgagtttaacgaagctctctcccaaaatcagagacttttgagattggatcgttccaatgagtacgtgaaaagcttgaaatcgaaatcgaaaatcaacgacgtctctgcaacgacaacagccatgagaggacgggatcgagacgaaccgcgcgttcgttgcttgctgtttttgatcggcaatggtattggtgattgtgaaattacgatagtacccattggttaaccccagaggagattggtcccctcatggtgactgttggggtaatctggtaatatgtatgagtcaagccggcttgaaaagtagcttatattggctttttaaggaaataagctgcgacgattgatgaatgaagattattgttactgtttatgaattaaattatatacttggataatcacaatcacaaagtaagcttaatggcttttaaggaaatttgcatctccaattctttgttttctttccattgaaatctcatttaaccacattcacgtgtgtaaaaaaaaacatgattagaacttttaagttttaattaatggaatcatgactatgaagtaactaagaaatacttttaaaaagcagagagagagagatttagaattagctgtttgtgttgagactt

SEQ ID NO: 18169 - DNA, 526 bp, Arabidopsis thaliana landsberg
ttcatctttaggtcggttcactccttcgtcttgagacatgtcactataccgaagctttataggtgatagcttcggcattgcttttaagaggatccgctgacggtgtttctttcttcaggatcttcggctacgaagcatacccccaacagctagtaaaatgttcgtcttcctctaccttggttcggcgacgaggatggatttatagcgacaataaggagggcatcagcaggggagttgatgatgcggtcaagtcacagcgtaacgagcgtggtcgttgggcggtgacgaaatccgttgaacgacgaatggcgacgatgtcgggcgagcagttacaacaaaccaggtggctgacttctcgatgcatgcagcaggagttttgtcgaggtactgcgcacgatggcggcgagcagcacagcagcaatggcgcatggcgagagaattccggtgaggtggtaacgacgtggcgcagggactcagcggcgtgaggatggcatcgtgcaagagggcatggggaagcggggggttg

SEQ ID NO: 18170 - DNA, 583 bp, Arabidopsis thaliana landsberg
attattaaaacaataaacaaattgatgtttaattttaagagagggagttatatgataggacaagtttggatcgatcttaatacgagacggtatatcacatataaaattttagaattaacaatcaaaatacaattataattttaaacgctaaagaaaacaaaaattacttaacattgaaaactttagttatcaaaaattgatccacggtttatcaaattcaaacataagtttatacctataaaatataaaaatacaacaatatcaaaagtttataacaaaaagtatatatatttatcttgcgagtcatattctagtaatagtatgtttttggaagccataatagttatttatttaaaggctattttaatcatcatactaatgtttagtgacttaactgcggtatagtattataatcaaatgaaaataattaagaagatgatataccaacgagccgactctgcgggattcgctcggacgttgttttcctaacaagcgagttgatctctgagccaaccatctctgttgactctccagacttgggggatcggggtgaggtgagccccgtctttgtcaaaaaaccaac

SEQ ID NO: 18171 - DNA, 1320 bp, Arabidopsis thaliana landsberg
gaatgatcgtttttttgtggtaaaacaaaaaaaaatctaaaaataaccatattttacacattttatacttttttttaaagagactttaaatgattttgatgattttagggaagttcatatgatttttgtaaaatctattcaaatcatctcaaatcctctcaaattctccaaaatcattaaaacttaaatccacaaatcgttttcaataacaatggattttaaggtttcaataacactaaatttcatgagactttttaaaatccatgtttaaataacataagatttataaattctacacaaatatcttaaaattccactttcaatacaccccgtaaaatgcataagagggaaagggtaagaaaaggtcaattcttacttagaactttgataagaatcagatggtgtctctcttgcatcagtttgaaagtattattttctaaatgtagttccatatgtgaagtggtaaaacatacaaaaacacaaaagctaacaggagacaattaatgtaaagagaaccagaacagaacatgttgtgtctttacattgtaccatcttttggatcttgttcttgatcattatccttgaggtttctatatttgtagacccaagaacacacaaggaagtagccgaaattcaagattcctccaatgactaaaagccagtaaacattgtccactcttccgtggttaatgtcatttggtaaccacgctgtggtcctctggataagatcgatgagagctgtgctcaaatagaaagagattccaatcaccaccgaggtcaatgaagtcgcggtgttccttagagactcggggaattctccataaaataattcaatattcgccggaaactggaaggcttcgcctattcctactatcacaaggggaggaaacaaccataacactgacatgggatgaccattttcaactgttttcagtctctttgcttccacaaccgcggagagtgccatgcttagaatggtgagaacctggcctataccgactttttgaagcggtgtcagcaacttatgagttatcttcttgtacattggaaagaccagccagttgttcattatgataacaatgcatgcagtgatgattattattacttggagggaacctgccgggactttgaagttaggaccaagcccacggtccgtgactagagcttggagtacaatcaagcttgtttgcatcaccataggagtactctcgaatatgatggatagccatagaggaaaaactcggacaatgcctttgaaatcttctacttcttgtacagagcaaaacctccagatgttgttaactgagccttctttctgat

SEQ ID NO: 18172 - DNA, 1821 bp, Arabidopsis thaliana landsberg
gaaaatatatatatgcatgtgtactaccacacaagtttttatatgtctctttggcaatctattttggtttccctttgtgactcgatggaagaggtgaattgttttaccaaaaggatggggtggaggagctctacgacttggtgggggaggaggaatgggagggattgaacgtacatgactgaagtgaggaagaggagctgttctactggtaccttaacattggaagtggaggtggtggcggtggagctcctccactcatcgagggaagtgttggtggtggggctccttcgcgcactaaaagaggtagcggagatgtgcccatcaccaagcgagtttggaaagggattgaacgtacatgactcaagtgaggaggtggagctgttctactggcaacaagcattggaggtggaggtggtggcggtggagctcctccactcatcgagggaggtggtggtgatgggatcctacacgcactaagcgaggtagcggatatgggccacacaccaagcgaggaggcggattaactgcaggtattcggcagcatgcataccttggacgtgaagggggtcttggtatagaaggcggaggtcttattctagaaggcgatttggcctccgaatcatctaaagaagtatctgagtctatgttgtggtcaggcccaccaaatacatcttccgttgcagctttcttcttctccaagtcctcttgcttgacattctcttggtgtgctttcttaaacaaccttataaaactcaagagtgtcgcgctaactgcaggcaatcgatcaccacatgtattcttattagcaacaacataacaatgagccactttcttctaatgtattagcacaaatgaggatgatgttcattgtatacctttttcaaatggataatggttaggatcctcgccaaaatagtgtgcaagtgcatcagcatttattctctgtcgtccatcataagatttattcaaaaaaaaaaagtaatctcaggatcaaacacattgccaaaggttaggcgcttggagtctagtagaggttgacaaaaattaccgccgaggagtaaagagtcgatacagttgctacttgagtctcagcactggatatgaagtccttcaataactgttgaaaaacataaaaactagattttacaaaagtgatggaaaattacgttatgtggcacagtcatggacctaatctcaaattcacggttgataaaagatatgcaaaagatcgagatagatagaaaaacaacaacatactttacggaaaacttgagaaacaggaccatcagtttcggatgcggtgagctcctgcttcagtttttccaatcctttggttatagcatgtatttcctcagccagagacttcaaatttatctgcaatagacaggacaatcaaatgatgagccacttactgcgctaaggacggaaaaagtaagtacaaaggcaaacctctaaagttgattcaagactttgaagatccttatggaagtccagtagatctgctgccttggaagcaaggacctcggaaaaagaaagagcaggggattcaggattatgtattcctcctaagcaaatcatttctaaaacatgcagcatctatttctttcgcattgtattttaccttgcaaagataatgcataagagtcatcttgttgttatcagcacgtgtctcgcttaaatatcaatactatccaacctgaatcccactgcactgcctgcagaaagcagagcaagggtctttattaaccacaaatgatatgcgtaaagacaaaacaaaagtatatgatgcaatgaaacaaaggcgccattcttttcttaaat

SEQ ID NO: 18173 - DNA, 635 bp, Arabidopsis thaliana landsberg
aaaaacataccttaagaaagcttgccccaaaggtaagcttgactacattctgtaacttgtaaagacacttgagcaccgtgtcgagaaggaaattaccctttatctctttaagtgagcaaaagcaaatgtctactttagcttcggttaaagacgagatatcaacaaaagtagataaagaactgagaggttttcaatgtgagagaatggatatgcggtgccacaatgtgctttggccccgaaccccaaatgctaccatggatttccaatattttcaaactcggtgatttggtgagatcaagaaccatcagttgatcacaaaaatgcaatgttaagctttcgataatcggacaaccagaaagaatcttagcaatggactcatcagagaaataaagaaagcttcgtgagggaactccaagaaacagagcatctgggattcaattcagaagattctgtcccaaggacgagttgcttgacagaggaattgatgtacaagtaatcaggaacatcatataaccgaaaatcgaaactcagaaacagattctccacgtttcgggacatggcgaacttgatccatccatcaatgtaaggaagattgattccgttggtgatccaaaggtcaaaagtcataatcttgc

SEQ ID NO: 18174 - DNA, 1049 bp, Arabidopsis thaliana landsberg
gaactcaagatgatctccgatggctttacattcaagatacctattattcccctcaggagaagtcgcttccgtggcaccattgtcatagatatctggcagctcaggtggtatggcgcagcggatgagagcccaattcaatccttcaaagaaaggatgtcttttgatctctgcagctcctttttctgaccccagacgactctctggatccttcaccagcagccttctgatcaactcctttgcctggaagctcacgagcgggctatcaggaaacttgaggttctggtatacaacattggacagtgtctcctcattgtcataacctttgaaaggtgtcttcccgtacaaaagctcatagagaaggaccccaaatgtccaccagtctactgcagcaccatgtccttctcctttaatgatctccggggccaagtactcgtgcgttcccacaaacgaatttgatcttgcttcggttggttcagccacaagctgaggcaatgatctgaactgctgtgtcaaaagatcaggccttttcggttttcttggtttttggtttcttgcttgggttgataagagcctagggctgaaacatgggacccgacatgatggttcaatacatagaggttgtatgcaattcgatgtgctgtatggaccggacatccttgcgggatctttctcgggtggagaagttgatctgagaagagtcgggttcaccacacatctgagtgagaggtcaaaatctgtaagcatgatgtgaccatcttctcggactagaatgttctctggtttcaaatctcggtatataacaccaagcatgtgtaagtactccagcgcaaggaggatttctgctacatagaacctgtcaacaatatcatcaattttactgtatattattaccactgaattttctaaccagacaaagactttgtgagcattacaaattcataacaacaatgtgaaatgtgatcttacctagttgcgggttcggagaaacacctgctgagctgtttctgccttaggacatgaagatcaccaccaggacaatactccatcac

SEQ ID NO: 18175 - DNA, 361 bp, Arabidopsis thaliana landsberg
atttgttagtgagagtattagagaggatgaatttaatagtttttttttgtttttgtgttttgtttttggtttttttaatagaatttaatagttcatttattgtttaatacaatgtcaaaattgtgtatatatttaataaagatattatttaattagtgtacaaatatatatatttgtaaacttatggtcaatgatgtaaaaatttcaattagtaattttgaggcttggtttcaatgtagatagtaaatacagtagaaactctataaactaatacataataaattaataaacacgataaattaataaattatgtcggtcccaagtcgggtcaatgtaaaaattaaccaaaatcgataagata

SEQ ID NO: 18176 - DNA, 686 bp, Arabidopsis thaliana landsberg
gttttatgtatgctgtatatttaacgaatacatcttttaaatcatatatatgaaagcacgggattatgctgtttcatcaacacactcaaaacttttacctataagtaaaaattaacaaacaatatacagtgcttaataagaaatatatagttttcatccttcataatacaaactctcctataaaataatatttgtagaaaagaataataatttctaaatatattaaaaaagtaaataaaaaaaaataacaaaatccggcgggtagcgcggacactcacctaataaagcttaaaacttaaaggatattccatgagaattaatatgtgatggttatttaatttgattccataaatagttacagaatttaagctgtatatttaatttcgtaaataaaaatatgttattatttttttactgaaatcgtgtgattattaccaaaactagtagtcaattttgactggtacaaaccaccaccctatccagcttgtaactactaaaaatgatgaaaacaaaatagaagcacacatacaaaatagctttattattgtttcttttaaattcatactcaaactctcaaattcgaagaaaatactaaacaaaattattattttatcagaaacttctttttggcgtcattgcatcagaatcacatgtttatggtccattgacgtaaaaaagataacacg

SEQ ID NO: 18177 - DNA, 1811 bp, Arabidopsis thaliana landsberg
  unsure (1)..(1811): unsure at all n locations
tttttggttgtaaaaactttggttattatgattttaattgtaaaaaattggctgtagagattttgacaatggagaatttaattattaaaatctgattagtaacaaaaaaaaactgtaataacttattttattattattaaatatttttttataaatataatttatgctaaatatgaatttatttgaaaaattagtgactaaaataaatttattatgaaaattacaaaattcataaataaaaaaaattatcttacaaattcactattttaaatactccatctgtttcacaatataagttgttttagctaaaagcacgcagcttaagaatatttacttttaaaaagttctactaatcataaaagagactgcataatatagataatcataaaatattaaaataatatataatttatcttgaaacttgaaaacaacttatattgtgaaacaaaaaatttgatataaaataacttatattatgaaacggagggagtactcaaatggggtcaaaaataaaataaaactgtctttaactaatcaacattatttggtaggaaaatattaaccattcatctggttgttgattattctctctacaagataaatactcgacttattacttttatgaataaggagctgaaaattctgcaaaatacccaactgggtcaggctcatcaatctatatatgggcttaaaaataaggcccaatagatatatttagttcatgaatctacttctcttctctatttatttcactcactgtctctctctgacaattcgaagttgtagcaaaccttgctttcaatcgacgaaggagttttgagttgaggaagtgagtagaaatcaatggaggaagaatctaagaatggcggaaccacgattccgactgaagaattggcggtggttgcggtgccacctgtagtagaagaagaggagccgatggtcggacctggaccagctccacgaggcaaacgcaagcgtccgcttcaattcgagcaagcttatcttgattcgcttccttctgctaatatgtaagtatgtcttatgctttggaaccctctctgttcctaatcgaatcaagttttggggtttagggttttaatttgagcttattggtttagtattgttgttggtatatatgagcttattatctgtgaattggtattgaaaaagtaactcttgtatattttttcactaggtatgagaaaagttatatgcattgagatgtagttacacatgttgctgtttcaacagctgagttctttataagtggaagtatggatggtaatgtttctcatctttgtgatatttatgatttcattctggttttgtaatggcaaagcataacatatgtatattttgcataatctaggtcacttgaaattttggaagaaaaagggtgttggtatcgagtttgctaagcatttccgctcccatctcggtccaattgaaggtctagcggtaagtatcgcgagtggtttttaagatactgtcacctcaaatccaggcatatgctccatgttttgaaagattagctttttatttgtttattgaatgaagatagttgacctggcggggaaattatagttagacatgttatggtttccgcaatttttttgtttgtgtctagttctattatcaaccnnnnnnnnnnnnnnnnnnnnnnnnnnagcattgatggtttgctttgctgtacaatctcaaatgatcatgctgttaaaatatatgatgttgtcaactacgatatgatggccatgatccgtttgccatatattcctggtgctngtgagtgggtctacaaagcaggggatgtc

SEQ ID NO: 18178 - DNA, 496 bp, Arabidopsis thaliana landsberg
aagagagagagagagagagagagagagagacggggcgaaaaaggggaaaggtgacttggacgagttcggtcggatcgggtcgggttagagagaggagttgtggatggaaggggcaaagataacgtgacagtgcggtgacttaaatgaaaaaacaatatgggcgtgacgtcatctccaatctttttcaggtgacatagggactggagagattaagaggtgggtgagtgacggacggttttgaccacgtttccttactccttttgactttactttttttgtttttgttttacaattaaaatttgattctatgcaagccggtttgaagaaccgaaataaaccaaaaaacttgtcataagtttttttttaattgtccaatttatattatttttcaatcgggtttaagaaattgtgtatagtcactgttttgtgtttaaaatagagtgatggccaattcattcggtacaacttggttatatttattgtctcaaccacacat

SEQ ID NO: 18179 - DNA, 1541 bp, Arabidopsis thaliana landsberg
ccagccaaaattcgattttgggcttttagatcttccagctcggagaagaatctcagatttcaacggttattgctggtactcctggatatcttgatcccgagtaagtatctttcgttcactgttggatataaacttatcttaaactaatgtggatgtgacattcactgcgtcaaaacatgttgaaaatttgggtccacattcatatttgtgatacaatgaatatttcttgccttacagatattatagatcaggtcggttggctgagatgagcgatgtctacagttttgggatagtattattagagatactaacaaaccaacgtgtgattgaccaaacccgcgaaaagtctcacatagcagaatggacggcatttatgctaaacagaggagatattacaagaatcatggatcctaaccttaatggtgattacaactctcgttcagtctggagagctcttgaattggctatgttgtgtgcaaacccttcatcagaaaaacgaccaagcatgtcccatgttgttgtcgaactaaaagagtgtcttatgtctgaaaactcactcagaagtaagaataatgacatggactcacaaaattcccttgaggtaagcatgagttttgatgccaaggctacccctactgcaaggtagtatttttgcgaggagcattggtcgcatcagtgttttcctgctatgggtatttctccttgtctattgagtgcttcaatttttgttttgatagattataactaaacaagagatgatacatatgtagcactcttttgatctcgcactctctcttttattttaaacttgttgtttggaatctgcgcaagtacttatttatccgctattatgttctgaaattagatatgaaaatttccacttgaaattacttattcgatggctttggcctttacgcacgatgaaccacagggacaatgcacatactggccggtaagatacttacattaaagatacaacgagttttatgatcaatgaagaaatgttcgatcagaaagataaacaaaaggagagtacttgacctaattaattgttttggttttcattactaatagaacctacgatgtattgttgccttctttacttttttgggcagcaatgcctttttctaataaatttttgtttctctttctcccagcccccacctcaaactatactcatttgttcctcacacgttttcagaggtgtgacatgttttcacttttccgaggcgtgacttggtattctcttttgcttgaaatgtccaaatgagtttcgtgagcacattgcttataagcttcaattagggttcatatctttcttgcgaacttaagaagatatggagagtcctttaaaaggtaccgatcgatattagtttcctctaaaattcacaatgttcaagctcaagaaggtacccacactatctttaatgtacaacgaataggattttcgtataccatttgaaaagatcaaaatttgttgtcattcacagaatgtaaaagatgaactaaataccatcacaacatgccaattcttttaaaac

SEQ ID NO: 18180 - DNA, 1046 bp, Arabidopsis thaliana landsberg
agttctaactcttggaaaaatgtgttcgttctggtgaaatttaatcggtatggtctctcttcatgagatgccagacagaagtggcagacaaatagtttattccgagcaaacaattacatggaagtggaagacaagaagattagcttctcttcacaaagaaaagtaagctgactatgccaattgttattgtcccttccaggaaaccgaagttaaagggcaacaaagagatcaaactacttggattaaacccgtttaacaattatgtggagagaccatctctaggaaaaagaagatttaaacaaccatctcttacaacatgaagttgcgttaagaaggcatacgacatcatccatagagtaaatgatcatactacaaaagatggtaccgatttgaagaagcatcttgctgagctacggacaattggtgacctcgcaaaacctcgacatccgagagttcgtgaaaacttaccacgaagaaaaggcggaagctgaaaattcatcactagcttagaaaatacctaaaacgtctaatcccggagttgcttttggttctaagaagaagattaaaattgtcatgaacgagtctaatttttgtagagattcgatcactatacaatcaaaaagtttaagggaatgttctattaaaggcgagcacaagcgacaaactcgaacacgctagagcaatcacaacgttcaaggaagaagaaattcgtcaccttgcagaacctgatgacgttgattttgtcctcaccttagacgtgtctgacgtcggggtttcaaggattgtgattgatgttggaagtttgatagatctactattctggagtatgcttggagagaatggaaagtagccaggctgacatagttggagccccatggatttatcggatcaaggttatcccatcaatctattgtcaatacgttaaatatttaatcccgaatggtgtgaaaattttacaaggagatcaaaaatccccaaaatcttgttatttatcgactcatcggtaaattatcaaattaacaaatctcgtgaagaaagaagtgatt

SEQ ID NO: 18181 - DNA, 1387 bp, Arabidopsis thaliana landsberg
aaaatatgcgctcgcaaatatccgagagactttatctcgaatatttgatagcgcgctgtaactgaataggtgtaaaggatactccgagccgcgcttattgataagccaaagcgttttaaaaaaatatatatttatgctgaagttggaaacttacaagataaataatagatgggagtatggatgcagactcggtaacatcatttccgctggaatcacgcatttcggtccgtagactaacgcgaatgaggtttctcctgtggctcgacgaggtgttgttcgatgagaccacagaacaccttcgagttcgtcggcccacgagcccttcttggctgcgagccgtttcttcaagctgtcgaggatcatcttgtttgcgggttcggcttgaccgttcccttgggggtatcgtggtgtatatttgctaagacggattccccacttatcgcaaaaaccttagaaatgggtcgatatgaattgcgagccgttgtctgtaacgatcttgtaagggatcccgtggtgacataggatgtgtttccacacaacaccttttcgacttgagcgtccttgatgctggcgtacgattcggcctctatccatttagagaagtaatcggttaagacaaaaactaacttcttttacttcgaggcgtgcatcgggctgattatgtccaacgaccaacgcataaatggatatggtgaggcgattgataaagctcggccggtggatggatcgttggtgcgtgcctttggcatttttcgcatcgtttggagaacttttcgcaatccttgatcatcgctggccagaaataaccgtggcgttttatctttatagctagggctcttccccggaatgatttccacacaagcctccgtgaacttctttcatgactttgcgagctgcttctttttccacgcaagtcattaagggtcctgataaccgccacttgaagagtttctcctcgaccagaacgaaacgcgcagcctgatctttcagcttccgagcttcccacttgttcgagggcacttttccttcagatatgtagcttctgatgggttctatccattctgaattgcaaccaaggtccgacctgtcatctgaagcatcttcgcaacccgcgacaacctgtacggggaaggcatgttcctctttgtcaagctcgatgcttggcttttcgataaactccactgggatgaatctcctcaggttcgggtcggatgttgaggccagagcagctagggcgtcggccgacgtactttcccctcgggaatccttgtcaactcgaactcgtcgaactgtttcacccgatcttgtacatgagcatgataggcttctattcgttcgtctcgagccgtgtactatccgttgaactgattcgcgacgagctaagagg

SEQ ID NO: 18182 - DNA, 2129 bp, Arabidopsis thaliana landsberg
tcatgttttttgaatagcacccatattccactggtacaatcaaaatcatctttcaatttctactattgtttttgtactctttatatgtttatatatttttggtttagagagtggactcacagcattttcaaacaaggagaatgacagccaaaatcatagacaatcagcttcagttttacaggacatcagcaacgtgtatcatcgtttctccacacctcttataactccacaaactgtctctaattctgcaattaacgattcaacaggttagtttgacttcttacagaggtattcaattacattggagaactttatgtatagattaaaactcacaaaataaatgttctattctatgcaaggaaaactttatgttcatcctaattcaagaaacagcaatcagacaaagtcttctataaataatccgtctagcaactttcatatcagaaacctagaagaagaattccgaaatgtttctgatagaactactgctgtaggtaatgtacttaacctttcatcacataacgatatgttttagatactgcaacattttcagaagttataactcacaaaatcattttctattatatgcaaggaaaactttctcggcatcataattcatttactatcagtaatcagccacggtcaaatatagattctctatctagccactttcattaccgaaacctacaagcagacttaaaaaacgcttctgtaactcctactgataaaggtaatatactaactgtttcattatagtctatattttaatttggtctaacaattccacacactttttctatgaaacacttagtaggcaaatctccaatgtacacacaaacagccatcactgatgatagcactgatgatgaaagcatggagcatcttcaaccacaatattttactgacaatgaaactgatagtgaacaaaattataatcttagtgcttcagaggacgactgtcctgaagagacctcagtgaatattcaagatgattcttctatggatttacttaatgacaatacagaaaatgtggacccgaatatttgtttcaatgacgaaaatgacttaatattgtcacctgaagagactcttactgaatgtggagatatagaacacattgtcccctcttttccacagccaaaaaagaggggcagaccatttggaaaaaagcaaactaacaacgcagcagataaaggtaatcatatcatacaatttattctgaaaatcattatacaactttttttcatatcattgtagttgcttttcctgtgtttaatttagacatgatattcaagcttaccaatttcctatattgacagcattgaattgtttactactaatagtgtttgcttaatatcctattttagttccaaaaaaaagaggccgtcctaaaggtttaaatccaaataaaaaagatgcagctttagccaaaagaatgggtaagtgtcatttttttctttaagaatatgatgtaactagattttaaatgatgcacttaaatctgaaaacaattttattctctgatgactgctaagctttggaaagtttatcattaaacacacctaaagatacttctacacaaccatagaaaagtggacggccagttggggcaaaaactgtcaataggtctccatcaaattcgaaaaacaacggtatgttttaatctgtaaactcatttcattgcctattaacaatataagtgcatacttactacagttttaaatttacccttatcaggttacctagaccacggtccccctacatacaaatgcaagtattgtggtgctttgatgtggtttaatgagaggatcaataaataatctaatagcgaaagtcgctcagtttagtctatgttgtggtcaaggcagtgtcaaattaccttttctacaggaatcacctgagctaatacgaacacttctaaagggcaatgatgcatcaagtcgtcattatcgacaatttatcaggatatataatatgattcctgctatgacttcacttggtggtaaggtcggcaaatctatgcctaaagggagaggcctgctatgtatcgtttgcaaggaggaactgccccagattggcagtatagaccgaaagatggtgattatgctagtatctcactttatattgtg

SEQ ID NO: 18183 - DNA, 1684 bp, Arabidopsis thaliana landsberg
gacggtatacgacaataattaaacacgaaagaatttttgagtttaataccgagaaggttctattttgagtcttgggatcgtaaatagtactaaatacatggaaaacccaaactttatttcaactgtttgtcttctgacacaaaagtcatcaaattttgtcacggggtatatttttagaatttcggaaaaaccatgtacagcaatcaaatcaatccatcctaattataacacacgtttgaaaatacacaaaataactatacattacttaagataaatatactccctctgtttctatataaatgtagtttaaggatttttattttttttcaatttaaatattgttttcaattttttatgcaaataataaatgtatttaatattttttaactaattatatttaatcatctatttttttattggttaaattggttataataaatgatgttttatataaaagaggtagattaaatgagatttttatgattttttaatccgagtgtaaaaaccttaaactacgaatattcagaaacagagggagtattacacgggtattaagatgaacttaaatgatatttggatagtctatatataatcgataaccttttatttaaaaattattttgcatcctttttttctgtttatccaacttctgtttgttaaaagttaatactaatgttgtaagttttaacttaagaaaatccagtataactagagattatttgatcattagctatttgttaaaaaaaaacttgcctgttcataatgtattagataaacaacctcgcgataagagctacaaatgatagaggatacgataaagatcttcaacgtaggtttgagtcaagactcgagagtctaaggtcaaaactctttgatttgtaaaaacatatttttcttgaagtttaacattatatttttaaaaaccgtataatgtatatatacatccacatacatatgttatatataggtatattttacatatacataaacttcatatatctgtaaactcataaatatatttcagtgcagtcgatgattttaaggagagaagctgcataaagttgtttgttctccatgtcatcttctgttcatttctctctatatcgtgtatactgtctttaacacgtaccataaaaaggaattgacgggtgcgacttcagaaagtacataaaatcaatgagagtacctagctgaataacgagacatgtcagtattttatgtcacttcatttgatgaattgatgaagaaaacatttgtaacaaaggttgataactcggctgcaattatgtcttggagttcagacaatcgattgatcgagtcatcgagtagcagctaatatgcctaaattaataaagcttagttatgatgaattttggtacggcatttcctagttaaaaaataaattaaatacaaatgaaaacatttgtagcttctacgagtttttagtttatgcgacttttgccaaaagattgtataaaatagaacgaaaatgtgtacttttagatcgaacacaaacaaaagcgtaggtattagagtttttttatcaggtgaccttttatgtcttttttaattaacaaatgaaaacaatgtgcccatattccacaaaaatattgttaattacataaatgctctttaatgtcggttggctctcctaattattttattattataattgtgaacctat

SEQ ID NO: 18184 - DNA, 1025 bp, Arabidopsis thaliana landsberg
agagaagatgtttgggacggcaaagaaatgaaagattaacttgaagaagaggaagctattcaaccattcacgataatcgatgaaaacacaataaaacatgtcagccataaagagcataacctaagacttgacaagtctggtatttttattgaggagaggatttgtgaggcatgtgtttatcctatctatcaccactccttctatagctgcatgagttgtagtttcattctccacgagagttgcgcctatctgcctctatggaaacgacatgtggtaagcaacgaacgacatgagtataaatattgggattattttattagatgttcggcttgtagattgctttccaatggttttagatacgaaacaacgcaaacttcattggatttgcgatgtgcttcaactactgagccatttttccataaaactcatcctcatcccttattttacacatcgccacaaggaatctgcagtgtttgcaagaaagatcatcttcatgtgctcagatgcgttgaagatggttgtgaatacatcatggactataagtgcgctctattaccatatgaggtaaagcatagtgtcgaccaacattttctctctttatgctatggtgaagaaattgcaagtggtaaacattggtgtgatatttgtgagaaagaaatggatccaaaaacatggtttcacacctctaaggattgtgagcttactttgcatacagactgcgtgctcggtgatcgtcgaggtctcaagccagaaagcgaagaatcgatgaacatcgacgactacgaaatgtatgttaaggcggtctcgcaacagcagtatgtctcgaccactttgcaaacacagcaagtcttcgttgcatatttccagtcatcttggaaaaatggaatgaaagctgcctccgcaaagaatattattgctctgaagcttgcttctattcctaagtttattatatatgctgttttcgtgcatcttttatctgatgtgtgattttgatttatttgattgcgaccatgtttttttctatt

SEQ ID NO: 18185 - DNA, 1218 bp, Arabidopsis thaliana landsberg
agctcatgagtttggcttttttgaagtaatatatacaaaaaactaacaatcaaagtatatatatatatttttctataaataatagaaatatattttagaaaatatataagttacataacaatttctgaaaataaatattagtaataaacacaaaaagtcaacaatcaaaacataaatatttatataatctataaaaatagaaatatatttttaaaaatatataatttacataaaaattttagaaaatttaaattttttcatttatttgcattagctcgcgaactagctcatttagctcgtgatctagatgatctgagtccgagtttgtattttgaagctcatataataaatgagttgagctgagctggctcataaaagatttaagttcatcatgagctgaactgagcgagctggctcattttgacacccctaatgaacatacatgatacatgggcaagcttgtaagacataaattgatttagcagtaattaaaaaggttcagaaacacttatacacatttcagctataaaacttaaccaaattgaacaagatttcatcaaacaaaagattgattaaacaacttttacaagttgataggatatcttcgagaatctatgtatatttattgagaattaaaaggtttgaacccattggatcttcacttataaattttaatgtgttttgttttagaaaaacggttataataaatccaactaaaaaagttgtagattgggaaaccgtacgtattcatataaaattttcagatgatttagcttttcttgtaaagtattattatgatgattgctgaaaaattgaattatcaaaactaccaattgtttatacacaaatctatattaacaaattaaatacatttgatttgacatgttcttattacaccatttttttataatctaaaaactgtaaacataaaagaaaaatgttcttgctagtgattaactatagaaaaacaaatcaccaatagtttaatctatattaaagaatgcatcacatcataacatctttttggcgaattaatttgaagttaatactttgttaatttggtactacataacatgatatgaagtgttttattttattttccttaaatagacgatttacaaatatttttttttttaatggataacccataacaacatcgtaaaggaaaaaagaagtgaactacacagtaaataatttttttaaaaaaaccagtaataa

SEQ ID NO: 18186 - DNA, 563 bp, Arabidopsis thaliana landsberg
aaaccttatgatcatggcttgggccaaatacaaaagtagtagtataattcataacctacaaatggtagtaagaaagtaaccccaaaaaggattcagaaaagccccaaaaagttcgcccaaggttgagcacaagagagaattcagaatttgcctaagtccgaaaaaactaaaccttgaacaaagatcccacatgttcaccttaatccaagattcaaaacacttcgacccaattgacaaagtggcgccaaattaaccctagaatgccctggaaagaggtgacacctaccctagggcgtttgacacgacttggcaccatttttgtctcggcttggacctagctgacacagccaacttctcacccctctatctccctacctcgaccatatcttgacttggaactcacagcaaaaaggtaggatatggagcagggaagcgaccgtacacagtgactttgccaagataggcacgctatggtgctaagtccgccgttgaccatggcagaacgagctccacgtgttcgcgctggctgacaccggtggtcgctcagacacgccgtggggaac

SEQ ID NO: 18187 - DNA, 580 bp, Arabidopsis thaliana landsberg
accctacactgatccttcttggaataatggaaacagcatccaaaccatgctcagaactattatcccaatgctgttaggccaggtgctgccactatgcggccaccttatggtaatgttttccgtccttaccgcccagagaatctgaatcttccagttggtaatggtttccgtccaatgcagcacccgcgaaatgacgggcctagatttccgtctccacctctcttgactccacttgatatcagcaatctaagtgtgtctcaatatcctagtcaaactcaaaaccgtcctaatttcaatcctcaagttagacaagaattcagaccaaagatggaatcctcatatactcataatggtccaaataagagttatattccacggtgtagtagtgccccggtaactcaatctacgacaaccactgcccacacctacccttccagtcctggagttccaccttctcagcctccaatggttactggattctggttctagcaatgataggtggggaacacaaggagtgtccaccaccatctgagtatgttcaggcctataggcgttatcttacatgctctacacatctgaa

SEQ ID NO: 18188 - DNA, 2005 bp, Arabidopsis thaliana landsberg
accaacgattgctgagggatgtatcatatggtattattacatttaagaccgattattcacggcaaacgctagtctgggggtgggatacaacgatttggctgctaccaaaatggtgtaacctgaggaacatcatatgtgcccccgttatcttaaaagggaagttctgactctgtaagttctgattcatgggccacagtcattcgcttcctcgcttcacgagcctagagttcaaatatgcatccaactgaacatcaatatgtttatttcacaatagaaacatgtcatgaagaagaaagaacaaaagaaaagggataaagacctggttttcccagtttatgcagcctgtgacaagagccatcataagcgtttgcagaacggcaccggcttggattccaatcttaaggccaacacctttcagatgaatccagaaggctaaagatgcagcaatgggtatcccccagagatagaaagctcctaagtttatgtaagctcctatatgttgccatccgcatccccttgcaatacctgcaaaccatcaaacgactattaagagtgacagaagtcagaaaagagtaaaagtttgggatatctttgtaactttgacacaggactaaagtgcgcaacaggagacatgagactttggaggaaaagagggtaaacaatatctgataatagcttgtgtttgagtacagatataggaacaagtctcgaacctgagagaaccccttgtaaaccgtccagtatgagagaaatagagaccaatggagccatctttgcaacatagtcgatggttttcttgtcactgctgaaaacatggccgaaaacatgcctgccggctaatagagacatactcaccatcaatgcatccattactgcaagagacattgccgcatagaccacaatatgtgctgctcgagagtttccagctcctaactcatttgagattcttgtgctgcacaatgtacttgcttatgaacatgaaaccataacagaaagtatacttcagcatttatgtactgggtagtggtgacaaaagctctaaccttgctgcagccgcgatcgctagtggtattgaataagttattgaaagtgtttcgaaactgtccgtagtatgaataacattatgattttgcaaattcaagattgtgacaggaaatggaaagatgcaaggatgagtaccagatagagagcacagaagtctccagctgtgggttgggtaacagaccagaaagtaatattatgagttcatatgaccaccactccaggctgcaacccatatataaaagagtttctaacaaaaaatgtggaggcaatgagaagtgaaaaaggaacagagaaaagtgatgtaccaaagcatagccgcagaaggaagagcatatttgataaactctctaacgccgtcgaatatctccatggtaagcggcgcgcgtgtctcagaacaggcagaggagtagtacatgaaagatccaaggaaaatggcatagagccagtatgacaagctgagagccaaggctcctccaatatgaccaagccctgacttataaaccaaaagccagcagagaggaacgtggatacaaaacacaacagaagaggtgacgaggagaggtgtgatcaagctctggtttttgaagtagcgaatgagcggctgaagaacggcgtaagcgaacagtcctgggatgagccaagcggcatatctaccagcttcgtgagcaatagcagggtcttggccaaggatcacaataagctttcccatgttgaaccataggagagagagagggagacacactaaagtaagacagaacatagctgtgtaagcctgaacacctagtttccgatatagcttagctccataagcttgaccactcaaagtatctaaggcacatgacaatcctatctatcatcaaaaggtcacaagagtgaggggagggtgcgctttccatgggtctgggagctagaaacagagataagtgcgtccattttgaggaaagaaggggagggggaccac

SEQ ID NO: 18189 - DNA, 615 bp, Arabidopsis thaliana landsberg
  unsure (1)..(615): unsure at all n locations
gagatccgactttcccgtgcatggagctcccatgcaacgaagccatgcgaggataagtcggcagaactacagggagataaactcaaacaattcactatcttttagctacacgttgttatcatatccacatgtattgccccacggtcgagtatataaggcctagggggcaccccttcagaacgatcgaccctataacgtggccacccataccaactctctgtattctcaatccggagagctctcttgtaaccacgttcaccaagcnnnnnnnnnnnnnnnnnnnnnnnnnnnnnnnnnnnnnnnnnnnnnnnntgtaaaccttgtccactgtccctcgtgcaatcggcacgaaccgattttgctacagtcgtcgacaccgtcctactcctaaaaacaccttgaggggcaacccagggtgtgcggtcggacccaaaacaccgacagtaatctccgtcttgcccagcactgggctcgctctcgtgtgccatctccgcctcgcccgagctcggccaaggttacctgctccccacgaatcctgcaggtgacactccgccgaatgtggcaacgtcagggaaagacttcagcttcccgagcaaggtctgtctcgatatcaca

SEQ ID NO: 18190 - DNA, 1254 bp, Arabidopsis thaliana landsberg
  unsure (1)..(1254): unsure at all n locations
tgttcttttaatatagggtgattgaattattgtacgggtgatagcaagtaattatatgcgttatatgagaaagtggaatcaccatcttttgagatgatgagaaagtggaatagtggaaaagtggaacaatggaacagtggaaaatggtctaaactgaattgacgggttctttgtagctcaataaaagactaacgagtccagtggaactagataggttcaaaggtcagggagatgatcgaacctggttatgatgtggagatcttgcttaagcaagaatgatgtttgtgctatagtttgcataatagtgcagactataagagtgttatgtttttttctatgtgattgttgattgtggtttaaaggtagaatcgtgtatcgtttttccagtgggcggaaaggatcctctcactgagtaattctttactcacccctttcttttccctttttccccaggtcgcggtgagaatcgtgtgaagtcgctcaagtccgtcttgcttatggtgtattttgggaacctcaggtttatttctactatgttattttcttatacgatttattaaagagttttcaatgatttaagattatttttttaagacaattttgtatttgaattaagaaagttgaatagaggaaagatataaataaagtgaaagtacgccgtctcaatgttgagggagacgggcgtgacaaatggtatcagagcggaggttaaagtcaagccactgctgacccggaaggctaagtggaagagttttcttgaaagatagattttaactaagtgttttaaaaataaaaagtttttggtattttgataaacgggaaggggatttttctaaaagataaaaaacaccaaaggagcgagacttgcgtttaaagttgttctttaaagtttaagttttcatagagggcatatcatttcaatgattgaagtagagaagttaaagtggaaagaaagcaaagtcgattcaaggttgctagaaaagagacggaattcaagagatatagtggaaatcaaaaacaataatggannnnnnnnnnnnnnnnnnttttaaagacgactttgctcaacccggaatgttgaattcgaggacgaattctctttaagtgggggagaattgtgagacccaaaccccacttaggcccattaaaagcccaacctcctcaaataaaacctaaacgagaattatgtgtatatatctatatctctttcttcttcaccacttgagccaccatcacgaccataacccgtaatct

SEQ ID NO: 18191 - DNA, 1136 bp, Arabidopsis thaliana landsberg
tgttgcataaggagagcttaaaataattgatttagccatttactgttatcatctttcggtcagtgagtcataggagaatctgcacttaaacgtacttgagttgaaaggatttcatgattggtgatctattggaagtgattgtcgatagcgtgtgaatgagaacaaaacatggaaataaatcacatgattatttttaagggcggcaaacaagtctttaaaatctctggaagtagcgttttggccgtcggaaaagagtggtacacagacctagagaaaacagaggactaactaaggatgacggttgagaaattacaatatttcagtaaatttcaaaacccgcgagagctaacttttgattcctctctatctccaaatcctcgtttgtataatttggccatccattactttaactcgaaaaagaagaaaaacaaactaaacgtcattcatcttccaataaaacttcaatccgtaacgcaatcactcttttatgactgctaacatttggtcgaaaatttgattaaactcacacaccaaaggatcattccaaacgaaagacaaagtatatgtaatatttcaatcgagaaacaacatcatcttcaaaatactcggaaatgattatactggaaagaaagtcatcactggtgaatgagtatcttattttcttttacctttttatgtaatactaaatttatatttatttaattttaaaaatacaaatgttgatatacaaaatccgcaatcatatagattaggattgatgttagtacaattgttgggtatgacttgaattggatttggcctatgttattggatccaattagtctagattaattagaattccttccttataaataatctttttaacccacttttcgtgtatttttaaatgtgtattctcagtgtaaaatatgtctttttcccgtggagataaccaataaatagtaataatgatccatattaaatttgtgtcgtgttatttaatatttacaatgatgttattttatccttactcacatccgttataatagaactcagcctggagttactgtgacttaatgaaatttgtctgagttataagatgacccagcctacgttacggctaacctactaagatttttctgagttgagaattttag

SEQ ID NO: 18192 - DNA, 3315 bp, Arabidopsis thaliana landsberg
tccttgaaccactccatcagttaagcaataaggaacagaaggcatctcatatcggtggaaccccaatactttggttaacgaaaggatggctcagcagctcctttgcggtggctctactctcccagtcatgcactttgcatttcctcacaaagtcccaagccatcgatgatagcgtctgtcacaagtaatcatttcttcctcctccattaacccccaacatctcgatttccataacacctaaagaccaaatatcatccgcagacgaaataattcgacatggcccgaccgcctctggagccaaatatgcaggacatccctcgaagagagatccatccaatggattaggtccattaggctcttttgctaagccgaaatcagcgagtttgagttcacaaagctctccatgagtgtaggtcgggaagataagcatgttctctggcccgagatcacagtgaacgtaaccatctttgtgaagatccttgagtcattcaagaatcaagagagtgcagtacccgaccacgttctccggtaatctcccaccggctttgattatcatgtctccgagtgaaccatgtggtgcgatttccatgtaaattgagcagatcttgacattgaacggcatggtttggtaatagacgatagggcttgtgggtcttacgatgttggtattgatcgagttgaagtgatgtaagatcctctgttctttctcgagattctctgagtatttgcggagacatgttttcttagccatgagtaaaccatcggtggtttgaacgagagagatgtagccatgctcgccttggccgagacagccaagttttcgtaaggtgatcgggtctaacatccacgaactcgatctcgacgacatggaagtacaaaatttagggttgatgttttgttttgtcttttggttgagattgtgaagattacttctttaggtatctgtatatataactagataaggcccgcctatttaggcgggtgtacccgaaatttttccaatactcgaacgggtctaaacttgaaaacccgaaaaactcgaactcgacccgaatagatatccaaacatatctcaaatataagtatatattagttatatttatacttatatatagaaaatattatgatgttttgcatattttagttattttgtgtattttaggttactttggatatattaaagtaaaactattcgtgttgttttgaaagtttttgaaattttcaagtaatttgataaatttacatacaaaattttgatattttaatatttaaataaacctgaactcgaacggtttaaaattttaaaatacccgaacgggtcttaaacttctaaatctgaaatacacaaactcgaaatattcgatccgaataccgaacgccctttagtttcaatttggtttaaatgatattccggtttggtttgttgtggttgttggttttaatttcacagttcagcattagcaaaccttaaattttatatttttaaacatcctttatttctaatttctagatttttgcctatgaagatatcttcaaagtaatgtttttaagaaaatacttctttaaggacaagaaaatcatataaggaactttgctgaggagacataaaaatagttatttctcgctgttataagcggtggtttaggtgattcattttcgaagttaaagctctcgttaaatctgtgttgaagcttcataatctactatggtgttccctccagatcactttttattactccaatactcatttttgagagattcactgaagatactctaacatacatacgtgtatctgtaacgtaacgggattcaaataccattttttctccctttttgtgttatgttgtaggatcaaaaaaattgtgactttggggtagattaacatttgacaataacgttagacgtatccattattcatgtgttaaagtaaaatacttattcaataaaagttaatataattctaaatttgttttatttatcgagttaaatgagttaactataacatatattacatatatgaaatcctctacagctgttacacaacaatgttcatcaatatccaatgctgctattcttctgaaatctggacatcaatcgcaaagaatgtgtacaaagatagattttccacaaaatggtctgctgtggtgaattacatatctgattctctgcctgatcgcatccaaagtttcttatccaggtacacatccaagtctctattcattccatttggagggagagaaattctcgtcgtcacggagagaagtcacgttcagcttcaaacctcatccgacagatagacaagactattagaaaccagctatcgacaatcaaaaagaaaggggatcttcgactcgagaaggggctgcaagtatggtttgccatgcgtccataacatcctctaagaaagaagactctgtttttgctctctcaattctatttactctgtttttgatctagctctatttctcttattatcaaaatatcaaaaaagctgatgtaaaaagtatattttttcttttaaatataatttgacattttattcaaaaaaaaaaaaaaaaaaaaacttgatttaacaaataactagtggaaaaacatattttgtctgcttatagttatgaatatggtcgaaatcatgaaataaccttataaagatagtatgaggtatttttttacaattgtagatatctttggttcacctgattaaaagggaacttcttagaagaggcaaaggcaatagaaacagcagggttgaaatgtgcaccggagacatgaccaattgagtagatcataaccgttacgactagtccccataccaaagctataccgggaagtgtcaccggtttaccgtacgtctcatttaccacgatggctgagcagccggcaaatatcatagagaatgtccccacgaactcgccaatcaactatagagtttagacaaaaaaaaaaagtcaacttctatagggaaaacatgacaacataaactttaataatttttatgaatggtaaaaataaaggatttaatttttgcaaacgtcaacgagtaaaaatattacgtgtttaaatttactgttatagaaacaaacttgtaccaaacggattcgaaatagatgtttgttcggtttgattactatacttcataaactggaaaatccatcaccaataattagagccaaagtcaagattgagatcgcatatagcaacatcacacggaatataaaatcttgattcgacaaacaaatatttcaagaaaaaattaagaaaccatgtggcaacataaaagatgtgtctcaccttttgaacgaataatacggtgat

SEQ ID NO: 18193 - DNA, 568 bp, Arabidopsis thaliana landsberg
taaagcaagcaagaaaatatgcatctgattaatgcggtggcggcggcgaggattttatccggaatcggacaatctaacggtaataacggaggagaagcgattccgtttggatcgtttgagtggatcacttacgccggaatatcttgtttcctcgtactcttcgccgggattatgtctggtcttactttgggacttatgtctcttggtcttgtcgagcttgagattcttcaacgtagtggtactcctaatgagaagaaacaagccggtgatgatttttgattccttctttctcaatcaaattctttatcattgaatttgatttctgattgttttgaatgatgttgtttcagctgcgatttttccggttgttcagaaacagcatcagcttttagtgacactgcttctgtgtaatgctatggctatggaggtaattatcttcattcaaagtctgttggtcgtttggttatatggttaatatgagggaggaactatacttagttgattttatggaaatttgggccggggctttctatatatttggataagttattcaatgaatacgttgcga

SEQ ID NO: 18194 - DNA, 1250 bp, Arabidopsis thaliana landsberg
attcctagggcacctattgatttgatttcacttaatgctgcgaacgcccacatgtagatgcttctgcacatgttgaacaaattattaccatacatgaacaaacgaaacagaacattgctgctactaatgcaaaaaatcaggttgctggtagtaaaggaagaaaacatgttacttttgagccaggtgatatggtttggttgcacttgagaaaggatcggtttcctactttgcgccgttctaaattaatgcctcgcgctgctggtccttttaaggtgctaacaaagattaatgataatgcttatatccttgacctgcctgcggaatttggtgtttcactagttttaatgttgcagatttgaaaccatatatggacgaggatgaggagttgtcgtcgaggacgacttcacttcaagaaggggaggatgatgaggacatcactatgagtacgactacaccagcagcacctccacatcaagcaccacttccttcattagctgggccaatcactcgggcccgtgccaaagatcttaacttcgtcatgctactgaagaatgagggcccagaagaatagacgaccagcccaactgcggcccatagtggatgacctagggttggccgcccctagggctgcgccgctctatttatctaggaactacgcctcctttattttcgagttttgttttacgttagctttagctactctcgaacacgcgcaaatcagcattgtcttcgtgtattcagaactccaccttcgagtaatagattagattgctcgcatctttttcttgttcgttcttcgattacgcacaggaaacgatcttcgtgatcaggccgatctcgcatcagcaaggtcggtaaccacaaggagttggttcagcgattgcattggcgcctcgggcttgctcgtcatagtcggatcgcaagggtcaacttccgccaaatcggaattatctccactcaccgaaagatcgggcacctcagctatatcaagtggtatcagatttccaggttgattggtgagtttatcgagtgtttttttctcctacagtccacaaaaccacataaaaattcaggttagaccttatcctagcatccttttgagcctcgcaccttctttcaataatctgcattgttgaatttgtgtgctttcgcgtcatttgttgctggtcgcattgtgttttttctcacatctttcttcaccattcaaacctagcgcgccgcaccatctccatttgatacgcacaaacgag

SEQ ID NO: 18195 - DNA, 336 bp, Arabidopsis thaliana landsberg
ctcctattttagagggtgggaagaggtataaaattaacttcattgatgaaaaatattggacgttttcactgtttttacaattctaaggaatttgaagataattgtagggagaatggaattaagagacaactcactacagcttacacacccatcaaatggcatagacaaaaggaagaatataagtgtcatgaacatgacaaggtgtgtgttgatggaaatgtcaattcgaaggagtttttggccataagctgttcagtatgttgttcatatattgaatcaaagtccatcagcagctttaggtgatgtcacaccaaaagaaaagtgtatccaacataa

SEQ ID NO: 18196 - DNA, 5023 bp, Arabidopsis thaliana landsberg
cagttttatgaaattgaagaacgaaattgaagtgaaaagtgaaatcgtgcaattttcatcttcctcttctccttaaaccctgattcggattctcacaatcgaacttggctgcagagaaggatggggactaacgaagtaacaaggattgtgactgatgaagaaaagagagaagcgaagaacttcaacatatttgatctccctgacgttcctaccggacttcctccgcatcttgagctccagcgaactcgcgttgtctgtaagaaggattctaatattcatgtaagtactattctcgatcaaaatttacactctttttaagctatgtataagttcagctaactagaaatttattggcttttctcagtgtatcccatgtgggtttgctatgttcatcgatttcgtgtagatttacagagtaaagtttaaaacttgcttgtagaaagctgtgaatttactgagtttggtcttagcaatttaagaagattacactgtgggtttgtcgaaatccgaatgatattgagtgatgattgtttgaaatttgaagtctttaatgttcttccctttctttttgtgttttattgtagcctacggctatcactttctcgggtgcctattcctctatgggagtggacaacagtgtgagactagaaaacttctctgaggatttcaaagttgatgtgattagtctcacagagacagatatggtattcgatatgatcggtgtccatgcaggaatcgctaatgctttccgaagaatcctcttagctgaggtctgcccactgtctcactacctctgatgaatctctgattattagaatctttggttaatagtgtttctttgattacagcttccttcaatggctattgaaaaagtgtatgtagcaaacaacacatcggttattcaagacgaagttcttgctcacaggttgggtcttattccaattgccgcagatccgagactctttgaatatttatctggtaagaaatattctgtggaatgtgatccatctcattaagcatataaactctttgtgtcacgcttagttttgttgctgtttatctttgtgtcatagaaaacgatcagccaaatgaaaagaacaccattgttttcaaactccatgtgaaatgtctaaaaggtgacccgcgtcgtaaaggtaatatatgttctttggtttgctcaagaagagtctttgttttattgttagctcgagatctcatgagaggtatcatttttttatttcttgaagtcttaacaagcgaattgaaatggttaccaaatggaagtgagcttatcaaagaatctggaggttcaaccacaacgccaaaaacttacacttcattcaaccatagccaagattccttccctgaatttgctgaaaatcctatcaggccaaccttaaaagatatcttgatagcaaaacttggccctggccaggtactgattctatttatactcttccccttaattgtgacatttgagaggacttaattcccgtgagagatgaaagacttgcatcttcttcttgcaggaaatcgagcttgaggctcatgccgttaagggcattggtaaaacacatgcaaagtggtccccagtagcaacggcttggtatcgaatgcttcctgaggtgagaagttcaccataagccttctgggaaaaggacttaattaatttcttcttgactcgtcctaggcttttccggtaatgctttttgtttataatatcttaggtggttctactaaaggaattcgagggtaaacatgccgaagaactcgtaaaagtctgccccaagaaagtttttgacattgaagacatgggccaaggtgaagtaaaagccttcccaagtttccttcaaatgtctttacttgcttttgagtaacaataagagattctgatgaaacctgagaactttggcggcacattaatttgactcgcaaaccctggaaaacaggtaggaagagggcaacagtagctcggccgcgtgatttttcgttgtgtagagaatgcataatagatggagtggaatgggaggaccaagtggatctgcgccgtgtcaagaaccattttatatgtaagaaaagaaaaagaaatacacagttccttcaacctggcaattccatggtactgaaagagattctaattgagtttcttatcatctttcgcagttacaattgagtccaccggatcacagcctccggaggttcttttcaacgaagcagtgaagatattggaagataaatgtgaaagagtaatctctgaactctcctgaaaagagatttaattggtttagctctaccggcttggttccggtttagttcagttttgggttttgtatcgaagttaatacaaagaacattgaaatttatatatacttggttttcgtctcggttcaaatttagaatatattttagcaaaaaaaaaaaaaaaatttagaatatacgtacgtacacattcatcaagcactgaacagagtgaagaaacaacagaacagatcaatttttacaacaacgaaacaaacaaacactaacgacaacacagatattcacgaaagtcttgttgtggccgataaatttgctgccatgctagaaaccaaccgaacatattaaccgaaaaaactgtaaatgacatataaatagccacgaaactctatcagcacatgcattatgcactggccgtcttttttttagaatcatccttctcattataaatcaaagaaacggagattaataattaatcacgtattcaaactacaaaatataataacatagaaaaatatcaagaagtttcaattacattgtttttgttttctcaaaaaacaatggctgcacacaaaaatagtcatatccgcattttctttgtttcaataatgattatattatcattgttcagcggatttggagaaggacaaacatatataaactataatggtatgaaaggagacataattccaggttgcagcagtaagaatcccaaagaatgtgtcaaaattccagcatactcttacaatcgtggttgtgaaatttctacacgttgtcaacgtcaacagcattcgagttcgagttaattcatgtatgatgtcatatgtttaaatcatttctaatatgaaaaactatattattgatgtgatattattaactcaaattttaattatggtaagattctttccatttttctttgtaacctgaatttatttattttcataatttataaattagtgttaccatgcatagctaaacttcttgtgaatagtgatctttatagaccttttcttttaaaatcatagttagaggtatattttgacatttggtaattgaatccggaaaacttcaactgtttggtacgcactttatcctagttcgatcactttctaaacattttcagaactaatcacctattttgttatgatgtagagatccagatgataactctaaaaaacttgtgataaatagattttacaatatcacattacttttactagcaaaagtactagacagactaatttctaatcaagattagtatttttttatatataattgttttataaattaaggatacaaacaaaaagcggctcttggtttaattaacagatgtgggattaggttttgatttctttacccctacgatttaagcccaagttaagtatatctttccccaaatagtttaactggaagccctactttcggaaggaagtttatgcttttgcttgagacgcaaggagctgtttagggttttggtggggaaacaagatttgtccatatgttaagaggaaataatgtgcatatgaactaggtcataacttatacgatattagagacagtgctagtgaaatatgagctcatcaataacaagtgaatgtcgtggtctaaggaaaatatatatgttactgtgaaagagggcatgtaagcctccccttatttaaagagactcagttttgttaagcaacccattgtgatcatgtaattatgggtattatccaatttaggaagcatatattatattttgaacccctagctacttcaaaaatcaaaacaatagagaaagctacaacaacttgaatcagatgctcatatgatcctcccttggcaagctctgaatcgtatccgaccatctcccaggcgaatgatcactgctgttaaatgagaacagagctgcttccgcccttgcatctttcaccattttcaatacctctctcatcgcaggacggttttccggcttaacagccacgcaagccgtcgcgatgctcaaaagagcctgaagtttctcctcagaagcattcagctcctcacttacttcagtctcttcctctctcaccgcacgcacccatgtggagatatcagacccgtatttatgaacaaggtccttgaaagaagttctacctgttagaagctctagaaggaggactccaaagctataaacatcagctggttgtgttgaggccttgcgtaagtctctgcattcaggagctttgtaaaagagagaagctacacttgtgtcttcaatcgagtaaggatcatggagatcgctgagaccgtagtccgtgagacaggactcgaaatccggacctaacaaaacattagatgatttcaagttcccatgcgttaagccaggattctgatgaatgtagaccaggcccattgccaagtcctctgctattttcaaacatgatgtccagtgaagaggcttcccactcccagaaaccttacttcctacgaacaagacacatatcaaacagattaacacgagtgctgaataagagaagagtgtgtgtgcaatacataccatggataagagagaagagacttccattggggaagtaatcgtagacgagcaaacattcttctttggcttggaaataagctctaagtggcacaagattagggtgcttgagtctgccaaggaactcaatatgtctcttgaattcatccatttcagggaaaccctgccttccttgagccttttaacagtgatgatgaaatccagacttcatcactggcttgtaagtgctccctaacgttcctttttcca

SEQ ID NO: 18197 - DNA, 555 bp, Arabidopsis thaliana landsberg
gctctaacgcgagatgtttttcaacctcttgcaacaatacatcataagtacagtgagccacgagaaattctcaatgcattagggaacttcttcaatggcggtgttttccagatagagccatttgatactctttgaaatcagaggaaaagttctcaaacttgagcaaccactgagatcaagcattttgagagatgacaagttgacatcggttggaagaacctccagccctgtgcattctttcatttccaacctcaccaatttttggagatttcctattgtagaaggacacgtcaccaaacttttgcaattgttgagtttcaaattcaccagattagtggcctttgaaagatctggaatttctgtcaggttttcacattctgacatatccatctcctcgagacttgcaagcgactgaaacagaaattaaaaaaaaaaaaaatgttatacttcaatcactttcgtttaatttaataactatacacattttaaagaaaattataatacataattatgtatgtaaatataaaccggtggatcacaagccattttgacaac

SEQ ID NO: 18198 - DNA, 999 bp, Arabidopsis thaliana landsberg
taagtcaaatgtctcagtcttaggtagtcagtttagtttgcttatcagttgcttccattcagtttagtttgcttattagttgtttacatgcttgttatgatgaacttgtgctggatttgaatctttgtaatgactgtagccaacatgtgggtttcccctgcagtttggcttagctagtaatgttaatgaagtcagttgtttagttgggaaaccatttacttctactttccttcttatctgagaagctgtgttgaatcatagtgaggatcagtgaagctctttgttcactcagtgtcatgaagaattctgtatactctcttttcttatgctgaaggattgtaagatcaatgctgatgtgtgaatgtcttccacagatgtctgacaacaggcgccgatgcaacaggcgtgctcagcaggagcagcatgaccagcaggaggaaaatcagaggcagcctcccccaccacccccgatgtcagtggagcagatgttcttgatgcagacccaggcagtgcaggccattgggcagactctggcagccatgcagcaggctcaacagcaacctcaaccccaattgcaagtgcaaatgccccagatgccccgagataagcgtggtgaattcatgagagggcaccctcctaccttcgcccattctgccgaccccatggatgcagaagactggttgcgcgcagtggagagggaactgcgcaccgcccaatgcgacgacagagagaaggttctgtatggtccccgccagctgaggggagcagcccagtcctggtgggagtcctacctcgccacacatgctgaccccgaagccatcacttgggaggaattcagcgagagtttccgtcggtaccatgtgccggagggactgatgatcgtgaagaaggaggagtttctggctctgaagcagggaccatgtctgttagtgagtcagagacaagtttgtgcagctgtctcgttatgcaccgaggatgtcacactgatgcaagaggagt

SEQ ID NO: 18199 - DNA, 1698 bp, Arabidopsis thaliana landsberg
ccgattgttcaccgtgacatcaaaccagagaacatactcatggactcagatttggagcctcacattggggatttcggtttggctcgccttcttgatgactcaacggtttcaactgcaactgttacaggcaccaccggctacattgcaccaggtaatgcatcttctcattatacatagtggacttggtataatctggtttagtgttcaaaccgagttagttaccggttaaaaaagtctgttaggaagatactctgtttcttattagctaatttcacaattaaactgcagaaaacgctttcaaaaccgtgaggggaagagaatcagacgtttacagttatggagtcgtgttacttgagctggttacgaggaagagagcggtggacaaatctttcccggaaagtacagatatagtaagctgggtgagatctgccttgagcagcagcaacaacaatgtggaggatatggtaacaacaatcgtcgatccgattctcgtggacgagcttctggattccagtcttagggagcaggtgatgcaagtgacggaactggcactgagttgtacacagcaagatccggcaatgagaccaacgatgagagatgcggtgaaactgttggaagatgtgaaacatctggcaagaagctgctcctctgattcagttcggtaatctcgttactttgtgcagagcagaaggaggaaactaaaggactgttatcagtggtaacgtaactgggcttaccggtaatgtaactgggccaataatgtaaaatatggcttattgaaggcccaaatatgacggccctttaattgtaaccgtgtttgtttgtgaaataaaatctcgtttatcaaatttctgtttcctattttatttttaaaaaaagtgttgggaaaattttcgtttggccggagatgaagataggggcggttcaggagagttggcttatacggactccggtactaaggccggcggttcaaggctcaattcgccggaatggaaagccgcagcttgagtttcctctctcgaacagtgagcttaagctcttctttcttccattgaattttttttttgggaacgcattatcttgtgcacacttgtagtaacttggtctatatcaaattgaggttgaagatgaaagttcagttatttcctgtgatttgcaatttccttgttgattgtatgttgtatttgagtcttgttggatatgtaaagagaacaaaaagagagtgagagagtgagatttgtgtgataaattttggattttacagggttgtctcgttgtgtggttatggctgttcaaggagggagaggatatgaatctccatgggatgaaaaaccctatgaaactcttcctactggtaaaagggtttatgttgatgaatctgatgttgtgacgtttcttgatccccccaaggagttgattccattggaccctgcttcatataacccggctgcttatctctggttagtctgatttggttgatttagttccagaattgattcattctaagctaattgatagcatatataacttagtcataacactagtgatagctatacatcatggactatgattaggtatttgctgcagtttcagtttactgtttctcttcccttgcttatgagggattgtttagcgttatatcatgattaatgttgcatagtcttaggtttgcttttcaaatttgtgtcgtgtttaatt

SEQ ID NO: 18200 - DNA, 875 bp, Arabidopsis thaliana landsberg
  unsure (1)..(875): unsure at all n locations
gaaggaacacatactgtattatatcaaatccttttatgcactttaatacggacaatggctgacttgatgatttggacggcaacaattagtgcaaacttgnnnnnnnnnnnnnnnnnnnnnnnnnttcatggccccttctcgagattcaaagcgcactcttctaaagaaacgtagtggctcaataaaatcaattctaaccttgactcgaatgaaggtaatctgcgttgtagtttcttcattgaaatccatagccacaacctcacctaaagtacttgcaatgaactcaattgtcctctctgatacataaggtgaatgtattcctctaatttgaaactatagtctatataagtaagaatatcctctgtagcaaaatcttcccatctctgaagtacaccattcattatacacccatggcgctctccttaggacattaagtaggtatgcctcagaacgaaaacgaaattgaaagcacctgtcatcaaggatacgtccatgaacttgagaacctaggccccacggataaggtaactccagtatagctctttcaacactttgagtttgaggattaagaattcttccaagatgacttaatctattagaagcaaaagctccagcataagcatgatatggaataaagagttcacgacccaattccatatgttggatgtcattccataattcatcactcatcttttggtttgtgtttttttttatcttttttttgttgaaatgatgaaagctaaaagttacagaagtaaaagaaagaaaccctactagtttatatacttaagaaccgattaagggaaagggaataaccttaattataaaataatcaaaagttaatgactcaacccaagaaaattgagtataagcat

SEQ ID NO: 18201 - DNA, 757 bp, Arabidopsis thaliana landsberg
tatctgattgattttgttgtttactttgctgttgtttacagcatctcgttacctgttgcttagtttctgcaattcttgttactcgacctgatactcgaccacccagttgtctggcaacaaactgtgtagtcgagtatctttgtttcatttactatccgttactcgaccactcactcaacctcacccagtgctctgcaacgagctatgttggtcgggtgttttactgtttctgtttgactttctgttttctgtgataataggttttttagtcaattatcctaaaacaccaatcatgtcgttgtagtatttgaggttgtcaatccaaatgggtgtgatgctaacaatcaagatgtgatcagaagtcactaagtcaagccaatcaataacaggttttggtgtgttctagcagtcctaagtgaacatgcagaaaacagaaaatcaagcagaaacaaataaacactcgaccaacacaactcgttgcagagcactgggtgtggtcgagtgacaggtcgagtaacagacagaaaatgtaacagggatactcgactgcacagtctgttgccagaacactgggtggtcaagtaccaggtcgagtaacagtaaagaattgcagaaactaagcaacagatgacaggatgcagtaaacagcagtagagtaagcaataaaatcactcaaataaagaattcccgagaatggggtaaaagagtagtttcgtttcctcagtttccaggtgattgacatgctcgataatttatc

SEQ ID NO: 18202 - DNA, 1105 bp, Arabidopsis thaliana landsberg
gaaactgtttcatttatctaacaaatgttttacattcagcttttgtttgatgatgtgttgtttctcagaaacaggggaaccgtggcttctgcaatagaaatagcaagcttttagtttttctttcactttagacctcattttatctaaaacataacaaacataggctgatgttttcgttagtcataaaatcttgagcaattgggattagaaatgttaccgtaggttcatcttgacatttgttattgtcacggcgttgtgaggcggcacgaccacttgcgtttgtctttttgtcgtctcgagctttagcgaatataaccgtaaatccttcggctgatgctggatcgttcacgtcccattctccaaattttggtaatggtcgatcttgttgttgtcgttgttgattattctgaaagtttccaatcacaaaaatgtttgatttctattataatccaacgaaaacacacatgaaaatgctattttttgtatcaaatttgtgaaacaaatgagaaagaaatgagaaagatcttaccgatgccattcaaagattgtgtaaaagatgcaaacagaacatgagatgatctttcttcaaacaacaagaaaacttgtttgtcttctcttttagtttttgttttcttaaaagaatttgattacgtttaaagaattagaatttgagaacagattagcgttttctgaaagtttaaatataggttaacgttttaattattgttgaaacttgaaaacagaaaacaccaatcttttgtagcgaaacggaacgctttttctcgtaccgtcttttgttttcgagtgtacttcatcgtatcaaaactcgccacgtgttagattgtatctacacacttctcgaggcgaacacgcgcatttcagaacttatccattaatctctgtgattaacctataagccggtatttataaacggtcacgattgtccaagttttttaatcaacggtcgttattacgtagacgaagctaagcctcacatctacaaatacgtatacatacatttttacataatgattaattaataattacaggttattaacaaattaatcatttttaatagactatcaaaaaaacaatctcatttcat

SEQ ID NO: 18203 - DNA, 890 bp, Arabidopsis thaliana landsberg
tcttaaccgtcagcatgaagggctcgggcacatctcgccaattggatatcccggtttcgtcagccatcggggcaaaagacctccgaacgagaggcggctcgggatcatcgggcagatccaattctcgagcaatgtcggcattgttatcttcccgagccgtgaagggagtcgtctgctcgggggcatccgaagaagacacataatcctcttcagaagacgtccaaactgctctctgtttatagatcggaggaaggtcatctgggtgatttgaatcgctagaatcgacaagagaagcgctcgagatcgacgggagactgtttagaactcattctcggctcggggacgatcgacgagaagggaaacgaccagaaaacaagaatttctataccggaaaaatcaaaaataacaaaaagaacgacggagcttcgccggaaaagaaaaacgatagaaatatcaagatcagagagaaggaagcaaaccttgtttattttctttgaaaacttcaaatgaaatctcgaaggaatggctccccatatataaagagtttttaaaggcgcgtcggatccgcagcaaacatttaaaacgcgttcaagctcgtgggctcgacagaaggaaaagattcgcgtgatcctcgggaatgagctagaaacgtttccacttctcaagaatagtcggcgacgcgcaacagaagtttgaccgtccgggaagatagagcgacagaattagaagacaagcagtcggctcggtaatccattcatgaagctcatcgtctctccactaagtcaatgagctggggggcaactgttggggtcggattccaccaggtaaacgagccaccatgtttaaacgcctcgggggatgtaaagagttccccgagccaggttcaaaac

SEQ ID NO: 18204 - DNA, 762 bp, Arabidopsis thaliana landsberg
ttggaataaatattagatttcgcggattttagaggaatatgcaatatattgttattgagtagcaattagttgagatattatagatgtgtaatcaaataagaggacagaaatttaggaaatacgaatttaatacattgaatttgtattcaatatctctagaaatcttaacaatacatgctatgtttggtaagtaaatgccaataattaggaatcatccatttattatttttcataagcgacgaattattttttttatagaaacatcatttatttggtatgaagtttttgggaatgtcttattcgttttaaattatttgtttaaatggttagttaattttacattaattaaaaaggaaaaaagaaagatgccgaaaatataaattagtaaatgattttattttattttctttattaaagtagactaatatctatgaaagatatggaaaggtccaattgaggattccaggtcaaaaacttaaaaaaaaaaaacccgactcaattggatttcttaaaatatacttcaaaaatgttaagtagattaacaaagatttattttgtattcatgatacagagtgtattatactattattacaatgcaagattaagatcaaaatcattatcttttctcatgaccttctctacttcttctccttcatcaccttcttcattatcatgactattttttaaaaaaaatttagctcatgattatcataaaattatattgttataattatagatttaacaaaaaatcattactagctc

SEQ ID NO: 18205 - DNA, 1627 bp, Arabidopsis thaliana landsberg
agaatatatcttattacatgtgactatgagctagaatatgattattctgatcttataacgaagtttaatatttgttgagacgcattgtagatggtgatgttgttgatgatgggataggttttgttgatccggttgttgatagttggagaaaccgtctaatcaaagagaggaagaaaatctggtggaaggacatgtttgaccaagatgtgcgttctcaaagcggcgagcaaatggaggaggaacatgtctcagagaatgttctggacaacagtagctctttggaggaagctattgatgaaggctttaagtcgagttatggagatgttggcagaacacaatcaaaggcttctaaccattgaaaggagacaagctggtgagaatgtgcctccatttgagaagaatgggaattctgatgtgaataaggagaaggacgatggtggtgagaatgagaacagtaagaatgagaagaaagtgaatgtggatgatgtgactgagggttttgagaatgagggtgttgcgactaagggttttgagactgagggtgttgagactaagtgttttgagaccgagggtattgagaccgagggtccaagtgtaatggaaacatgcactggcattattctttttgttggaggaccatcaaaaggtatgttattttgtcaatttttgatagtgtttaatatatgatgtgtgttggttacaatggaatatgtggtttactgttgaacaaggtacaaatgatgaggctgaagcggatagaggcggtgatgagacgccgaagaaggaaatgaagaagaaagggaagtagagaaaagggaagtgtaatgataagaagaatgacaagaaaaaaagagatgaggatgagtacgagggtgagggtggcaaaaaaccagagaagaagcgtaaacagaacccatcgagattccacaagccaccttataccacagagagaatgcgagggaccattggtcatgtttatgtttggagaaaaatggattaaacacttgcgtcattgtttttgtgtgaacggtttatttatgtatttcatgatgtatgttttttgggatgattgatcttgttgtttgggatttatggtatttatttatgtgaatattacactacaaaaaaagtttagtttacatcattttttcttaatatttgtattagttgtaaatgatgtaaaagactttcacatcacttacataaatgattcggatagtgatgatacaaataatttacatcagttaattaacaactgatgtcaatatacaaaatatttacatcgattattgtaattaatgtgaatatgtatcagttgcagaaaatgatgttaattttcaatcaatttatttaagtgattttagtattagtgtcgattaaaagaattgatttcaactatttacatcacttattaacaactgatattaatatttgtgtttttttcaatagacgataatagtaaaactttgtattttattaatattttttgtatagcaaaagttattttcaatatctactaaatcttttataatttttgtacaaataattattgtaccagatcgtcatttaaaaaatgaaaaaaatattttaaatttaattcaactaaaatagctcattagagattttt

SEQ ID NO: 18206 - DNA, 2664 bp, Arabidopsis thaliana landsberg
cccttaactttcaaaatgtgttcattttatttaaaacataaacattaacatttgaaatacaagaattttttgaccataccaaatagacatgcccaatacatactcaaagcccaataaatctgaaaatgtccagaagatctttaaatgggcctaatgaatatatatattttgaaagccctaatgaagctttgatacaaagctttctttataaacgctgcgtcacatcactgaatcaaaaaccctagcgatacttcatctctcgagccggagccgcgttgcgaaagcatttcaatcgtagtctaaggtactctatcgatgattcttcatttctttctttcgaattttacaagcagatatattccttccgattattctcccattaaattttcagtgttgttttgatctgtgaataatgttggtttgttatgttactttgatggtttcagagaatgtcgacagtgggagagctcgcttgcagctacgctgttatgatcctcgaggatgagggtattgctatcacggtatgcttccttttctactttactattttcttaattttgattggtctcgttgtatcattgctcatggagtttaaggattttgagctgtttctggtgacttgatagttagaaactaagtgaatagttataatctttcgttgataaggattagtagagttatagagtcagtaattgaacaagtgtatttttgtttctgtctatatatgtttgaattgggttataacttattaatttaaagatctttgcttctgtttgttgaatttgtgttgataggctgacaaaatcgccactttggtgaaagctgctggtgttaccattgagtcatactggccaatgctattcgccaagatggctgagaaacgtaatgtcactgatctcatcatgaacgttggtgctggtggtggaggtggtgcgcctgttgcagctgctgctcctgctgctggcggtggtgctgccgctgctgctcctgctgccgaggagaagaagaaggtaaattatataacaatgaattcgtagcttttccctaacgaagcatgatctggtatatttatctaattgttttgtaaatttactgttgcaggacgaaccagcagaagagagtgatggagatttgggttttggcttgttcgattaagtgcattttacttgttttttcttcttcgatttgagactatttttttttcgtatcgagctattacttgttttggtctggctgaagaactataattagttgttttctgaaccatatgttgtatgacacaagttttcaagcaaacccatcggctccttctttccttagaaatgattttgtcacctcttttttttttaattcattcgagatattagtctaggctcgtcgaatcagaagataaaatgataaatcttcccaacggaaaggagttttacgagcttagttagacaaaatcactatggttgagcccttcctatttccttttctattatatccctgaagaaccatgtgtgtgtaaaaggtgagtggtttgaacctgctccgtttggccaggcgtgtgggttgacgaacaacattttgtattgttttaattcagtttcatcctttttaagtcgcaagaataagtagttgacatcattttactctcgggtcatttccttaatcaatagcccctatatgatgataagagagtgatactaccagacaagcagctaaatttggacttgaaaggaaatacattcttttccttttgccagatcggatcattctgaacctttctacccaaaaaccgaaaagctttcatgatttgacaagcgataaaataaacaaaagaagtttacaaaaaaaatttggcaaagcagttaagttcaacaagagaatagtactttgggtaaaggaatataagttgtaaatattacagaaaaagaaaaaacgtaaaacaaacctacaaataaacacacacagaggctacaatacatgaccacaaaagcttctggaggagcttctttctgcctattattctttccaacatggtggttagaacaagtatgtatcactaaccctacaagtctcacatttttaccacatatacaccacagcaatccagagaccaccaatttttgaggacaatcaccgcaatttcttctacattacggcatacggcaaacctatattgctgtcctcgagattgacttacccactttactcttccaagctccctgtacacacattcgaaagtaaacacatatcagaactctctactcatctttttgtctatgctgcttgaaagatttaagagaaagctaggtatatacaagagtctcattgtcagaagtctcagcattctcttcagcttctctctccatttcattgttttcttgtttcccttcagtatctgagtcgtcatgttcagcttctttcccctcagcgtccccactcgactctgtttttgcctcctgtaaatcttcttccttgtttacaacttcctcatcatcctcaccttctttcaacgactttccttcagactctgatttttcttcgccagcctccccactatattctgtctctactgaatcatttcaaaatagaataactcagctacaaacaaagaatattgaattgtgtaataagattaacaccgttgctgtatatctgtttgcatggaagcaaata

SEQ ID NO: 18207 - DNA, 1134 bp, Arabidopsis thaliana landsberg
ttgcatttggctaaaaacatcaaccgatcattcaacatagttgcatactaatggaaaaggaaacgtaaaaattcaaaacaaaatgaagctacccacattattcaagtagtgtttctaatttcatcattcttcaagcttgttcttacgaatagtcatcatttcatcaaacagaagctgaaagagcatccgcacttttcaagctacaagacgctccaacttcaagtacagtatcaaaccactcaaccttcccccaaatctcatctccatcgcgcttttcaagtgaaatctcagcacagaaaatcatgcagaccccagaatactcccatttatcccacaacaccgccatcttcccaccaagatccaccaacttacaatactcacgctggctaaaatcatcaggtaacccttcaaggcctttcaattgcttccatgaacttaccttactgtcataccatttgaacactccttgatcccagtagaacaagatgttgtcgaccacgcaattactcgagcctattgcataacctataagccaatgctcttctactgagttccatttaccttcatctgggtcgtaaaccacatacttatccccagacaggtataattttccgtcatgtcctatgcttttgactgcacgtctatagcatacctcctcccaaaccttgacgatgtgagggttcgtcacagttccccaactttgtatttttggatcaaacacttcgatccagtgtgagggattatccgtgtcttcagtgcctcctgttacatatatcttcccatcaactacgcttgttgtggaggatctcctgttcaatcgcatcctcggaccatcacgccacgtgtgagaccgacaatccaggatagagactttcgaagaaggttccctatcgaagccgagagggcaggaatcatcaccaacggttccaccgattctgtagatattagaaccaacggcgacgagattcgacgatagcgtaagaggatactggggagatggaatttggagaaaaaccttgtcgcttacggtttgattagggttttggtagagagtgaaccagtatgtgttattgtcgaaagggaagcgtaagcatagatagagacacttctcggtacggtttaagagagatcgag

SEQ ID NO: 18208 - DNA, 1887 bp, Arabidopsis thaliana landsberg
  unsure (1)..(1887): unsure at all n locations
cggctgccaaattttatataatatcagttccttgtagatggagaacttattaaaacatcaaaaacttgtgtgtcttctttgttcccggggctttatcatgtaggcgctccattgactggaatattagaagctttgtcaaatgaattttccgtccagcgaatgggcggagtgggtggagggatgctaagagatctctttgcagtttcagctaatcttccagtaagtgttccttcttaggaactcatgatttatagtttatagtctatacattttcagtttcacttatcaagttcttaagtaatgcgatcaacaccttgaaaattatatttgtagactctgagtaggatgttctctaaggacacactcctttggaagcttgaaatgctaaagtctgctattgcttctgtaaattctcacatatactcagttaaagctgaaacactgatacttccagggtccatattttctttgttttagaaattatgaatctcttttacttttttaaagagatgttatagcttggagcataagtgtaatgtgattatgactatctcagtggacgtgatcaatggctgcttaatgaggaagacattgtcagatactcgcgaacgttgccaaattgtattgtacgtaagcttgatgacaatggacagtttcctcttttggtaagtgatctctcttcatccaatacttagggtttaatattgatactactattaaataggttcttgaaatctctatatatcctacacttcaattatctctcttttacatctcatgttaggaggacagcttagatctggctactatcatcaagcttacttgtttttatcgccgtgggaagtcacatgattacgtttcggattacattaaacctaccccttttgagttacaacaactattagacgagcaccggtaaatgccttactaattgctatatcttagtttttctatatgtatatagcaaaagaaataaaaggttatagtaaatactgaatggaatattccgccgtgcagattgctaatggatgctatttcacctgtaatgctatcaactctagaagacggtacaattgtcaggagcctcgaaggattaccttcgcaagggccggttgtgtacgttggatatcacatgatattggggtttgagttggctccaatggtaggtctactcttaaaagagaggaatattcacatgcgtggtttgacacatccgatggtatttatgtatatccaagactcgttagtcgacccgaagatgtttgacaaatataagttaatgggtggagtacctgtctccaatatgaatttctacaaactactgcgtgaaaaggctcatgtgcttttgtatcctggaggtgtccgcgaagctttgcatagaaaggttatgttataattaatatattgttgcgtggtgacctttttcggtttctacaattttggatattagtgttttggaggttaacatgtaaagagagacttcacagggtgaagaatacaagctgttttggccagaacaatccgagtttgtgagagttgcatctaaatttggagcgaaaatcgttcctttcggtgttgttggagaagacagacatctttaacgtaagtattctctacacaaatattaagatctacactatttcatttccttcatgtaactatttatcacatatgcattattaaccccattcaaatttctacttactcgagnnnnnnnnnnnnnnnnnnnnnnnnnnnnnnntcaacattttaaatgtgcgttaagcgaacatcggtttagagtaactttggcttgagacatagaatgatatcccccctgtattggactcctatgatcaaagaaaaaaaactatcataaaatatttaatgagcaaagcaataaagtac

SEQ ID NO: 18209 - DNA, 618 bp, Arabidopsis thaliana landsberg
aactatttctatttctatccttccgtgttcgaacatatttttgacaaaggatcaagatatacgccttggtgtgacgattatgaaatttgtcacactatatcattttcctagtcagactaacaccgactaaatgtaacaaaatcggctctatgatctccgcaggcgattttggactcgctaaagtcttaacatcagatgacctcgcgtcttcagtaattatagtttccttcaatactttacatatgatttttttccgaactcaggtttgatctttacccttcttgaaaaaccaggtggttggaacaccaagctacatgtgtcccgagctactagctgatataccctatgggtccaagtctgatatttggtcgctaggcaagtttctcatcaatggataagattcttaacctttagctgtagataacaaaagaatatattcatctgaatctttatcttcttttcttcaggatgttgtatgtatgagatgacggctatgaaacctgctttcaaagcttttgtaagctcttaaacctatatttacgttcctctaggtactgttgatcagatgtttattatgggttcttggcgtcttaaaatggttgcagggacatggcaagg

SEQ ID NO: 18210 - DNA, 2125 bp, Arabidopsis thaliana landsberg
aggacgtggtgatgagtcaattatttgacaataactggaaagttacgttgtagggcatgttttgagcttacatggagtcttcactaccttgtttgtgtagagagtcattttccttcaaagatacactatgcttcagcctttgcaaactcgagatcggctggtttatgaggtaccggaggtgacatatcaggagagctggaacaatctgctgtatcttttcgtcgattttgcaaagctttggacacaaatctggacacgtagagcgttgatgcaagattgagttgcgtgccttgtggaatattctcgttgtctcttgtcttagaaagcttccttttgcaatgtttcctccatgccgcttgaatgaagaatgctgcccatgagcgccattgctgtgagtataacctgaaaatatggtttgtttaagtcttgcattgcagcttgtttaaggtagtaaaaaaatctcagctgctactttggtttcgaagcttgcctgaatgttcgttggagtttttgtctttgaaagacatttaaatgagaagctataaacttgatatcatcaggcaagagaatgaaaccttcaacttcagtctgagtcattacggttctggttgaggtgggaaggcgagaaccattgaagagaagttctccacatatgtcaccagcttggaggtcacaacaattgttgccgccaaccatttcattagatccggttgtacttttcagcttgcctctcgttacaatcagcatctcctcaactgggtgcccctctctcactatgaagctgttcgctgaatagaacacagacttcacccggtcgcacacagcttctagtagccaaccatcatccatgatgttaagccatggaacctgagaggtgaaaaagctataagttgacaactattatatttcttgcgatacacggataaatgacgaaaagggagctcgcttacacgctttaacatatccaagtaaagatagcgtttggtttcgagtctgaggtcttttggaagactacgaagaagagcttcctcttcggtgcccttggtttctcgccatttgtaatcttcaaatctcctaatgcgttccttcaaatactctggtatcacccggtaggacatccatttttctgtgtctctccttttctcctccatttcatctactctagtagtagatgattgcaagtacttctgtgattaccaaactattaagaatcgctttctgagatcaaactctagtatctcaatctcatttcatattacctgaacatttccaatgagcacagcaaacaagagtaaaccagagacacatatgatgatagcaaagaaaatctcccctgcagagttgcttgtctccaggttttggcccaaagcactgtagagtggattaatctaacaaatggattgatatatgtcttactatgggtcagtcgtcagatctcacggcagagagtttagcataatacaatttattacctaatattacgtagaccccaccaaaagcaatagacgaatttcctgggaaaatcctttggtttcacctctaggacccctgacttcaacgcatcaatatacataccaaagtcgaagtctgtggagtttgtgatttgggaagggtcgattaatgggcatgaggtgttaaggaatcgaatgttgtcactgccagctcgtttacaaagcagatccgtgaccgtgagattgcagtcggatgtcctagcacacgcttgacgccaacatttgcttttcctttctattgaactcaagtaccaaaaagccccaaacacctatatgcatagtagccatccatcaacaacaacaacagtgggtgggaagtgggattaagagcaaagacttacataactgtgcagcatgtaaaggaataagtttaaagcagctccaacccactttgattctgctaccgtaccaaaggctcttgtcacttctttataaagcggatacatacgaatgattcttggtacatattgactaagtataatccatttcagtattctctcagacagtggtatgagagtgagaaccaccacctataattacgcaagaacatctctaataaaaagcatggaaaagtagatgtcacacacaaaacgaagagagcaatacctgaggaa

SEQ ID NO: 18211 - DNA, 1496 bp, Arabidopsis thaliana landsberg
gatcttcgaaaagagaacgacgacgaatcagagagaaaaatcgcccagagagcagagaggagtgaaataaccaggcgggaattttttcgatgaaaatttgttggaaataaaattctccctccattggcttttccatataccgtgtcgtttttgcgaaagattattttaagggtaaattcgacatttagtagagattggcagctggtttgtttttgggcctacaaatgttgggctgttattttatcctagtccactagctttcttagcgcattgtgggatgtgtagtgggccagaatacaaaaatcaggtctgatctagtcacgttaaagctaagttagatatcaaaatcggaaacgaatataaccaatcttgttagtacataaccaaaatcgggttagtccataacaacaattctaaatgattgataagaccatgatatatggcctagtggttaaaaaatatataagctgcttcatactttgacgtactaagtaggaaaataaaatgtcaaaacatgaattaatttgaagatatagcaaagtcatttgagtttctttcgccataaattatctaaggtttttaaaattgaactctcttctcgaagtgtctacttctccttctgaaattgattttttgtcaagtaccagtacgacgtcattttcaaaaatcgtatccatagtcatggtttttgttttcatacgatctatatcattacatttacaacgatgatctctatcaaaaatgtaattttttttctttcccgtcgttaacttactattataaagtttgacaacattttagatcccaaaaattagctttatgtaatggtattgaaaaaatatcatcgtataaagtctgtcgaaaaaagcggttttgtatctggtttaatggtgttggtagatttgacaatgaattcggcattgatggatttgacgtttgaagtcgtatgaaatatgtcactgaaatagcgatgcacttggttgaagaatttggctttaatggatttggcgatgaatttggtgttggtggatttgccgtttgaagtcgtctgaagtatgaacaatgaacactttctttttcccaaatgattatcagatttttttattaaatttcaatttaaggttctttgtcgttacacttaaattgatgatttctatcaaaaatgcaaattctttttttaatttcgattttgttctgttttttgtttttatacgattaattcaataggaatcaaatacgcttggttgcaaaacatttcaagttttcaaagaacaatcatagtttttttttgggaattgaacatgtttaggcacttctacaaacttttattctttttgagacacttttcacgtacaagacacttttccttgtttttgaaaaataaatggataattatattcccatccgtctaaaccaaaaattaacttaccggtagaaagtttttgtttgattttgttccctttaataaatgacagtgatttacagatgaaaatgag

SEQ ID NO: 18212 - DNA, 639 bp, Arabidopsis thaliana landsberg
gagatttacatcaaaagcgaaaacggaggaaaatttggacagtgtgcagcttgtggataatcaatcagcacgcccttcttttccaagaatttcaaagtctatgcataaagtgataccagactcaaacgctcaacgtgccaaggcgacgttatatttggtcacagaacgtagcgacgactttgtcattcatttaagattagttagcgactatatgaaagaccgaagcaaatacgtcgcaattttaggacgccaaaaaatagtcacaatatagtctctatttcacgacttgaatacgactcatttccgtctataaaacaaaagtcgcaaaacgatctcacttggagacgttttagcaaccagagtcacaattaaacacttaattgcaactaaatattaagtcacaacattaatcatcttaatataattttatactaaagtctaagtttagttttgaataaaactcaatcattgtaagtttctaaaagctttaaatcacattgtttgaacacaatagtatcactaattctaaatcattcttaagtttaacatgttgttttagaaaaaggattgggatgttttgtaaatttggcaaaacaaaagcattcaaaacaaatgtttttaaaaactatttatacctac

SEQ ID NO: 18213 - DNA, 2173 bp, Arabidopsis thaliana landsberg
agtgtagctttggcaactgaatctaaattacaatgtggatctttaggttgaggaaaaccagagtagtagaagtcgacaacattgggtgtatcaagtgtaataatgctttgatgaccatcataacaactactgctattgataactgagagtttcttaatgcttttgctggatataacgtatgaacttcctctaaaattattgtaacgtatggttaagtcctcaagtacagggcaagcagcgaaaaatacatttactaatgactcatcccaaaaccaaatagaatcaaggaggagaacctttagtgctgggagagatgtatcaggagaaaactcatagatgtgttgggttttccccaatgacagcttaaccagtgttgtgctggtgaatacttgggatgggaaactaagccacgatgtagatattatctgtaggtgaagctcagaaagactgtgtagcatggccttacatatcaagtggtcaatgtcatcctctacttcggatattacttcggatatcttcgggacgcccggagatgggatcgtcaaagtcaagatgatgactgagagcaaatagagtcctccaccttttggagagaagagaggttgaagcagcttgtttggtggcaaggaaggataagattttgacaagaagatcatttggaagacaatccattgaagccacgcaatccatagagacagactatacaagctagaggttcaactttcaagctttctctccgtagatagatacaaaaaccctaagggttgacctagaaaaatcattcgtcaaattaaaaacgagaatatacaatacttacaggatcggcaactttagattgttttgttttcagggttttgccctcgatagggtttttcttgagggaaattgtcagaaaattatatttgtgttgatatataaatgctatatctggttcggttcagtgtggcaaaccaacctctatttttagtttttttgacataagtctctaataaattattaagactagccgtcaattttactaactaggactgtaatttcggatcttgttggtatagtttagtagagttcttttacttactaataagattaagataaacttaatcggtaaccttgaatttttacaatagactccacttgaatctttgggagtagactcatccggagaagaaatgttttaacagaatataaaaatttatttgtgatggaatcaactgcttgaggcttaagctttggatcgtagtgttgatgaagaaaccgaaaacagaagcatgctttcgctccgaaattggatgctatatatggaataaattagtatttacgctatgagcagagggatgatgtctttttgtgatgagaattcacaagtggaaccatacttatagctagggaaagagctttgtgagatggttaaccaagttactgttagaatatgtcccacatcgagactttgataatttgtgagcaatatataagtatgtggtaaacatccactcttgagctagcttttgggtgttagttcggcccatactaatctaggttttacgtgtcttgattgtggaccacccatgtttgtccagtcccacaaacttcacgctttagatgtccaattctgagagtgagggggatgtgttataatatgttttacattgagactttcatagtttgtggagcaatatataagtatgtgataagcctccactcttgagctaacttttgggtgtgagttaggcccaaactaatacggtatgagtttgaggtttgaacaaagagaaaaaatgttgattggtttgtctcagattgtgagactagtacaacttgccacttgtgaaatctgaatctattttgtttagctctatcaattcttacagaaactcattttgagaaggattctatgattcacgtgacaaggaaatagaggtggttgacttgaagcacacgacaaggagcgtgaaacagaggaagttgcataaccgactttgtttgttatgttccatgagagagtataaatagaaaggatcggagaggctatcgtagagatcatcatgcctgaccattgaatttgtgttagggttcagagcttgtgtgctctgttcatggtccttaagtaatatagacttttagtaagaaacttaactagaagagacagaccgtgaaccctaatgaaatcttgaat

SEQ ID NO: 18214 - DNA, 379 bp, Arabidopsis thaliana landsberg
cagcccatccaagccacatagggtgcaaagaaggctctcgctatttcctaagcccaaatcctaacccaaaccttttggttggtgctgtagtcggcggacctaatgtcactgatgcttttccggattcaagaccttactttcagcagtctgagcccacgacttatatcaatgcaccactagtgggccttctcggttacttctccgcccattctacttggcgatgagggagggccttattacttattactctctatcctattagaggtgtgctggaaactttaggccaccctaaaacccttttttttttttttttttaatgttattgccactctttattttctactacttaaccaattgtattgtatgcccgtaattagtg

SEQ ID NO: 18215 - DNA, 1352 bp, Arabidopsis thaliana landsberg
gtgtagcccatggcgcagggatcacaatgcagtttgtgaaaaatgtcatcatccatggactgcatattcaccacatttctgagagtagcggtggtatgatccgagactctgtagaccatttcggaatgaggactagagctgatggagatggtctatcgatttatggttcgtctaacatttggcttgaccatatctcgatgtcgaaatgtcaagatggactcatcgatgccattgttggatccactggcattacaatctccaactcccacttcactcaccacaacgatgtaagcattcgtcaaattttccataaaattctatctaatgctcattgatatcaaccactacatttgcattttcggggatatttgtttatgtaggtgatgttgcttggtgctcaaaacacgaatgaagcggacaaacatatgcaagtcacagtggcttataaccattttggtaaaggacttgtacagagaatgcctaggatccgatggggatttgttcatgttgtgaacaacgactacactcattgggagctttacgcgatcggaggtagtcaaggtcctacgattctcagccatggaaaccgattcatagctcctccacacaaaccgcattacagagaggtgaaaattgggttacatattgcaccaaataaaagtttaggtatgaatttgtaaacttataaaattttaataaacgcaggtgacaaagagagattatgcttcggaggacgagtggaaacactggaactggagatctgataaagatgtattcatgaacggtgcttatttcagacaatctggtaatcctcaatacaaatgtgcacacacaagacaacaaatgatcaaaccgaaaaatggattggctgtttcaaagctgaccaaatatgccggagcacttgattgcagagtcgggagacgctgttagaaaatttcttttaatttactattgatgttttaagggaaagacaattttttcaacattttgattttttgcttctaatctagttcaggaaataaataatttcaggggtgaaaatgattaaaaaaaattctaatttgtaaagttattttttgtgttattaaaaacaagttatataaagagtaagccataacagctggttcttgtaatacataattcacattttgtttgttaaacaaccaaaactaaatcatcaaatacttttttttggattcaaatctgcataaaacatgctggtaaacaaaaatataatgataatgatattagaggtttttagacattatgatatgtttttcttaatatcatatcattagaatcatataaccaacatctttggattggtattgtgcttaattgctttattgcca

SEQ ID NO: 18216 - DNA, 709 bp, Arabidopsis thaliana landsberg
  unsure (1)..(709): unsure at all n locations
agggatgtagatgcgaaaactcccaaatatcatttattgaatgtagcggtcctgaaangnattatttattggtgcttgncaancatacagccaaggttaacaaagcaggcaccatcgtagctggaaactaataaataagtcaaattgatttttcactaataatttttaactatttagataaattttaaaaaatattaataaagtaccttttccgaaaggctgtaacaggatcaaaatcaaggttcaaatagaatttggttccagaagatgatgacaaacaaattgtaccttgatatgtcttgataagaacacttgtcatgatgagaacaatgttatcgcagcttcccaccccacggtatttatcttacaattgttctgcccatagtgtggcttgaatttccattccactatatatataaaattaaaagaatgattattaggctaaacaaacgtacatcttattatataatcgaaagtcttagtttatcattattaaactaaagagactattaaagtaaagagagaaagagatccagaaaattacgtacatttctaataataaagttacgataactcttcttaggatagctctatcatttgtacgaacgtccgaattatctatcttttgatataaccaattacatatgtatagcaaaacaatgatggatgtaatgatgagagattgacattaaataatttactattaaaa

SEQ ID NO: 18217 - DNA, 759 bp, Arabidopsis thaliana landsberg
tcaaaagaaaaaggaaatttgctaaatcacaattaacggtcacataaagatttcctttttttctgtaatgagtttagacctttcacacaacaacctctctgttggctaaatgttttggagttgatcaacaacaagcttactagtagaaattcatgaaattcctcagctagacagatttaacgatccaaacatttacgtgaacaacaacgaactctgtggaacgcaaatacaagtatcatgttctacaccacagaccgagcaaacaagaagaagtaattctggagcaatgttttcatggaatgtttcagtcataggttgtccttgtggattacttatggccgttttgttataatgaatatgtgattaactatttcagtgattcatcactacgaataccatcccccagaaacagaggattcaagaaatatttaaaactaaaaacagttaatcaatcttctacaaaagcacaatcttcactttggttacttgagaagaaagaatcaaacagtactttaaactttaataaaggaacggagataaaacggtttggttaaatgttagactaattcccggttcaactgaacctaatacggttacagatttaggataatacccaatcaaaaccctaatcaaacactcgagaccgaagagacagagaggacgaaggtctctgtggaatccattagagaagtagaaaaaatgagaccaccgattaacagcggaagaattggtgatggcggacttgattcatgccctgag

SEQ ID NO: 18218 - DNA, 639 bp, Arabidopsis thaliana landsberg
atttccgttttgggtgatgggcatactgcagcagggtgtagttacaattgttagaaaacagattttccttttcggtttacaagtaaagttagatgatatacaatgaatgtgtgggatcaggatcacgatatcaggatgaatttgaccaagatctgaccaaatttgacaatagattaacgtttcaggcactacttacgtattgctgaagcgcggtgctccagacagcaatagcggcagctagaaatccgttgagattgacactaacatcggttacagtacagacggcaacaccagcaagaactaacaaaatgctaagctttgtatctcttgaatacctgacattgtcaagcataacttctagaagacaagaaaccgggatcatactcagcttcgcaatctgcaatgccaacacactcgtttcaagatcttactaaaaaaaactttaaacgaaggaaaacgtaaatccgcatcgagatgaaaaaggacagacctggtagaagccaacagaattccacatgagactgacgttcatcccaacgatagagaagttagcgaacaaaacgaattttaaaagatcaagccaaggaagctgagaaagttggatataaccaagccatgtcaagaaagttgtcaacaatg

SEQ ID NO: 18219 - DNA, 591 bp, Arabidopsis thaliana landsberg
ggggcgacgacaagaaggggagaagaaaggagaagaagaaatactacaagaagaagggtggctgacgccatgtatgccgcgagtgggactcggacgagagctcctccgactcctcctccgacgaggacgccgccaacatcgccatcaacaaaggcctactcttccccaacgtcggccacaagtgcctcatggcaaaggacggcaaaaagaaggttaaatctaaatcctccactagatatgaatcctctagcgatgataatgctagtgatgaggaagataatttgcgtactctttttgccaacttaaacatgcaacaaaaagagaaattaaatgaattaattagtgccattcatgagaaggatgatctcttggactcccaagaggacttcctaatcaaggaaaacaaaaagcatgttaaagttaaaaatgcttatgctctagaagttgaaaaatgtgaaaaattatctagtgagctaagcacttgccatgagactatagacaaccttagaaattaaaatgctaatttgttagctaaggttgattctattgcttgtaatgttcaaatcccaatcttagaaatgatatgatgat

SEQ ID NO: 18220 - DNA, 684 bp, Arabidopsis thaliana landsberg
tcaaactcttaattttgtcctgagccgtacctttaccaccggaaacaatggctgcaacaaacaaaaaccagaggagtgagtgagagcaacagaccaaaaatattaaatccggtttaggcttcagatagcttatgaaaatacctccggcatgacccattcgacgacccggtggtgcagtaagtccagcaataaaagcaacaacaggcttctcagtaccacttgcctgtttatattcaccaaaacccaaaatttgaattttacttttaagaatgagaatagagagagatggaccaagatgaaagagattctcagtggtattattacctttatcaatgctgcagcatcttcttctgcagtgcctccgatttctccaatgagaacgatacctgaatcagccagttgtttcttagtttttaaattttagctaccaactaaactaagaaaagagaggaatcgaagccttctaaaacaagaatttcataacctaaagagattaggtaagtatgtggtcattcttctactaaatgatctttaaagttaatctatctagaggaaaaataaaattggaaaacggtgaaacagaattaagatatggctagataactccagtttgaaaaccttaccttctgtttgaggatcaacaaagaatttctccaagcagtcgacaaagtttgtcccgttaaa

SEQ ID NO: 18221 - DNA, 1034 bp, Arabidopsis thaliana landsberg
  unsure (1)..(1034): unsure at all n locations
atcactttttgctgataanacagttatgaaggaaaaagaatatcaaagatggaaagttttttagttgcttttgttcatggtaatctttatggaaccaacattgagtcggttgaagtggtaatagatttatgaaaggtatataagaaagcttttggattgatcgatgatgctttttgtaccttttgatccttcaacatcgagtttcactttgaaacaaggagatgtattctggacattgatgttcatggggcaagatctgtgagagcgagttctcttgaaggcatattcatagcgttttcagcttttataaaccctaagaagacataaccgttccttaaccgaatactaccgatgattcatcgttggttaaatccttcgtttgctgaatctaattcgatcaagggataatattgaatttaacttaacttttaatggttttttctcacatgtaagaagaaatacacgtccctcaacaaggtgtgtaacattggtgctgagaaaccgcagtcggaaatttgacaaacccatcatggtggacagtgacctcaatctctatgatgaagctagagctaaggttagggtgttatcacattagtgcctaccagtcttcaacaaagaacctctagaaaacaatgtagacaagtataaggttaccaaagctaacgcttaaaaaatttcactgtttgtttgtatacatggcgaaatatgcgtaagttattggaacaagtagaatagcggcatgttatgtgccacgatctaagtgttgaaaggcttgataaatgaagcattctacgtgacatcggttatcaacaaggtatttccatattggcatgacttcaaatgctatcttaagcacaagacgcattcaatgaccatgaagaatattccacagcatgagagtctaagggaaagtccaaatggctttaatctgtaatgatgcatgcaaagccaaaaaaatagagagatataaaagcgagccaaaccaaatgtcaaatatttcatttggtcttggacctcttggtacatatactcat

SEQ ID NO: 18222 - DNA, 785 bp, Arabidopsis thaliana landsberg
  unsure (1)..(785): unsure at all n locations
atattttgttacgaattgcaacacctctgacaactagcccttcctgccaacggcccatctcataaaaggaaaaagatatctctccgttattctcgggcgtcgtcataaactctccggcaggtatagctacccatgatttccctatatactccttcaatgtcacactccgttcttgtggctttgcaccactgggcaaggtcagcttcaggttcaccggtacctcccatccagtagctgattttattaacttcagcaggtacacgacctcgtaatgtgtccatggtgtcagctctctcgtgttaaatgttccgcctatatctaaccagcaaagtccaacaagggaagcggcttcaacaattgtctcgctggaaaaaaacaatcaaaatatattttttcttaaatatgtatatgaagaacaatcttacaggattactgcacaaactatatatctaataatctagatgtatacatgtactattacaatgaacaatgattctgttattttcatatattaaaacatgatccaaatctattgagatattcggagatttagtgtangggtgtcgaacatgagttcaatgttttgggtttttggttttctgattataaatgggaaaacaattaccgtcatatgattcatattttcgagaaaaataaatgtaacctctgattcacaaaaagtgtcattttgacatatttcccacaaattaaataaaaaacattgaattatacatatattaccctttttttggtaaagctatatatatatatataccccttattta

SEQ ID NO: 18223 - DNA, 1438 bp, Arabidopsis thaliana landsberg
tatgcatgtgccaaatatgcttaaattgtagatgtgtgctgaaccaattcttctcatcttctgcaaggatatcatcccactctttcatcgttctattctcttcagaccttgaagatagcttacaacactctgtataattggtttgcttaaaataaaacatctcaggtggaagtggttgggtatcctccatatctttatcattatcctacaaatccaaacaaaactgtcatgaatagttgtaacaaaatttttagttgtatcaatcttgatagttattccaaaacaaaaagatgattcacttctcaacgtacttgtggacacaatggaggagacctctcatgggcagtagcttcatcatcttctttgttttctgacggaggagagaaatctgttggttggagagtagcagtttcaactggttgaagagaaggatgagtgtcgtctggctgaagaggaagatgagtgtcgtctggctgaagaggaagatgagtgtcgtctggcggaggaggaagatttgcgtcgtcggatccggtgtcatcttgcagaggaagagttttttcaagtgctgcaggggtcttcttcttcacatttaaaccattactagtacgaaccatcctgcattaccaaaatgaaacgcaaaattaaagagatttccaaaatttcccaacctcaaacccaaattttgaatataaaccctaatttggcaaagcctaattttacaaattaatgacttacctttgatgtttgataggctacgatgaagaaatgcctcaagatttgacgagaaaattgaaaaattgaagagaagaaattggaagagaagaagactcgggtaagactccgacgacggagagaaagaaggtttttttttttgattcagaaaattgattaaaacagatggatatccagttagaatggataacccaaatgtttgggtagtaacccgaattataactggttgggttggttaatatcagaaatcgtcaaagttttatggtctttacctaatttttggattaaaagaaaagacaaaaaataaatttattataacagagggatataagaaatagattttggatgggagggcaccggggaataagatccttaaacttgtgtttctgcagttttttgttatgtgaattcttgtttgcatcccatctacaattctatataagtgaagtcttatccttttaactatattgtttgtctttaatgaattcggtctatgaatgtaaaacctaatttcttctcatatttacgaaaaaatgaaaaaaaaattagaacctaaatccccataaataaatcccggttgaattggctgtaacaaatcactgtagcacgtctatataatatattatcgaccatgcgtatatataaacttgaaaagtgttaatacggacatatctaatttattatacttatttccatgaacgatttt

SEQ ID NO: 18224 - DNA, 488 bp, Arabidopsis thaliana landsberg
tatatctaggatcaccacgaattaattgaacttgtttagggttaagaaaaacgagtgatcttagaataaccttgaccatttcatggtcatcccatttggtgctcccgaggttgcgcacttggttgaccaaggtcttgagccggttgtacatggcttgtggctcctctccttggttgagcataaatcgaccgagctccccctcgatcgtttccatcttggtgatcttggtcacctcgtctccttcgtgcgcggtctttagtacgtcccaaatctctttggcaattttcaaaccttggaacctaataaactcctctcgacttagagaagtgaggagtatagtagttgcttgggaattgaagtgttggatttgggcgaacttcgtcggaataataaccttaatccccaacgaatgtaaacgtggctcaaaatcacaaatggcccatatgcctgtgtggagagtgaggttaggtgatattcatcatttcact

SEQ ID NO: 18225 - DNA, 1209 bp, Arabidopsis thaliana landsberg
actcttctctttttaagttttaactaaaaaaataagagaagttgtaggtacgttacaacaaccatgggaatctagaagaatcaagcaagccccacaacaaccgcaagagactacttcggcaacaatcacatgtgaccgatcccacactaattacgatctctgctcaatcaacggctcatgtaatctggaccttaaaaccggaactttgactctaatggacccaacatcagcaccacttgtcgaaaagatcaggccatacccaaaaaaggctgacaactggatcatgcctaggatcaaagagctaacactaacctcaggcccattgggtcttccccgatcatgtgacataacacatgatttgccggcgattgtgttcagtgccggaggttacaccggaagcatctatcacgatttaatggatggttttatcccgcttttcatcaccgccaattcggtatatctggaccgtgacttcatcccggtggtagtaaatgcaaaggaatggtggatgccaaaatacatcgatattctaggtacgtttagcaaacataaacccatattactactagacaaagaaagtgttgctactacacattgcttcacttcagccactgtgggcctaattacacattggcctatgacaatagacccaacccaaatacccaactccaaatcattagtagacttccataatctcctagacaaagccttgaacccaaatctatctattatcaaaattaacaagcctcgtctcatattggtccgtagatatggtaacattggtcgagtgatattaaacgaggaagagatcagagagatgcttgaagatgttggattcgaggtaatcacatttagaccatcaaaaacaacgagtttgagagaagcgtataaacttataaagtcaagccacgggatgatcggggttcatggtgcagcattaacccagttgttgtttcttcgaccaggttcagtgttggttcaaattgttccggttggactaggttgggtgtctaaaacgtgtttcgaaacgccggctaaagcaatgaagttggattatacggagtatcgagtaaatgtggaagaaagcagtttgatagagaagtatagtagagatgatttggttttgaaagatcctattgcttataaaggaatggattggaatgtgactaaaatgaaagtctatttaaaagaacaagatgtgaggttaga

SEQ ID NO: 18226 - DNA, 1362 bp, Arabidopsis thaliana landsberg
gcttcttgttttctttaatgaggaagtcctcttgagtatccaaaaggtcatccttttcatgaatagcactaatcaattcattaagtttctctttttgttgcatgttgaggttggcaaacagggttcgtaaattatcctcctcatcactagcattatcatcactagaagattcataattaattgaaggagttagatttaaccttcttccatttgccgtcctttgccatgagcacttgtggccgacgttggggaagagaagtcccttggtgacggcgatgttggcggcgtcctcgtcggaggaggagtcgcttgagctttcgtcggagtcccactcccgacaaacatgggcatcgcgcccttcttcttgtagtacctcttcttctcctttcttctccccttcttgtcgtcgcctcggtcactgtcacttgatataggacatttagcaataaaatgaccgggcttaccacatttgtagcaaaccttcttggagtgggacttgtaatctttccctctcctttgcctgaggatttggcggaagctcttgatgacgagcgccatctcctcattgtcaagcttggaggcgtcgattggttgtcgacttggtgtagactcctccttcttctcttccgtcgccttgaatgcaacgggttgagcttcggatgggtcgccaagctcgttgattttcctcgagccttctatcatgcactcaaaacttacaaaatgcccgataacttcctcgggggtcattttagtatatctaggattaccacgaatcaattgaacttgagtgggatttagaaaaatgagagatcttaaaataacatttaccacttcgtggtcatcccacttcttgctcccgaggttgcgcacttggtttaccaaagttttgagccggttgtacatgtgttgtggctcctctcccttgtgaagccggaaccgaccgagctccccctcgatcgtctccctcttggtgatcttgttcacctcatccccttcgtgcacggttttaaggacgtcccaaatctccttggcgctctttaacccttgcaccttattatattcctctcgacataaagaggtgaggagtatagtggttgcttgagagttaaagtgtcgtatttgcgcaacctcgtccgagtcgtagccttcgtcccccaccgtaggtacctgcgctccaaactcaacaatatcccaaatgcttgtgtggagtgaggttagatgatgcctcattttgtcactccacatccataaatcctcaccatcaaaatatggtggtttgcctaagggaacgaaaagtagaggagtgcgcttagagatacggggatatcgaaggggcatcttgctaaacttcttgcgctcatg

SEQ ID NO: 18227 - DNA, 4462 bp, Arabidopsis thaliana landsberg
ggccacaggcggggtttcagtttgctgttacaggagatcaatattgtgaaggacagtttcggcttggtttggtttggtttggttcagttctctaccagaagattgtttcatcaactttgtgtgagtttagtcgataaatctgtaatccatatctttggaatacacatttctctttgtaactatcgtttatgttttgatagaatacttgcaaattcaaggttttatttttagacatcacaattcaagaccaaatgagacttttcaagtaaccaaaatgaacaaaaggcaaagaatatgaatatggttaaacgactacagacttggactaagaacccatttctaaccaaatgaccaaatccaagaactttttaagagcttaggatcatacaaagagaagattgtaaactaccaacagacgagaacaaaagcttcactaacaacttctaaatccgcaacttctaagctgtcttgtttttaactctataatgcagtaaatcccaaatccatgagcctgcgatgaaaaagaagattttccaagagtaacttactaaattggacattagcacagtctacactcagtcttttgtcaagggagtttcacgatcaggcgatgtcacactctctttctgaccaggagaaggcatgggtcttcttagctctgaagccccgctttgttgttcctgttgtttaagccgtttcagctgcttaagctagtacagcaatgtctgttaaaagtgaatcagcatgtgctcatactgatgttgcagcagatgaacatgatatgtgtcgaatcatgtattctgttgctctgcgatgctgagattctgtcatgtttactagtgtccgcactgagatatgtgtgcaccgttctgagcataaaaatatgtattgctggtttgatccaaaagaaccgtagttcattgatgtaccatttgatggaccttgccccgtcaataccttaagatgctggacttcctcctttagtgcatcatttaaagctgtcaaacagataaagacgattaaatcaagtagcagcattcacaacaaagtgcagcgaatatctcgacgggggacaaatatttatagactttcttaaccagagaaatggcattgagttttgaaggtgtatgtttatgtgttattcaagattctggatctgtattttaagctttgtatgaccacaaacatggcatacaatcttacactgacagatccagaatgtggtatgtcatatatactacaccttcgacagtcattgacaatgtttatttgcattgatagtaaagagatgaagaaatatcagctcctaggaagtatgtgagaaaagatcctcaccatcctgtaggtggacctgttgctccatagtttgtactcgcagtttaagtttattgttttcaacacccaggccatttgtatctctctgaacacaaggatgaaaagagaacaagattacaaccataaacttacaaatatcttagtctagagttaaatttggtctccaaacctgtaagagagtcaactgggctgagagagatgtggcctctgtttgtaaagtctgtacttttctctcgagctctgcaatgtatctcatcttcctttcttttgacctcgcagcagactgcctgtttgcccatatcctatcaaatgatacaacatgtcacgcatcttatacaaattcattactagttaccgtaatttacgagtgagctacttctagatgaagggttatgtaaaactccaacagatcagttcagccaagctttattctttttagtcaacaaccctagataatgtttcaccaaaaactatacaacttcttaaaaacatagaaggaaaactgttcagaaaagaaaaaaatacctcttggcgcgttttggatcaatgagagcaagctcagaaagtttagcagcagagatggctttcttagagtcaactccagacacatcttcattccctgacataagcatctcaggcttgatagttgttgaaccatccatcgattggctgtgttggtgtctaattctcggtctttcactagagctaccgggtgtactctgaaggttagaagtcgaggctaattcattcctccaagtcggttctgatggctcacccatttgagaagtcgatgtagcagaagaattgaatttttccatatcaagatacatatagagtaagtcctcgtcagtatcatcagagaaagaaggtccatcagcagcaccaaccacaccaagatcactatcaaagcttaagtcatcaggaagagtaagaatctctgaatgagctcggcgatggcctaggttcttaggtggattatccggcattcggctaatatcatggctgaatcggttagcatctgagctattgcttccacttggagtcaaaggaggaaaagatgattcagctttcattgcaaagctacttccattaggtgaaaacgcagagtaacgacccgatggtggaggaagacctccactaggtggtggtgcaggagatttctccttatccatttcaagaacttgacctaaacccactaatctgcataccatttattcccgaaaaaagatagattatattccatactagaacagattagggtttcatctttagctatcaaattcatttgaaacaatcacacgctttatctcagcgattatattccatattagaacagattagggtttcgtcttagctatcagtttcctcaactaaggagatacacaaccctaaaacaatcacacgctttatcttagccttaattcaaaacgaaaaccttaaaataagtaaaaagataggatcttttgagttttcacgcacttacagagatctaatgagaagcctccagaatccaaagcagaatgtccaaagagagatcaacgagacacaaaattaaaggtgaagaaaacttgaaatttgaaaaatcactaaatcagagagatccgacgagagaggaggaagaagaagaagaagtagaacattctctctcccattaaaggatccttcgaactagtgtgcatcagaagatttacggcgtaaacgatgtcgtttaaacgtaatttggttcgggtaagtggtacttttgtcggaattagggtgtaatcagctgcgttagcgtgttgcaatgaacgatgttactgaccgttggatgatgatcaatatgtctggttggttcgtgaagagcgtaaataaattatttttgtcaaattggttcacgtggttgctaatttttggttggaccgtcgagagttgcttgcgaatactactactatttttgatgactttctaatttttcttttataagaaaatactaaccaggaagttataaccatgtgatatgttttcaatattattaatgctgacgtacgatttctttcaatcatatgaaaatctaatattttaaaagagaaatgaaagagtttgaaaccattgcaatttcagtttcataaaatatatgtttcttactatttgtatttgtcaacgctcttataagtactgtgattgttgttgatttctggataagggagcatggggactaatattctttgaaaataatctagagtgggccatcgtttatgggccgcatggtaaaagatagggcccatagtactactacccatcacacttgaccgacctctctcacccattgacaattgaatgggcgtgtttactcctctcaacaacctcgtctggccatacttcaattcaattcctaaaattatgggatttgcaaattatttgctagaaatattttcattctaccaaaaaatccggatattcgtaataatcaaaagaaaaataagtagtaaaatatatagtgttttttacagtgaatttttctgcatatattctcacgtgaccttgttggctctatagtcacaagttaagccttagggggtacccataacccatacgaaataaggcagcaatatgatgccaattgaaatggtcaggcaagtatatatacaattatgttactcacaaaggattctcaaatgaaaaaaagaaaatggttgaaaagttccattatagatatgtagttttatagcagagtacgtaatgtagttttctacaaaataggtgttattgcacagttttagggtttggtatcgtcatatattgttcggcttttttcttacttggagaatttaattggacctacatttcgctttcgtattaaataattctaaatacttactatttttctggttgacggggatgtaaaatttgagtctacactctagagtctgctcgtgcatgtcgggtttatttgtattcatgttactttttagttgcttcatatgtttctgtagttatagaaaaatgcttgttttcatggttgatcaaagattccttaaaacagttaaactaccctgcttcatttatgtaccataagaaccagcgtggtcccatttttttttgtgggagaatccaagaattgatttaaaccctcaaaagccaaggaaaa

SEQ ID NO: 18228 - DNA, 663 bp, Arabidopsis thaliana landsberg
acacccaatgtctaatcctatgcaaatgatcttcaaaagtaaaaaagtagaaaggtgatactatgtttccacagatcccctcctcacgttagcaactcggttggataacacggtttcgaaacaacagcaacaggaaaaggttcaataacgatctcaatctgcgacggtttaaataatcgatcaaagattattttccattaataatctataattaatttcataatcaacccaaactatatatccttcaataaattaagtagacttaatttaataaaataattcaaccaaatctagtaataagatattgattcattcactacacgtaacactacgtccataattagatccatgcattcacgtgaatgatagcttccggtttggcaattaaccggtactctaacaactaaaccaatgaatgaagtcaacttcttcttcctcacaacacaatttcacgtaacttctaactaaacaaacgattcattggttttaactggtttaatttagatcatggtttaataaccaaataacacaatcaaataacaacacgagaagattcccgattacctttctcggtggcttttctcgacgagtctcccttacggtttgcttggcggttggaacggcggagtggcacagatctacgatggttccattcactagtta

SEQ ID NO: 18229 - DNA, 2612 bp, Arabidopsis thaliana landsberg
tttttttggagagggacatagccggatatgatgacgctgggggaacaagcttgtagagaaagaaggggatcgagaagaagaagagaggtagaaaagagaggcggcgttttttgtttttaaaaatatttatgtctatatagaatcactgctctgataccatgtaatctgagagtgaattgtcttattatgatgaatgtgttacaacatatatagtacttagtctagggtttacacaactactaatgacaattatatccttaatatatacaacttcttatattccaaacctctttggttttgatagaagcacaagaagatcaacatataattcatttgtactcttttttttttttcttttctttgattttatcccaatgagttttccaaagaaaagtttaataaagcaaataactcattatgttgattaggctcaagagaaattcgaccattgaagtggaagggtcattttaaacactctactagcctttattacttgattattttcgagatggtcttgtgagtgtctttcaagacgtttctcttctttataaacattgcacacaaaaatttcatgtattgagtgatagaatataggaatattctgttacaatcaagaagatacttgtatatattgtttcttgtatcccagattttgttgaacttctatgtaactcctttagctatttaaagccttgtaaatcaatgaatcccttgagagaattattccactaacatggtatcagggcctcatcgctttagattttttctttctttatcttccgcttcaccttctatttcattttctcttcctttcttccttctttcttttttcatcaattaatttcaatggatgcccctgtggcaaattatacacacaaacgtgcatttggggttaccaacatcaaatcttacattccacttatccttgttctagatgatcataattatgatgtgtggcatgagttgttttttactcattgcctcacgtttgatgttatggggcattttgacaacactttgcttccagctgatgctaatgatgtcgcttggtaaaaacgtgactgactggtcaagctttggatctatggcacacttgctccacctctgttccgatcttccttccaaaccggtgacacatcacgttatgtttggatacgagtagagaatcagtttcaaaacaataaagaagcaagagctattcagcttgacaacgagcttcgtacccaggatattggagattgatcgatccaagtttattatcagaagatcaaatcactcgccgatttgcttgccaatgttgatgctccggtcaatgaacgtaacttggtcatgtacttgcttaatggtcttagagaaaagtttgataacataatcaatgtaatcaaacacaacgatccttgtccaacatttgagatcgccaaattgatgctggaactgtaggagagtcgtctcaaaaagccacaccaccttattgcaacccacaacgatcattcttcatcaaccacagctctcaccattgctcttgcaccgccagcgctttgttcatcaaatcaacaccaacagtccaataacaacaagggcaacaaaagcaacaataaccactacaaaggtggaggtcccaacaacaacaactcacaattccaaaccacattttcaaattgtaccacccctccattttggcaagacccatttccagcttggcccgactactttggaaattggtctccttatcaacaaagctcgtttcgaccaccgactccgtcgtcttcaccacatcaacaggttcaacaagcgcatctaatggaaattcaacctagatcacaaatgacggagacactgacggatcctaattgggattcttgggtcttggattccggttcaacggctcatctgtcttcttcgctaggtaatctccactctattcttaatcatagcaacactcaatcagtaatagtgggtaatggttccaatattccagtaaattgtgttggctcttcctctattaaaagccttttgagatcacttactctcaaaaacgtccttgtcactcctcaaattgtcaaaaatctcaattctgttagacaattcacaaaagataattggtgtactgttgagtttgacccatttggattttctgtgaaggaccttcaaactcagatgatactgctttgatgtgatagccaaggtgatctttattgtctcccatccttgtttaataaaacatctccaccatcaactgttctcttggcttctactccatctctttggcataaacgcttggctcatacaaattatactattctccgttatgttgttttaaactctatggttcaatgtaatacagacaaactttcatcttcttgcgaaccttgtgattaggttaaacaaattacgttaccatgtccttcttttcaatccaatggtaccagactatgggaaattctacattcatatttttgggcctggacagctataagcataaagtgggattaagaattatgtttgattcttagacgaatggactcgtagtggactgcattaccctattccccaaaagagtgacggttgttctaaagtacttaacttcaactatctaatgaaagaaaagactc

SEQ ID NO: 18230 - DNA, 1596 bp, Arabidopsis thaliana landsberg
atacaaattatcatgttataataaatttataaaatattagtatttggttcagtgttttctaatgccgtagtgagttataacttctaagaccatctccatcggagtatctgattgagatactcatcaattaaataataattaaaaagagaaaaagtaggagagaaggagagaaaagtggagaaatgtttctgccaggagaaacgattctcagcatttattgaaagttgtcattcaactaatggttcatttacttcaaactaattaaaatatattaatttgattaaaatattaatttatttattttttgagatactctctacaatttttgccgatggagatgctctaaccacacctaactgcaagtaggcctgggatttattatcaggaatccagaatccgctccgattcgctctgaaaaataggatatcctgggtgggcggatccgaaatacaaaaagttagaacaagatatccggatccgttatttgggcttttataaattactcatatttgaaactcatttatcataaaacccaaacgtttttcacattcaagcccaataatctattaaaatatctctccatctctttcttccctacgacctgtcaacctccaacatttcttttttattctaaatgattgattggtaacaacttttaattttagctgttgagagtttggctgtaagaatttggactgtagaggctttaactataaattaatattgattaacttctttgtgcctaagtgatagatagttagatgcatatctaacacataagattatatgagccattgcactacttgttaactgattttgataagcaaaattattaatattgacatggttacgattctaaacccgatttagtaatgttattgattctatagtggaatttggttagatatgggttatacaataaccttcttatttagaagatgatgtgttgaattcattatatatttaacatgtattctcctttttgtttaacattttattcaatcaatttcttcaaatgaggactaattgttaccaacgttttcgaattcaacatattagaaaaggtttccaaatggaggataagtgtgatctagtagtcacccacttaacaatacataattggtcgactaaaacaaaaataaaaacgatagacacaatacataatctcttagctctaatttggcaagagtagattggtcggagcttaaaacccaaacctcaccttccaactacccaacgatatgaatattttgtaaattgcagaaagaccaaaaatgtaaccatcatccattcatttttatttctttttgtttccaatgtattaattatacccattgacatcacactacattatattttattttccatttgacaaggcgctgactattacgtggatatatgtagccgtacatgcggacgaaggattattgttttgacacatcatcttctactatctatgctaatgactccatccaagttataatccaatgtttaatattagagaattaccgtacgtccctcagtatcaatgactataaatagagccaaaaaacattttcgttatgcaaaagacaaagatagtcatgtgcatggggt

SEQ ID NO: 18231 - DNA, 557 bp, Arabidopsis thaliana landsberg
tcagatatgatgagctccgatcttttatgagccagctcagctcaactcatttattatatgagcttcaaaatacaaactcggacttagatcatctagatcgcgagctaatacgaataaatgaaatattttatattttctaaaattgttatgtaaattatatattttctaaaatatatttctattcttatagattatatatatatatatatatatgttttgattgttgactttttgtatatattattaatatttattttcagaaattgttatgtaacttttatattttctagaatatatttctatattttatagaaaaaatatatatatatactttgattgttgactttttgtatatatatactagctcatgttcattaaagctcgctcgtataactcgtgagctaaataaagctcgatcattaaactcatttattaaacgatccttaaaaatagaactcgcgatcatgaataactgagccgagttgagccagctcatgagctatcagctcattttgacaccctagtgatgaaccgatgatgatcataaagttttatgc

SEQ ID NO: 18232 - DNA, 2342 bp, Arabidopsis thaliana landsberg
aagcgttttttttctctgatccaccgccaatggcatatatctcatgaccaaccactactaaacccggttgggttgcggaagtaaaattgggagatgaaatcaggaccaaaacttttttggagctatttggtccctggtagataatgaaccaatgtagttgttcagaatcggtatagagtcgtacgcacacgtaaagacaactctccgttcggcctaagaggattcgggtttggtaaagctcctttgaagcaagaagagagcgaaattttttggagactaatgagagagttggataatgtaatcttgagacgcgagctaagcagttaaataccaaatcatcaggaagcattagaaatcttttaatcgagggttcttctccatattccatggttgttgatcactttttttctcttagggttgctgatagagagcggaagctaaataacggacgagaacacaagatctctaggagaactcggattcacgaacggatcttgcttagaacgtcgaaacttaacgaagaagcaatatagatagggtcgagatcggtagcgatatcgacgtggttttgcaagtcctccttgcagggcttgaacacaagctcttagaggtgagagtcctcctctctaggctttacacaaagctctcttaaataagaatcagaaacaaaaaccctaattctaaaaagaagttaaaagccaaacacgtaaagcccacatctttaataaagtccataaactactaaatcatgaatgagaaacaataaagaggcttggtcacgacgaggcccatcaaaggcgtgaacaaagcaaagatgcgctgcatcagttgcttattaagtaagaactacctatctcggacgagtatacgattgagaacaaaaaccatattttagcatttggtttgactccattggtctcgtgtaaattttccgtctttgttagacgtactgatgtaacaaggattattagaaaagacttgtgtcaacagtttcatttgcctgataaagactcaaaaagttgaccgaacctaaagaaccaccattttactcaaatattacatggaatactaaacatagaattgaattaaatctaagagtgtaagacatgtccaaatgcacagttttccccaaaactctttacattatatcctcctaaaatctggagagaggaaacaaagaatgttgaagaatgctctgtttcttttagtagaagttatttttggcttcatttcctcactttaaactgagagagtttcccagagagctttttcaaatttcaatggtggttggcgtcgcacggcttgccatataagttatgtaaattgtccatagatacgaaaacgagttgctcacaagtggctgcagacaaaaagaaaccagacttcagttgatgaccaaaactaaatataagacaaaacgaatgcaacgaatcgatgacctctcttgaaccaaaaggttaatcaaggtgaggccaaactgaaaacgaagtgcaagtaatcaagcaaacatacctgtaaataaactgggcagaacttgaaagtaataaaatcacacaaaggccaatacatgacaccattaagcattgtggggagtaggtcccttttcaatctagcaactatctctgaaccgttttcacctgaaaaaataattgaaaatcagactttgatgtcatcaagaatagcccaagatcaaagttttaacaacaatcacccactattcagacgccatttagagaaagaatgtaacatcaaacaaattactctaaaccaacgcacaagattgaaggtcaacaggatctagagtttgagaaaaaaaactttttttttttttgaaaaggaaccagttgatatttttgaggtacagttgaaagcttaccctgtagggctgcattcagtgagaagaaaacaacagtcataataggcccgtagatcgtctgtcccatagccattttcttaaacgttgtgatcaaatcttgtttaggaaagagtcttgacatgaaattgaaccagtagtgaagtgttggacccaagacaaataaaccatatcctcccatccttgctgttctcaccaagtcataagactcggaagaagttttcgcaatcgtctatacaaagatcaaaagcaaaatgaaccaaccaacgtcagctcttaagaacaagtactcacactgtggaaagctccaaaaaaccaacacactacaaggagacgtaaccgtagctaatagaactcctcaaaattcacattgcacagagctaattaaatcaccatttcaagaagtctcattcctacaataaaaaaccaaactttacttctcctactgtttgatattagtatcaaagac

SEQ ID NO: 18233 - DNA, 943 bp, Arabidopsis thaliana landsberg
aaaatacattaatccaacctgaatatagttcaggtatatttcatccgaaataaatctaataatttcaaagagacgttaaaaaatcccacaacgaaaatgtgatgaggttttgagtaataaataaataatgtgaatcaattcactcattgtcatccgtttgttattaaaatgaagtacaaattggaattttgtctagtttgaccctaattttgatttcaattttggattttgttctttgctattcaaaatcattaagagtattttggtcttaacaatttcctaaactttatatgatctgattcaatataaaccgttcaataaaattaattccctttaatctaaaccgttcacaaaaataaggaatctatgtcctttttgaattcaaaatatgatcacattccatccctaaaaacactatatttaatcacgaaatcaataattaataatattcaaatcatatattatgattcttcactaatcactagaaaatccacaaacttattcacttaattataagcatattcgacaaacaaaagcatattccacaaatggtttacaaaatcgacaaatcgagtcttcatcaccaactaaacttattctcttcaatctaatctattcataactatctacacaatattcagtattaatctaaatttaaccaatcattaaaatttaaaccattcctaaagattttatgctttctttacaagattgttacaatattcatggtctttttttgccaaaaaagtgtataacctgtcaaatagttttaaaaaaaacacttataatcataaaaaatattacaccaattttgtgaatcttacatttttgtaaatactttactttcactaaaattacagacacataactaattaatacacattttttaacacattcttcttaacactaaataacaaccaaaacaaaaatcccaataattatt

SEQ ID NO: 18234 - DNA, 601 bp, Arabidopsis thaliana landsberg
gcaggtcgactctagaggatcccccccatcgcattgactccctggcagggcacgcgacacctctggcaggcgacggggccctagtttcgtctccgtcatgatgactgcctcaaaaaaggtgtgccacattgtttaaatttatatcttgttttcctttcccccccctctctctctcttgccacagggatcgggaaaggggatatttcgaaaaggatccttctcagcgaaggaaacgggccccgagccctcctactgatcaggggttcgaaggttgcgccctgcggggtattggcaaccgccccagaccactcgggctctgagcccttcactgatcaggcgatcgaaggctggcccctcggaagggttcgacagccaccccagagcatgcagagtcagggatgacctaggtacgtccgttacatggccgaggctcgggctatgctcccgaggtacccaaggacatttccgagaccatcgggaacgatttataatggaatccaccggaggaggcatcgagccctcggaccctatcaaatgggtccgggtccagcaaatcactgcaggtacttttggagcagcctctggccactagctgccctta

SEQ ID NO: 18235 - DNA, 1265 bp, Arabidopsis thaliana landsberg
tcccatgtggtgtaaccgcgtgaccatgtgaaggatgtgtgggcgatgtatcctgacttggtagggagggtcaccgttcagtgcatgagtgcgctgtaccgccttcaggcgcttcagagcgatgctatggcactccttgctaacaccgctcagactgccaagctcactctcgacagtcgagaagattttgtggtcgacctatccacggagttggtggagaaggatctgcaggtagagaggctgagccagcgcatcaccaccttggagcagcaggtggagatccgagacaacactattgatgtcttggagaatcagcttcacgatgtgcagagggaactcgaagaagcaaatgaccacttggacatgcaccacctggagatggaggccaatgaagcaggaagcgagggagaagaggctcccgaggagctaggaccagcccctggtgccaatgggactacctccgcgatgcctccttcacccatatccagtgtcgcttccactgctcagggttaagcagtcgctttgacatttttaggaggatagagacctatgcgagcttagtagtatcacattttggactaggcttatgggcactttcccctgattgatgtaaccctgtgaacttttgaaatctgtgggataattgtcaccatgttaccttcattttgaacccaatattatgattatggcattttcctcccatatgagatgatatcttgccgttcgaaactgtgagttgggataacaatggcgacaatctctgtttttagatggcagctaggcagcgtcgcgggcagaacgagcaagctcccccgccacctcccccagctcccacagtgcaggagctgatggcccagcagaatgagattctgcgacactcactcaacatcagccatcgccccagcattatgggggtggtgatcaccataagtgtcccccagcagtggccacctatcaggagtttctcagtactcagtcgtcgttgttcactcgggcagaagacccactcgacgcaaatgtttggctcagggtggtggaatcaaaatatccactgcttaatggagattgttcagatgtgaccaaggtccatttcgccacccagcaactttgtgggcctgcgcggacatggtgggaccatttcctcgccatgcaaccggttgaccacgtggtggaatggggagagtcaaggcaacatttagagggcatacataccagcaggcatcatggactgcaagctcaatgaatttctagcactcactcaggga

SEQ ID NO: 18236 - DNA, 586 bp, Arabidopsis thaliana landsberg
  unsure (1)..(586): unsure at all n locations
aacgttattactatacaatctcgtgttcggtctttgagtacaagaaaccctctaggagtccgaaggagcatgttcagtttgccggggtctcataccaagaatggaaccagtggccagactactcctgatgctacaaatatagtaactcaatcggaggactcggaaacacaattcggagatgatgtccactagcagatcaactcgagcaagagaaccctgagcagttcgaagctatgaaaaaggttagccgcaaattcaaagaaatgagatcgaagttccactaggccaccagtatggagccaaacatcgatcgagttattgaagaaactaggcgaacccctttcacccctcaaattgcaagcttgaaaatcagagattctcggaagctcaatcttgaaccatacaatggactggaagatcctaagagttatctcgcagctttccttattgctgccaaacgggatgatcttgatgaagacgaggaggatgcgggattntgcaaactcttgtctcgaaaatctgtgtggacaagcattgatatggttcatgcagttgaagcatgggtcgatcagtaattttaacgagc

SEQ ID NO: 18237 - DNA, 2053 bp, Arabidopsis thaliana landsberg
  unsure (1)..(2053): unsure at all n locations
gttaactcttccttttccaaaagatggtttagattatctattagcggttctagatacacggtgctatgttgtttctaggttgagttggaccaggaatcaacaatgtcaacatgatgttctcctgtttcaaacacttgtcaggtggcatgttgtagttgactaacaaaacaggccatgcactatagttaacattcttcatgttgaaaggattaaacccatttgtggagagtccaagcctaatattcctttcttctgcagcatatgatggatacttctgattcatttgatcccatgttacaaaatctatcggatgatgcattcttccataggtgctcttgttactgaaatgccaccgtaagtctttcgccatgtcctttgatctgaacatcctcttgagacgtggaatgatcggaaagtatctaagtactttctgttgattacctttcttcacctcaccagttcgggtgttaatcttccatcgtgaaaacttgcatttaggacaagtgtcgagctcctgaaactgatttttgaataaacagcagtcatttacacaagcgggtatcttttcataacccatatcaaaagttttaaaaaacttattcacctcgtacaaggatgtgtgcaagacaataccattgggtagcatatttgaccaggtctcaagtagaccanccaccttgagtctttagcctaaagagtgaaacaatagtagagattactgttgtttgtgcaatctggatagagaggttgatatagctcaaattgcgttaagcttactcccgcaaataagagatcgtcgtagcacttaagggtcgaattccactgagctctcaatattcacacaatagacttgtgatgttgtttaataagctagatgaagtaattgaatgtaaaagacaaataagcaagtaaacgagttatagactcaagtgattaaagcgtcgggtctaagaattgtctcgggagatagataaattgtagatctagctaatattaggattgttatcgcaccgttctcgaactcaaacttatgattctagagtaaccggtggcgttcagcgaaactctctatacctagagctaagataaccagagaagccgataaatcatatgctaaagcatgcattgttaataagcttgattagttcacctagtatctaaaccatagcacttctatgagcctacatgttctttcttcaatgcctaggctcatatatgatagttcaaataacaagtacctatggtgggcatacctattatctaatatcaagttctatgttatctttctaaaactagcaataagaataatcaagatgaagaactctaagaataatcctaaggggttttcgatctactaatccatctaagtccctattgagactccctaaacctaacaaggtgattactcaaacatgataatagaaacacaaatcataatctgaatagtttgcattgatgaattaagaataatagtaattgagttcagaatcctccctaaaggattggattcttctctcaaaaatgtgtaacaaaaactaaaaacaaaacttaggtctaacaatgaccaaacaattaggtatattcgtgattaaaaacgtgcagggactactttgcaaataaggaaaacttcagggcttctcaaagacttggtagaaaacgaaacttcccttccaagaatcaagttcaagtcaatgagaagtctatttggagttcaagacctctctaaagtcaacttgaagcttatgggggagaatgttgggtaaacttcaattgactaaaggcccagtaatctttaatgaggaggttaaaaatttagataggtctagaatattctattaggtattaggagttatctaatcctaattgtattaggaataggaaaagttgtacccctatataaggatctctttggttgagttgtaaccataagagttgtgtgagaatattgagagagcttggtgcttagttttgagagagtttctaatcatcaataaaagaaagttattcttttaaaagcttgtcttgtgttcttaagaaattttatcaatgcact

SEQ ID NO: 18238 - DNA, 617 bp, Arabidopsis thaliana landsberg
ctgcaggtcgactctagaggatcccccactttcgaggcggagatccttccgcttgcgccgccgtctaagggcagggcggatctcgcgagagtggaaacgaagccgagggtgcagctcctcccccgggcgatgcctgattctgctagagcagtttatttcgaatatgtatgtgtctttcgtggccgccgaggcatgaacacttcgtcgtcgtgatataaagttgtgtctcttttcctcctgtttcgcgtatgcggactcgttcgtcagtagcaggattccttacccaagtaagagttatttttcgcggtaggtgacgagtgaggtatctgtatcccggaggtgtaggaatccctcggctcagtcggccttgcacttacatgcactcttattcgtttctcggggttctgttactgatatagccgggaaacacaaaagtcgctttggtggaagacttttttcgaggaaaattttgacgcagagggggttcccccttctagcccctgagggagggtcgggctttgcgaggcaaggctgacccttccttgatggttagactttatctgcgtatgtaacaaggtgtatgacgacttgaaaacacttaagggtagagcgacata

SEQ ID NO: 18239 - DNA, 551 bp, Arabidopsis thaliana landsberg
  unsure (1)..(551): unsure at all n locations
agaaatgggagtattgagatgcaccttttgctatttgaatttggtaagaagatcgttcgtacacaggccaaagggcctggagagcgggaattccttgtcgattcaaaagatatttacaatgcacttaaacataatactgtaagttcatgatcttttcatatatttcactctataacgattaaaagcatgccattactccattcatgcatatatgtttcctttttgtcgttcaataaatttgaaaatttaacaaatagaacaaaaagcagatcatttaataaacgatgaactgtagatgaatgccatgctaatgaggtttctcttctgtttttccattgatattataatttcagggtactgaaaacgttttatgtatagcattggacatgggtgaaaatgatgaactgcatatacannnnnnnnnnnnnnnnnnnnnnnnttgtctcctttttctgaaatttcacattaaacaaaacaaagatgtaagatggcacttaccggaggactttgactatttgcctctacgctcagatactgagttggaaaaatcc

SEQ ID NO: 18240 - DNA, 1302 bp, Arabidopsis thaliana landsberg
cgtcattacactctcaaaacgaatcgacttaaagaaattgtcagaacctttatctgactatatctgggatctggcttcaggaactcgtcaaagaagtcctcgagacagttgagcttgatgacatcaaagattccgtggtgggacttccgggaataagtggtttatctatagaacaacgcaaaaggctgactatagccgtggagcttgttgctaacccttccatcatatttatggatgaacctaccacagggctggacgcaagagccgccgccattgttatgagagctgtcaaaaatgttgctgagactgggagaacggttgtttgcacgatccaccagccgagcatagatatctttgagacatttgatgaggtaagttgttgaaatcattgatttaaccacatagtctaaactttgatcccccaaacagcttcttattcccttaattgcagctgatcctaatgaaaaatgggggacagcttgtctactatggtcctcctggacagaattcaagtaaggttatcgaatacttcgaggtcagtttgtctacaatactagactagtttcctctcggctgagttttggatttcacaaaataactttaagagtactatatattgacagagcttctctggagttcccaagatccaaaagaattgtaatccagccacttggatcttagatattactagtaaatctgcagagaaaaacttggaatagatttttcacaatcatacaaggattcaactctgtataagagagtgtttatgcaacaatgctcttactttgtgcatgtgagcgtaaaaaccgattgttctcattgctggttgatcggtcttttcttgcaggcagaacaaaatggtggttgagcaactgagttctgcgtctctgggatcagaagctttgaggtttccttcgcaattttcacaaacagcttgggtgcaactaaaggcttgcctttggaaacaacattactcgtattggagaaacccttcacacaatataactcgcatagtcttcatattgctcgattctacgttatgtggccttctcttctggcaaaaagctgaggacatgtaagtctctgctccccatttcgaaatatgattgtatgctactagatagtggaatcacagtttttctttcttagaggtaaagttcgaactaaaatgatcttactagtaaacataatttctcttttcttctgtatcaggtctttttttatagaatattctgttcgtttatggtgggtaaaatttgagtttacctttgcagaaataatcagcaagatctcatcagcata

SEQ ID NO: 18241 - DNA, 2060 bp, Arabidopsis thaliana landsberg
cctatccgatagatggcttcaccattgatctgatccaccgcgattctcccaaatcaccgttctacaatttcgccgaaacctcttcacaacgtatgagaaatgctatccgccgctccgctcgcagtacactccaattcagcaatgatgatgcttcaccaaactcaccacaatcttttatcacttccaaccgcggtgagtatctcatgaacatatccattgggactcccccggtcccgatactagcgattgcggatactggcagcgacttgatttggactcaatgcaatccttgcgaagattgttaccaacagacatctccactctttgatcctaaagaatcttccacatatagaaaggtttcttgctcctcaagccaatgtcgtgccctagaagatgcttcttgttccacagatgaaaacacttgttcttatacgattacatacggtgacaattcatacaccaaaggtgacgttgccgttgacaccgtgacgatgggatctagcggtcgccgccctgtgtcactcagaaacatgatcattggttgcggacacgaaaacactggaacctttgacccggccggctcagggatcatcggactcggaggaggatctacatcgttggtctcacaactcaggaaatccatcaacggtaaattctcctattgtttagtacctttcacctctgaaaccggcctaacgagcaagatcaactttggaacaaacggcattgtctcgggcgatggagttgtgtccacctccatggtcaagaaagatcccgccacatactatttcctaaacctagaagccattagcgtgggaagcaagaaaattcaattcacaggcacaatctttgggaccggagaaggaaacattgttatcgactccggtaccactctaactctattgccatccaatttttactatgagcttgaatctgtcgttgcttctacaatcaaagcagagcgagtgcaagatcccgatggtattctgagtctttgttatagagacagctctagttttaaagttccagacataactgttcatttacgtttgtggcagtgtctgaagatgtgtcttgctttgcatttgctgcaaatgaacaactaaccatttttggaaacttggcgcaaatgaacttccttgttggatacgacactgtttctggaactgtgtcgtttaagaaaacggattgctcccaaatgtagctcactaaaccttcttattcttattatactacccaatttatttcttaagaatagtgtatttttctcctgaagtacatgctacatacctataataaaactggtcttaaatttttagtgtttgtgttagcgtgtagcgactatgtttgcattatcatttttatttaacgtttacaaacacatatatcatgcatagatgttgaagatttaatacttttagaatttatatagagaaagagttattcgagagaaataaaacaaattctaataaaaatagtaaaaatatgatagttaaaaaaaaaaaaaaaagattagactactcaatttgtaagtctaatttcttacgagtgaccatgttgatcttttatgtatcgtttcaacttatgatagttttcgtatggtgtttaatgaaacaattacatccaaactttcaaaatttctgtatttaaggaattcataacttcgcatctatctttaggcaaatggttttaggtgacctctgttagtttatgtgcataaaattggattccaaattcttctaaagtgaaatgggtagtgtgtgccctgacaaacttgaaataagaatctatattctcaagacgcatcgatcatagaattttaaaatcacacatcatgcaaatgtaaagcatccaagagtagtaattagatgctaaaacgaaggagaccaatagagttgcattaagtggttttacacttttatacagtttctgcaatatgattaagtaaaaactgtgtatcctcttctactataaattgtgttttttggtgcctttgacttgaggtgcatctcgatactctgtctctagctttcgtggctggaaccaaaccaaaccgatta

SEQ ID NO: 18242 - DNA, 744 bp, Arabidopsis thaliana landsberg
aacactctatttattatctcggctaatgcaccatcgacattgaagcttagtcctacttcattcttccccgctcgttcacaatcttcaaaaacatccaaagtaaacttgaagacggttttcagataatctggcagactctccccaaggtctggattccatctgcacgtacatactattggatattggtctattgaatggtttaagtaaaaccagaaatttattgtaattacattaagtaaaccagaaccctctcctatataaaatcataaataggttccaaaggtaatcaacatatattgtgagagaaataacagattttattctacttcttcttttcattgaagttctctcaaagactaacacatacgaagatgataagtcactaattaagcttacgtattatatgtatagcatattacctttcgacacaatcaagaagctttgcaacctcaggaacagaaccatatctgtcgcacgtatcatcgacaacggtcaagagtaccaataacttagccaacatgattctgccaaatgaatattgtggctcgaaataataaatcactgcatataaatggcactccaccattctgtctctaaagtaaggtgggagcttagataaaagatcttgatcattccaccatctgcaaaacatatattagagcggccgattgtaattaatccatgaaaacattgttagaagcgactgatacagtaagtagtctacttggtgagaattttcagctc

SEQ ID NO: 18243 - DNA, 2019 bp, Arabidopsis thaliana landsberg
atatctcaaaacctgaggttccccatctttaaatttaaaaatctgattaatatcatgtcctttagcatgatgccatgtaatatatatatatatttttttgataagaatgtaaatatcatataaaatgaaagtttaggagttacaagaagcaaaacctacaaacatggtcccatgccaaaaaaaggaaaaaaacatggaagcataaacctttcgagattcatcgcatcaactaaaccttaagcgatgaggctcttagtaagaagatgaagaaaactcgatctaaagactcccctaagcaagaaagtggcaacaaaaaagagcggtctaaactattgatcgacaaaaaagcgcacaggaagtcctttcaacaatggcccgaaacaaactgagacggagctatacgggcaaaaatcggctggcaatgctttctcactctaccaagctcctgatgaagccatgtaatatttagtaaagtatcagtctaaaacacagcagtaataaatcgaagtacgagccaagaaacataaatcttactgttgatgacattcaagtgacatacttaatgtccaagaactttgggttttaagtgcgcgaagtttcgatatgtttcgaacatattgacgcttttctaacttgctttgctgtttcctttggaatcctgcaggtttcttgatttgcactaaactcggaacataagagcacacaagtgggcaacgtcttttattaaccggttctccgagatcaacttgaccaccatatccagcctctcccatgatgtgaactgtgtcgccgcgatccaaagttttatcaaaaatcatagcaactttcttctcctcgtcgatgaaaaaactaccatatgtcagtgaactcggaatctcatcacccaaatcaacattcactgtcaagaacttgctccacaatacctcattggcctcaatcttaatcgtaatccaaacctcaacaacatcctcgtgacaaactaaagccgcaagcttctcttctctaacacaagctagagtaacaacaccatccaaatcactaaacgacaaaagcagaagcggaccaaacctctcacttgtgaaatcaaaacagattatatgatcagcattgagaaaaaggtcagagttcctttttttagcacaccagtaagtgtttcccttgagagtaacaccacggttaccacaatttatcaaccaatgtggagtagtaacatcaagagtcgtccataaatcagactcaaaatcatagatttcataccacaaaacaacgttgtctcgagggtaatggaattcataatctataaacctcaagatcttgtggttgcgtctcttgttgccgtatcctttagcgtacctgtacatgtcacatccctggggtatttcgaaagaacatcttggtttgatccaccttgtttgtccccaatacgggttccaaacaacaagactaaagttatcatctttcaagatacataacaacaaaccctcacagtgaaaaacttgagatatcttgacttgttctgaatctgaatcgtcgtttagacaaatacgtttacctttaatctctacagaagtatcactgccgaagaaaaagctcactaaatgaagattgtgatccatcaacacgaccatctgagactctccttctcttgctgctgctgctttactaataaagctccgatttttgaataaagagtcccactttttgcaagtcgatctcactgctctcgtagacttcaatggaagtcttgagagtatctcttctaacaaatgggcctgtataccaaatgtttaacggcccattatggctttcttcactgtgttatttttggtcattaaacgactgttctttgtttataagcataaacataaaccacatttaacaatcaaaattgcaatttcaaagaaaaatagagttacttggtggcatggtgggtcagctagtattcgactgacaatgtcagtttctataaccttttcaagagaactaaactacgtttgatttatcaatctttatagcaat

SEQ ID NO: 18244 - DNA, 2352 bp, Arabidopsis thaliana landsberg
  unsure (1)..(2352): unsure at all n locations
acagcaaaacagacaatttatgtatattacagataaacacatttctattgtttgaagtaaaacctctattacaacaggcctggctggtcctccacaagcatcttccttggaacgcacactgttgtagtgttccccatcatggtaagacctgaaagagaaactattaaagtaaaagcaaattcaaaccgataaaagaatcattaacagaaccaagtatacttacagatggatcatgcgggttcgcgtatcttcaaagttgcgtatataccaacgcggtgacatgttctgcaacataaagataccactgctcaaacaaacgtatcgataaaaacgaagcagatgatgagaagaggcattgttattattaccctgtgaatacatatattactgcgagtgacaagagaagctgcttgtaattccatattcccagcccaagttccatcatcgtccatggttttacagtaatcctcaaaaggaacatcatcttcgataaaaggctcgaacatttcacgatttttctgtcaaaagccatcaagtattgtatatacatatagagagacagtttccaaatatcactaagtaatggctgccacttaccactatataaagtacaatcatgttacggtacttgttgtgttcatcctcattgccttctaattgatcagcaattgctctgtgaaagagaatcactattcaatctaacacgattgctttgttcttcaaaaaacaaatcgaattcgatgatcaaagcaaaagacatacctgaagaaacaattaccgtcagcagtcacttggataatcttaagccctaaagcgtcaagctgagcacgaaattgagagagatcacaatcctttccttgcttctttttcaaatcaaccacacaaacaaattacaatattttccacagagcaaaacaggccaatactaatcgaatcagactgatttgggaatacaaaaatcatatattgaagttgagaatcatgaagaaaacctgatgcggttgtttcttaggcttagatttctgttgtttagttttcgccattatcaaatcagatacaaggaagtaatacgaaagctagttgtttgtcgggtagttgcggcggcgcaatgaggacggtttcgtcgccgccgaatctccggtacatgaagaacaaccatgtacgacattattgggcctgatttggcccatcaagaaacaaaactataggcccttcttcaaaatttatacacatcggataattaaaagttctgatcaaaccaaggattaaacacgttacatatttcttaatttgtgtatttataatactgtagttatgattatttatctttttaagaaaataatttcacacacttatctatttatattataagaaatatatatccatgtattgagatatatggtaacggtaagtcggtaacaccagtttaactttaaactttgataatgatccatgtatcgctctgctcgtattctacactaaataaagactgctttataattgttaaatttattgacatacattattactcgtacgtctacatcaacgaaagataaagtcattttttcttcttttttgttaatgatatagtcatactttaacaaaaaaaaaagattaagtcatgctaaatacgaccaatcatagagattctttattcactttcctaacatattcttaaagtttgttgttatacacgtggaaatttcacaaaatgacaaagcaaataatgaaaaacaactcaggccacacagagtcacaaacattattaaagtgtgatgtaacttgtttcttggatcttggtctttttttaattagtgctttcaatatatgtactcatttaaaaacctcacgtaacccaaaacctcactgattaagaaaaaggtaaaacgatggaagaagaattggtggtaatctcgaagagcatagttaatcccagaagccttaagaaaccgacttctgtgaagaagattcagctgactccatgggatctctctcgccttcgttttggttatcttcaaagaggtcttctctttcacaaaattgaagtcaaacaattacaagcttcactctctgttgcacttgatcgtttctatcctttagctggtcgtcttgtgaagctaaagaacgacgacgatactgtctcgtttttcatcagctgcgatggttcaggtgtggagtttgttcacgcagtggctaaaaacatcgagctcagtgatgtccttgagttatccggttctgtccccgggtttttcgcttcctttttccctgcaacggggatcaagaactaccacggtgtcnaagatctctcttatgttcagtgacaagagaagcgggttttatcgtttggtacac

SEQ ID NO: 18245 - DNA, 2060 bp, Arabidopsis thaliana landsberg
  unsure (1)..(2060): unsure at all n locations
aatgaaaaactgtttcgtcacaaaaaaacactcatcaagctcctgtagcatccatcaacatattatgagatattgtgtctctccaattgttagcatattctctttgttgggattccagaattccaacatctccattttcttcatagttgttttcttcattgtcatcgctattctcttcattaatacttgtttcaggaggaaactcatctgatcgacattcttgacgaagaaaattatgtaatccagcgcaagcaagaactagctctgtttgagtcttaaaaggatatggaggtgctgatttaaaaatcagaaaacgggatttgaaaataccaaagattctttcgatgacattcctcaaagaagcatgacgtagattgaacagctcattctgggtttttggatcgcggccttgacctctaaaatcttgaagatgatagctaagaacttgcggtgatttgcatatccacaatcaactagataaaattttcctgtaaattaaaaaatacaagataaattattcttcttaaataaaatatagaagaacttatggatacatagaaaataaataccttctggaacttgtagcctgttagtgttccttgttaaagcatcattaagtacttttgaatcatgtgctgaaccttcccatccactaaggacgtatataaattgtagatcaaagttgcaagcagctagaacattttgtgatatgaaccctttccgattacgaaaactagctgcatcacatgttggtaccattgcaaaaatgtgtgttccatcaatggctccaatgcaatcctatatatattaatagaaatttttatatgctagtcaatctcaataaatagtaacgttatataaataaattaccttgaaataagggtaaaagcttgtactttctcttatctttgcaggtactctaacttcaggtttagccatccaacttggtgcgaggaaagctaatgccttaagtgccttatgaaaatttatgtttgtagaataacttgatctctgaaatgtgtccattgtgtaacagtatcttgagttttggccaacagtgagtaaaaaagtagccaaaatttcctcgacgcatatatatcgtgtatctcttagccatgtcttcactcttacaacatcacaaagtttatgaaacacttctggttccatacgatataactggcggaaatgcgcaggattaactgtaagagcattttggatataattatacccaactcttgagacggatcgacgaacgggacgatcaacaaaagtactcgttgttgcattttccaataacataagcatgatatccaaatctgactcatcatcttctgctttaattttttctctgtcatttaagttctcttcttcgtcaccaatgttctccatgttaaacaccttcaaaagaatatatttgttaaatatgttcggagcacgtagtaagatattaatatgtacatagcacgtagcatcatattagacgtagcacataacatgatattaaaagaagacatcataaaatgacaagtctcgagccatcttaaaaaaagaaagaaagtattattcataaagcaaataaaaaaccaaaaagaaaactaaaacaaaaaaccatgaaacaaatagtgtaatgatgaatgatgataaaaaggcaaacagataaaattcaaaaatatgaaagaaatcatctggagctaaagttactcttgatccaaccaaaacgttcttcnnnnnnnnnnnnnnnnnnnncatccttcattcctaacgaatgaatcatggtaacagctttgtatcggatatgctcatccaaatcaggaatctccttcattgcatcccaaacattggtttttcttttttgagcttccctttcctcaattgcgtgcttcaatgcttcttctcttttttctgcttctttttgatggctttcttctcttttttgtatcacgtcaaggattttattactgactgtgatcattgaatcattgtgatcagttttcgccgcgtcggagttattgcatcctccacccctagttctcttcctaggaagaagctttcagatcgac

SEQ ID NO: 18246 - DNA, 589 bp, Arabidopsis thaliana landsberg
tcgtttatcataaggaagaaaaacgtatttaaatttttgtttctctccctttaaattagtttaacaactgatcaattatttttctttgaaatttggaactgtgtagctattaaataaacaaataaaagctacaaataatactactacaggcacgcgcatttgtatgctctgcaaaacctcaacaatcccaaagaaacacctgtaaatgaaaattagattttcttcctttttgttttacagcaaaaatgaaaactaaatattacacgtagatattagagaacacctgtaaataagtggtccacggctgcgtacgtttgataaatgattcaggtatttggcaagataacggctgattttcgtactatttccatatacgcacttttgctgataatttacacttgtacctttgatgatgacctcactcttgaaagtattctttttgtttcatttgggttggttcacttttgggttacggaatcacagtatgagattagttttacattacttggtaatccgatccaaaaaaaaatcctgaattaatttgatctatgatattaaaactttttgtcaaattggtgtgtctatcagt

SEQ ID NO: 18247 - DNA, 2898 bp, Arabidopsis thaliana landsberg
taattctcgcatgaagtcttgcttgctaaacgttatacctttaaaacttgataaaaaccttgtaaaatgatttggcaaggtatttacaaagtgatacaaaatatttaagatctttgagtaaactgggtaaaatggatcactcatctcagtaaagagttctttttaaaagaaaagcaaacgagcggaaaaacaaattagaagtagtactatacaccattctcattctctggtggtatatgcatgcacatgtgcagcagagtataaaggcttaccaaaatccaatgtttgttgacttcattaattggaagcagaaaccagaaatgcaatcaggttcagatgtgagaaatctattagagacaatcatagaaaatcagagaataaagtatcattcagcaaaagtgttctatatgttcaacgtctctgttcgacacaactattataacaacagtgtggtatcacacctctgttatatcatctctgtttgtaacatcggagactttaatttattggtatcatataattacataattaaataccaactatattagttgctaagtttgtggctgaaacaaagacatcatgctacacttttacatgctaggaaaatgtcttttattgttccagaactattaactatatcaatatgcgcttctggtttaggccacatgtttctaggaacaagaaaagacaatctcttacactgaggtcaggttatccggtttgtggctgaattaacgtgaaacaaaagaagtaatcaaagtgttgttacctatatacaaagacaaaattcaaacatatatctaaatgtttattacacaacataaacaccttatttcgtaagatagttgttgatactagttgaaacttgaaaccacgtccaaacattttgaagcgcacacctttatttcccagcagagacgccacaaaaagcttggagagtagatggagctctacgaccagcttctgtgtgatagaagttaaaaaggtcgacaaaatcaaagggtttgaaggcacgtggatgcttctcgtccacaagttcttttggtgaatctatgatataaccttcttttggatacgaaaacaatgctgctgcgtatctcgtcttctttctctctgttacccttactcggtgatacggtgaagggattctaccattcataagtgcctgccacaacaacaacatcactaggaatatgaaaattactcttcttcttttgtttttttaccaaaaacatgtagagtaaaatatttaggtcattaaatcttgactatgttgtattctaaaattaaagttatctgacaatccttatctaaatactataagttatagatcaacatatgtcatatacaaacagccaaagaccctcagctatataatactagctagaattgaaccttgacaaagaaagaatgttaatattttcacttgccaaattacgtaaagaaaaattagaacttacacatagagcatctcccgcaataacaatgacggtattaggagctggtttaactctgatccacttcccctctttggtcttcacctccaaaccatcaatttgatgctgataaattattccactaaggcttttatcagtatgactaggtaagcccaactccgcatcaacattagcttcaacaccatgcatcaattacagtaaaaataatattagtattagtaacaatatcattaacataattagaatgaacattaacaccaatattatcatcactcatagtataactttttttttttttttaatatttttttttatctaatagtataattaaacattaagattaataccttctttggcaccaacgctagcattcccactaacagcaccaacgacccaagcagtagcatcaccattagcttcagcatcaagatcaccattaacattggtctcaacgttaatatcaacaccaacaccaatattaacactatcattgtcattaacatcatcaccaacatcgacattaactttaacaccaatactagcaccatcatcgttgacattagcatcaccatcggcattatcgttagcaccattatccacattagcaccaacagcagcagttatatcattatcaggccgtgctatatacttcatcaatcgcatacggtaatacgttgagttcaaatgttcatcaatgaagtattctatcccatagctctccagtattaatcttctcaccatcatatccagttctgctaatttctcagcatacagttggatcatcttactgtttttaaccaaaaaataaaattaaaactcgtaaggaaacaatcaaaacgcatgacgtgtgatagaaaaacaaaatgtagaaaaagggtcacttgtccaaggtaacatgctcattaacaagaattcaagaactatgtgttttagtaaattatatacaactaataagattttaggagcaatgtctttccaaaagtagagtattttttttggtaaacttcaaaagtagagttttcacatatacctgatactcttgttaccctcaggccatagttgttgagtaaattcgtgagctttctccaaaatattagcatccttgatcccaaaactctcggagagaccattatgagaaaaatatccagcgaaaggtttcgggcacacatttctttgtttggcctctgtcggtaacgcaaaaagctcttccatggccttcaaaaccgacccctgaagctccattgacacttgatcaattttggcttcgaaacaaccgtagtcttctaaagctttacggacatcactcctcactttaacccattttgagcttcctggttttagggtttggtccgagagacagatgagtggtagttgaggactgcctgaacccattcttctttccctttttggggtaatcgaaaaacgttttggcagatgttag

SEQ ID NO: 18248 - DNA, 2098 bp, Arabidopsis thaliana landsberg
tccaatggtgccaatgccctcataatcttagactcgataaaatatgaacaagacaaaataataaagcggaggtaagaaagaaaaatatgccataaactccaaaattgtattttacaaatacctaacgttctttagattatatggagggtcgctagtatttaaaaggaaaataatagtgataaaagtgctaacttttgtgggaaatggattctaggttgaaaaaaacaggacttttgtaagcaattttcaacttaacaacatcatgcggatgcgcggtacaagtcttctactcttgtggaccatattaatgctttgattagattgatataatactcatgcattataagcttaatgggttggttatttgcgataatcattttgtcttttgcattactatattattactcgattgctacttttttacgttgatcacggaaaattaacggtgcatgcttaagacaattattatccatcatttataatttagatgcaccttttatgtcacgatgaaatctggaaattgtactagtcaggtacatttctaaactcacttttaatcttttatactacggtcactcgtgtctaatttcttaattatggtctggtccgtccactaacgaggttgtggacctaattgcaagtgtctagctagtgatacttaacagatgttacaagaaagaaagaaaaaagtccaaaatgatggtctcctttgcaacttggaaagctataaacaatgacataacagctgacacaatatctccacatgtacgttagagagggtttccataaatcatcactaatcatagtttgaattaacttgacagtccgatccgtacaatgttaaaagtcagtcggaaatatgtagctttgaatctttgtttttaatgtttaggctacagttattgactaattcaaaagatttaccatgaacttttgatcactacatacaataataatgtgcctattgtctatatatgatgtgtctaatgtgtagtaatttgtctactgattagaagtcaaaagttaagaaacgttcaaagaacgtgttaagaccatgaagataataattatgaacaaaaaaaagcaagaccatgaaggttacgttagttacacaaggtacgtcacgtaatcacgtttaagtgtgatagctacgtgaaaaccatgtggcctttatattttttgtatgtaagctcgcaatatcatttcctgcgaagttgccttcctcgtccactaatgacgaatatatacattcatttgaaatttttgtcgtcaatattggtcaataacctaagtatatatatattccatttttattgttattaatacgatattgcacacaatttgtgtattagtagtataaatattatgtattgactgatgaatcatatgtacatcgtggttcaaattaaacagctcgaatacacattatcaaaacgtgctttatccatatttgtcaaatttgtgtcttatccgggggaaataaataattcaatttccaagtctagttaattaaatttcaaaaccttgttaatctccattgatgacccatccgataaccaaataaaatggattgcgaatgaaccaatcatatacgtacagattactttctatgatgaattaagaaaccaattatatcaatgtgtgactaactagtcaaaaatgatcaaacgtgtctcaaaagtatatatttaatgctaggtagtgtgatttaacaattgagagaacaaaaacaaaaaacataccaaatgatagtttcggtttatatccattcggttatcaattcgtatccattcgattatcaattcggttcagatttttatttattcggtttcggtttgtatccattcggttatcagatattttggttataaagtttagtatccattcgattattttgaaattttggttaggtttcggttcggatcctgttctttcggttttaaaatttcgtatccattcggttattttgctttcaaaattttcgtacatttcagttatttttagatatttcagatatttttcggttattttcgattatttttactattatatatatatttcacatatttttaattatttaatatagaaataactaata

SEQ ID NO: 18249 - DNA, 327 bp, Arabidopsis thaliana landsberg
  unsure (1)..(327): unsure at all n locations
ttacggagcaagtaagcgtttcttttttgcaaagtagtattttactaaagattgacccacggtataccgtaggttgatattttcgttagaatgttagagnatttttattttaattaatattatttatatatgaataacatattcaagaggtacaccacgtgtctatatttttattaaataaaaaaattgaatttgtttttaagatgaggtatagatatatgctattgttttttctattttatgtatgaaatcagaattaaacatggcgcaaagagagataggagatcacgagaggagattacagagtaatactacagttgaaagagg

SEQ ID NO: 18250 - DNA, 1167 bp, Arabidopsis thaliana landsberg
atatcactaagaaaacgtgttacctgatggggttgttgactctcaattatgaagccaagtaatcgatggaggtcatcagcagcaaacgaaggagatgctgctcccattagaagttcaataatcaccaaaagttcatcaaccaatgcattaacttcccccacttgacgtgcatccccatctaaagaaaacgtgttcacggagtctttctcttgaattgtccagaaatatcttcgacatccatccagaagtacctgaatggcatcagcattcctcatagctgttgcttcggtgaaaaccatatcttgaagagatgacaacagcttcttttggagtctgtaactgcacacactccatatcttcagatccaacaatagtgtacagaagagctgcactttaagagcatgattgatcttttgagattggcaaagagaaacaatagcagcaactagctcctcatctcctactctatcgtgcttgatatcaaaggatgcaagtgaatgaagaaggtaaccgagaactgtggccagaatttcaggccccctagtacgagataactcttcattgttcccaggatgttgaatagcaaatgagatcattctaaaaataggtgcagccagagaatatgttgtcaaagaagatggaacatttctagaacatggctctagattatctttgtgcacactgcttacggttagaggaagcaaagacatgggtcctccataagctaaggcccagaaggactccactgacttcattctcgttgcaacatggacttgtccaattacctcagctggtcgtctttgagtgccttaatcaagaaaaaataacgaacttccaaagtaagggaaaaccaaataacaaagtgcgaaaactacagcagaaaaagaatatggtgttttctcatctcctaagacacaagataaataaaaacaaagttcatatgaaaatggagaatagtgagaccgagtgaaagcgatatagatagcacaagaacagataaaagtatacaacaaactcaaccaaatgagcatctgaaaacaagtactaataaaacacatcatactagggaatatttttcagacttgtagagccttctcagatatattaaaaatcaagagtataatataagcacctgctgctccagaaagagaagcatctggacagaac

SEQ ID NO: 18251 - DNA, 607 bp, Arabidopsis thaliana landsberg
ggggcccggcacgaactgacctccaactctacggccttctgcccgtccttgcctcacgagttttggcgtgggcgggggcctcctggcagcagcatccgccctgaggtcagtgctgccgctgttcgaccccccggagcagaagtcgtcgtcgtcgccgctgctggagcaggtgacggcgcgccgttcgcggccttccgttgctccgcaggccttccccctcggagtggggttgttcgtacctgcggagggggaaccggagttccgtttgtaatggcatctcgaatgccggtgtgtttgttcattgcggctgtcggggcctgaacatgtatgtaattttggcacggagccgtgttttttcctcatttttgagcactaagtctcgcctgttgattatctgaaccgctttaccaagcatgagtcgccccgtgtcaaggtgacgagtgaggtaccgtatcccggaggcgtaggaatcctcggctcgatcggccttgttgtctggggctctctagcttagttcaagagaccctcggccggtcttcgatgagccgaggccaggggtagcgatacagtatgacagagcggattggccgagatgggactggtggcg

SEQ ID NO: 18252 - DNA, 584 bp, Arabidopsis thaliana landsberg
  unsure (1)..(584): unsure at all n locations
tttctgggtctgaagaatgggtcgacattgagcgagtgctcaataacatctctattaactccgcagagatcattggctgaccatgcaaaaacatccttgttattgaacaaaaaccttatcaaggttttctcctgctcttcggataattgagagcctaacagcaccttctgctctgctatgtcctcacataagagcataggcttcggctgatctgctgaagctgctttctcccttctgaatttgtactgttcacaagcttcagctccatctatgttatggattgcttttgagtcagtccaattgccttcggcccttcttgcagcttcctgacttccatggatagcaatgggtccctgatccgaaggtatcttcatgcaaagataggcaggatgaaggattgcttcgaaggcattgagggtaccacgaccaataattgcattgtaagggtattccatgtcaacaatgtcaaacacaacttgctcagttctagtgttgttgannnnnnnnnnnnnnnnnnnnnnnnnnnnnnnnnnnnnnnnnnnnnnnnnnnnnnnnnnnnnnnnnnnnnnnnnnnnnncacatga

SEQ ID NO: 18253 - DNA, 1355 bp, Arabidopsis thaliana landsberg
taatagtagtaagatggaaatagccgcataaaaccagaataggtatgagtacattcacatgtaattatgtgagtggcaaaagttcgttgatcgtgggttttaagactaagagtgcgtcttatgatcttatctaacaacaaacacttattttagtgaaagcggcttttgtcactttacacaccttttcttctcttccttagggttttacttcaactttcatctttgtaattatatatttattagttccttttttttgtcactttctccagaaatatacgttctagtgttttttacgcaggacatgtttcctctctatttatatatatatatatatatatatatagattcaattcaaaacacgcagtgtgtataatgtcattttattgcttaatatgattgtgcaattttataattgttgatatattgcctctttttcacgtactcaaacataaaaaacatgaagaacggatcactctctaattcccatgcaaaccatgcactggtatacattttacataacatcatctcattaaactattctactctcttattcttcgatttcataggtggtctcagattgcagcacgattgcctggtcggaccgataacgagatcaagaatttctggaactcaacaataaagaaaaggctaaagaagatgtccgatacctccaacttaatcaacaactcatcctcatcacccaacacagcaagcgattcctcttctaattccgcatcttctttggatattaaagacattataggaagcttcatgtccttacaagaacaaggcttcgtcaacccttccttgacccacatacaaaccaacaatccatttccaacgggaaacatgatcagccacccgtgcaatgacgattttaccccttatgtagatggtatctatggagtaaacgcaggggtacaaggggaactctacttcccacctttggaatgtgaagaaggtgattggtacaatgcaaatataaacaaccacttagacgagttgaacactaatggatccggaaacgcacctgagggtatgagaccagtggaagaattttgggaccttgaccagttgatgaacactgaggttccttcgttttacttcaacttcaaacaaagcatatgaatatttttacgtcatcttattcttttttctattgcggtttataatcaagattcttagccacaccacacacacataaatgcaaatatatatacattgttagagagtattttgtatttcgaataatcttttcgtactagggcttgagccttgaggtgccatgtaatgattagtcaatgtaaaacatatatcctataataaataaataaaagaaataataagaacatacc

SEQ ID NO: 18254 - DNA, 2182 bp, Arabidopsis thaliana landsberg
  unsure (1)..(2182): unsure at all n locations
gaacatggggagatgaactttataaatctcattcgagttaatgtgatatggatagaagtcactgaccaattcttagcccatgctccgttcgttctggctacataataaattttactatgtagcctaggatgcaagcgattaagtatgtgaacgttatctattaggaggcaagcataagtgctgtcttcacgtggatctccggtgagcacaccataacggagcatacccttgacatatgggtttccaatggtgagagggggtagttcgnnnnnnnnnnnnnnnnnngggttgtataggaaagtttggtggtctccgcgtaggtttacgtccatggagtcggacataacaacccaacctaatgttgatcccaagaatcttgccccttcaagattttggtcttgcctcctattgtgtaccctctctctcacagggtcgtagaaacgggcctgtccggatcccctttcacggtacaacaaccaaggcctttcctctttgaaacctccttcacggaaagaaggaatcgttttcctccaatgagcgttgatgcttcttagtttcctaccttcgtcaaagttaaggttaagcaaatctgtagattttagtaggagatctgcaggcaaacttccccatgaatccctgcaagagaaacaattttgagacgagtgagatgacagcattaactatatataagaactaacaaataagaaatggaaaaagatgcatctcaaaaatccctccaaaatatgagatgataacaagaaaaataaagaaatgtgatctgatagctgaaactatatatgagttacgacaaaatggaagaaaatattttgctagctacattttcaaaaaaaaaacattgcaagaatgagttaatggaatgataggaagaatataattaaattgtgaaaggaatcatagtgatagcacaaactattgagaaaagaatggaagagggaagtttgtttagatacattttgaagagatcgagcagtcttttagtatttcttgtttgaagagagaaatttcgtttgagaaatataataatgtgtggtgtgggaagatcgaatgaagaaaatacaagttttatagaaaaactgaaccatagctttaagttaaaagtcaggctagtatactaaaacgaatattttcgtcagaaatacattaacacacacaatccactaaaattaacaacaaaatagataacaaaatatgattatgatttcgtgctttcaatctcattagtcattatcaccatggtgacgaactctccagccaccatatttccaagcaatcttatattaagtacttaagcttttttaagacttgatcatagccgtcaatttttaagtttgttacactttctcttctttttccgcgtaccctaagtccatgctggtctcatatccacgttatgaagttaccaaagacggtaataatgttttcaagacgtaaggacacaaaagtgaaggtttaattgggaaatttggaataacaccgtcacaagttaagtttcgtttgacactcacatttaaatctgctttactctatctacaaaatgtttcgtatgaattcttctgatagcctagtcaacatatcattatcattgccagtttgtttcttatttccagaaaaacaaatattttaagtttttagggtccgggaagtaagtttttgtagagttttcaaagcaaataaaaaatgaaaatacatcttttgtataagttttcattttactattttctaaacaaatattttaaagaaatttgaatctctctctttttcgacggtttctaattacagctgcctctaataaaaacagttgaaagaagaattgacactaatgaaaatttcatcttctttataaggcaaaatcatatagtttaaggtaagagtaggaccactagcatgcaatgcttagatatccatttttaagatagggaagacttttatacgatatgtcaagtaccatgtgacgaccaggtggatatagtttctcgactaaaatcaagaagtcggtactgatttcttaatctcaagcgtcttttgttatctatcacgtggacagtttaattattataaattcaaattgctgcatagacgttgccaaattaaactgaacaatatgttaatacacatgtgacatgttctacatatattaacgcagagatgtggaacgaattta

SEQ ID NO: 18255 - DNA, 998 bp, Arabidopsis thaliana landsberg
ggatcgagtagtgcatcgagtaggaggggcgagtagatcaatttgttgcttcatctgaggtttttttgatcgagtaggagggtcgagtaaactgcagcctcctttgtagcatcttggatcgagtaaagaggtcgagtagaatgatgcctcttctgtagctgcctggatcgagtgaatggatcgagtagagtccttttaagctccttttgcacctgaaaacacaccaaaacatgcaatgcgaatgcaaaatgatcctagatgcctaagtatgcaaaacaagctaaaatggtgcaaaatgatatgatacaatgatcaaatgcaaagctaaatgatgataaatatacacctaaaatgagtaaaatacagtgctatcaagtttgcaaagaagattatctgcttgaaaaaccatctattttgattgaggacactatgtcttcgaagacttctagatgatctagtggtgattcattagaagcacctcgaaactttccttgtgaaacaagattataatatgcagggtgaatagcaaagtcttctcttacaaaaggaggtagctggatctctgatcgattggagtagaaaagatcagctctgttgaagtcgcctatggtagctgtctattctgcaaattgtgtcgatcgacaccctaatggtgtcgttcgacactgtcgtcgaaatttgccagcagtttgttacgttccatcttgtagttcccttgtcacaagaaaaagaagcaagaaaacgcgtgagtaacaaaataaagaaaataaacacttaggctaaattctacacttagtctaatggtgaatcacagagaacttcggcaacggcgatataagtcaaattaatcctaagaccactctctcaaataaagaggtcagttgcagcacttagggataaaattcacaaagttctcagatcacgcagtaaactaatgactatcgaattaagctaagtaaaatagtaataaaaataaaaagaaacaaaaagtaagcaat

SEQ ID NO: 18256 - DNA, 2238 bp, Arabidopsis thaliana landsberg
gaaagagcgagcgagaaatcagaggaagtcagaggaaccaaacaagaaagcttttttttttttctcacacttacataattacacctgcgactaaattttttcgagaaaaggaaaagcattggtttttgcatgtacgtatttgaaaaaataaaacactttgaaaaatctataaaaagctttggaatttggtaaatccatgtgaagcccactaattaaggatgcttgtttttgttaaggaaatattagtatcattaagctttggttgaaaactacttgtaaagttgtactagtttaatctttctctagaagttacccccttcataagtttgtcgtttatttttttggttgtcaactaggattgtcgatctgatttattgaaaatattctcaactgaagtgatcattatttcttcctctgattgtttaaagaaatttagggaattgtcactttatcctttaggaacctacctttgtctcacaaaagactccatttgttttcaatggtaatcatgagatggttaatgatatgatatcaatgatatgatatgatatgatatgatatgatatcatataatactaacaaaagaaattatctaagaaatgatgttattaaatcgtaagattgtgaaacgtttatagcgatgaactgaaaaattgttttaataaaagaacaaaagttggcggttaaattgtttgatactcaaatttcgataatcttgaaatattaatagtgtgctttcatttggagatacaacttttactactgttagctgttgtggtaaatatccaaaaaaaaatccgatacgagtgttgttggattggatccaacgatttcgttattatgctttgtgcttccttgaaaaagtaatttgatttcttatatcttaaaagttataataagcaaattttacttaattgtttttcaaagtcatagtagctctacactcttgtaactacaaaatgatatggcatactgcatttgtgaaaatatgaaagatatagagacaaagcaataatgttcacaaaaaaaaaaaaagacaaagcaataatataaaaggtgatttaaaaatctatacaggaaccatcaaataattaagaatctatacatgaaaaccatttatttaggtatctcttttcaactaaaatctatatgacaaatatacccctacaaagagatatgataaaaatcaggatagttaccagataacgcattatcgagataagatcgttagcgaaatatggatggggtttgatgcatggatgaaatgacatgctatacaaatcaacttaatatgttaataatatatttgacgatataagcaaatttttagttattgaactaatgtttagatttcaaagacacatatatatgcgaaaacggtaacattattattaaaagataacaaaatatttatcatgaagaccaaaaaaattgacttgcgactgaataatcatatagaaaaaatacatacatcagaatagttagcagataacgtattatcgggataatattgttagcgaaatatggatagaattttgatatacggatgaaaaacttagggtacaaacctacttaacatgttaataatacaattgacgatataaacaaattatcagctatcgaaccaacgatttgatttcaaagattgtataattatgggaagatgataacatcattattaaaaggtaacaaaatatttatacgtcaagagcaaatatggtatagggatataagaatattttcatgatagagaaaaaagattcaacagtagttttttctgatactaattttgtaattttatatgtatatagaatgcaatttccctaatataaacaaaaaaccaaacacatagtactagttttgtttcacaaagcacaacgcaacattttcgtctaggagtttcacgaatgagtagctgacacgtggctgaataccgaccatcgatagtagattacaaaaatatccctaacatctccttctccgccgtgtcaatcgcaaacaatcgaatccggatccgatccgattcgcctcaacaccatcattatttatctgtttcccccttttcccaagctctaacatttagggtttcgcgaaaaatcaatcaggtgaaaaatacatcgattattgtaaaattgatacataaattcacattcaaaagccaagagctgagaaattattttttgtaaactggttgtcctttcgagagagtccatgaacgctagtcttcatggatacatc

SEQ ID NO: 18257 - DNA, 568 bp, Arabidopsis thaliana landsberg
  unsure (1)..(568): unsure at all n locations
ttttgaaaaagtagttgggattggaaaaaaatagtattattacatttatatggtaatatataatttaaatactaactatttttcttttatcatcagatattatttacgatttaaacgaactaaaattgtagaaaattgtttacataagtgcataaattatttgtgtcaaatatctgttttgacattttcattacgagagattaaaaataaagaaaagaatttctcgtcggtttgaaactcaaccaaatactaactattcgaatatctataaacttttatttgttcgtgaataaatatataaaattaattgtgaatgctttatattaatgttctgttcttacaataatgaaaagtatctagagttattacagctcgaaataaatatactatatatctatacatatatatatatatatatatactatagtgttggcccgatccaatgtctttggaaccgtgttgcaattattttcacactacanataaatttcttttaattattaagaatcccaccacaaacatatactacttcttgagtttcggatcaacactacatataaattatact

SEQ ID NO: 18258 - DNA, 606 bp, Arabidopsis thaliana landsberg
  unsure (1)..(606): unsure at all n locations
ttttatggattgtctttgaatttgaacggttttccatcatgttaccgttttcagtaaaatttagtattgaaaaaaaacctttgaaaaaacaagacagcatgaaagatatgaagtcaactttctttctactcctcttcttgataagtttaaatttgattaaaaagcttttcttgaatcatcaacatgcataaagtgttataatacaaaaccgacctnnnnnnnnnnnnnnnnnnnnnnnnnnnnnnnnnnnnnnnnnnnnnnnnnnnnnnnnnnnnnnnnnnnggtaggtcggatcataaaagtttaaagctttttttcatttcgtttcaaagtgcttagacaagagtataactataaactcgtttttctatgagaaatgcatagctattgactgtattatcagaaatgagtgggaaatctcgaagtaattttcactatattttaaatcgttcaacggtaaaccctcattttcgtatatttacaagatttatgcaagtatttttctaatataatgtttatataaattcaaactttgtttacaaatttggtatagagaccactatgaatatgctaacttaatacaaatcattgtgttcatagaatatt

SEQ ID NO: 18259 - DNA, 3761 bp, Arabidopsis thaliana landsberg
catagaaccattctgtcatccagccgctgggccatcttttccgaaaagttggcacggggcagcttgatccagaccgagaaacaaaattgtagcagccaaagttattgtgatactgttccttaccccaaggtattgtctcgtatgataattcgtgcatattgcagaaactttttgcatcaggcttcagaccttggcttcgcacggcccacacaaagatattcagccttatgattgcctcgggggtaagttggtgaagatagacttcaaaaatcttcagcacctccacgacgaagctgctcaagggcaatcgcagcccagccttcaaaaagcttcggaacactacgacttcattctcttcggggtgtggacaagtcttttccccttcgtcggccctcacaacggacaaatcccggaaataccttcctctcatgttaacaagatgattctctttgatagttgatttaccataaactgaatggcttggtcgccagggcgatcttcggagtcttcaccgccactatctacatcaaaactgtcactgtcaccagtatcttcagacaagccttccagaatttccttggtgattttttctgtattggtcttcgacatcgctataagaaaccccaggtttttctcctcatcaagagacagtttcgtctcagtaacagcttccttgtctccagacatcttcggaaacactaaaaaactattttcaatgccgaagctttaaaactaaagactcagggaatcttagcgcgcaaaagctaaaaatcgagcgagcgagagcaagtggcaagagagcgtaccaaatgagctcgtggtatgctcttatttatacgttcgatgcggtaaaaattgaaaggtcccgcctgtcagtgaatgttgctattctagcaaagggaaggtgttttttcggaccttcggcttaaagccttcgtccatgtcgcaatctaaatttattattttaacaaattaatattgcgaggggctactgttggggaccttcggcatacgaaggtcctcaaaaacaggatttaacagtatttctgtagtacaatgtgtgaacaggtatcctcggactaaagtcggcattgctgtagaccggcataatacgaaggttgacacacatccgaaggtgcgagcaagaaagcttctgcgtgacagcaatgagtggaaccgacttaaagatgaaaagccgaaccagaccttgaagaattactatagagttattggtaaatgtaaagggcatgaatgtaatcttgcatgggctgcgacccgtgcctataaataggtgaacagtattcccgtactgttcacgggaattttgggcattggcttttgcgtcatacttgtactttcatccccttcaagttaaaggtacatgctgtaatcttatcgattacttctgtttgtacatgataataaaacataattgtttatgttgttcattatattccttatagttcatccttcatcattatataatgtatttatgaaggtatgcccttcataaccttcgtccgaaaatcattatatcctgagaggaataatgcttcgaaggacgaaggactttaccgattaacattttctatgttgccttgttcctgactcatagcattcaagaacaagtctccatcaccggatttgttagtaagcacatatgatgcatcaaaagttttgaatgaaatgtcatgatcgtttgatgcaccaggagttttcttcttaggcaacttagcacgggttggttgcctagaactagatgtctcacccttatacataatagcataattagggccagagtgagacttcctagaatgaattctcctaattttgctctcgggataactggcagggtacaaaatgtaaccctcgttatcttgaggcatgggagccttgcccttaacaaagttagacaagtttttaggaggggcattaagtttgacattgtctcccctttggaaaccaatgccatccttgatgccagggcgtctcccattatagagcatacttctagcaaatttaaacttttcattttctaagttatgctcggcaattttagcatctaatattgctatatgatcattttgttgtttaattaaagccatgtgatcatgaatatcattaacatcagcatctctacatctagtacaaatagaagtgtgctcaacggtagatgtagagggtttgcaagattttaattctacaaccttagcatgcaacatatcattcttggttctaaggtcagaaatggtagtattgcaaacatcaaaatctttagccttagcaattaacttttcattctcaattttaaggctagtaagagattcattcaattccttaatcttagcaagcaaatcatcattattattcctaagattggaaattgaagcatcacaaacatgagaatcaaccttagcaattaatttagcattttcatttctaaggttgttaatggtttcatggcaagtgcttagctcactagacaattttccacatttttcaacttctagagcataagcatttttaaccttaataaggaagtcctcttgagaatccaagagatcatccttctcatgaatagcactaatcaattcatttaatttttccttttgttccatgttaagattggcaaaaagaacgcgcaagttatcctcctcattgctagcatcatcctcatcactagaggtttcatatttagtggaggatcttgattttaccttcttccttttgccgtcctttgccatgaggacttgtggctgacgtttgggaagagaagtcccttggtgacggtgatgtttgcggcgtcctcgtcggaggaggagtcggtggagctctcgtcggagtcccactcctggcaaacatgggcatcaccgcccttcttcttgtagtatctctttttctcctttcttctccccttcttgtcgtcgcccctgtcactatcactagataatggacattttgcgataaaatgaccgggcttaccacatttgtagcacactttcttggagcgggatttgtagtcctttcccctcctttgtttgaggatttggcggaacgtcttgatgacgagcgccatttcctcattgtcgagctttgaggcatcgattggttgtctacttgatgtagactcctccttctcctctgttgctttgaatgcaaccggttgtgcttcggatgtggagggatcactagctcattgattttctttgagccgttgatcatgcattcaaagctcacaaaattcccgataacttcctcggggtcattttggtatatctaggattaccacggattaattgaacttgagtagggttaaggaaaataagtgatcttagaataaccttaaccacctcgtggtcatcccactttacgctcccgaggttgcgcgcttggttcaccaaggttttgagccgattgtacatgtgttgtggctcctcccctttgcgaagccggaaccgaccgagctccccctcaatcgtttcccgcttggtgatcttggtgagctcatcaccttcatgcgcggtcttgagtaaatcccaaatctccttggcgctcttcaacccttgtactttgttatactcctctctacttagagaggcgaggagtattgttgtagcttgagagttgaagtgctcgatttgggccacctcatcctcatcataatcctcatcccctacggatggtacctgcgcaccaaactcaacaacatcccatatgcttttgtggagcgaggttagatgaaatcgcattaaatcgctcca

SEQ ID NO: 18260 - DNA, 497 bp, Arabidopsis thaliana landsberg
gcaggtcgactctagaggatccccccttgctcaccaaaatggagttggtggaaggcgagcttggacggttcgcgatgataaggggcgaggagcgacacaaacatacaactggctcaagacccttatcaacaagataaggagctacgggagcacgcgatggacggaccacgacgtcgtccgcctaatgctaaggtcatttaccgttcttgatcctcatttggtgaacaatattcgtgaaaatcccaggtacaccaagatgtcgcccgaagaagttcttgggaaattcgttagcgggcgaatgatgatcaaggaggcgaggtacgtggacgacgccttgaatggtccgatcaacgagccgcaaccccttgctctcaaggcaacacgaagcaaggaggcgctacctagcaaggtggcacagattgaggcggccggacttaatgatgaagagatggctctcatcatcaaaagattcaagacggtgcttaaaggtcgcaagg

SEQ ID NO: 18261 - DNA, 4964 bp, Arabidopsis thaliana landsberg
  unsure (1)..(4964): unsure at all n locations
atcagagaatgggccagggaagctgatgaatgtgagtacctgaaacacgcaaacagagaaaaagacacattgtcagtaaccttgtaacaaaagaacttaatcttaacgtttccgaaaatctcaaatatagcaaagaaaatacccaattggcaacggcgccaaattgataataggtttttaagttaattaatcctaaagcactatcatgtcgttgtagtacttagggtgtcaatccaaatgggtgtgatgcaaacagatgagatgtgatcagaagtcactaagtcaagcaaagcaataacagttttggggtttctaacagtcctaagcgaacatgcaaaaaacagacacaataacagaattaccaaattaggaagagagtactcaggacaaaacacataacaaaaacaaaataaaaataggagatggtataatacaatggtgaagtgaggagcttacctcagttgaagaacgagcggatgtattcgtcaatagctgcttgtgattgctattaggccagaaactccctgttgtgtctcatctccgccctgtgggtacttgacctcatctcctttgtggcggtcagcaccgccacgagtatactcgacctctcttcttctgctacggccaacaccgctttgtggatactcgacctctctcttatactgcggctagcaccgcggtcgagtgatctctcctagcgtggagaagccaaaacaaggtcgagtgtctttgattgctctatggtcgagtgtactgctgtaccctcagagccagaatccacttcgcttagctcttcatacttatatcctaaaaacactaacaaaatgcatcaaaaacaacaagaaaagaaaaagatatttacagggatagtcatgggacttcctcccaagtgagcttttttaaagtcattagcttgactttcgtactcatttcaagctgtttgaggttcctgaaggtggactgttgatccctcgggaatgacgctgtccgctaggtacttcttgagtctttgcccattaactttaaactcattaccctctcttgaaactatctcaactgcaccaaagggtagtacctctttaatagtgaaagggcctgaccatcttgatntgagttttcccggaaatagtctaaaccttgagttgaatagtagcacttgatcaccagctttaaaatccttaggcagaatcttcttgtcatgaaaagctttagtcctttctttgtagatcttggagctctcatatgattctaaccttatttcttcaagctcatgaagatctaaagaccttttttcttgtgctgcccctatgtcaagatttagaagcttggttgcccacatggctctatattctacttcaacagggagatgacagcacttaccataaagaagctgaaaagggttctccctattggggttttaaatgctgtcctataggcccaaagggtgtcatcaagcttagttgaccaatctcgccttgatatgcttacaactttagctaggatagccttgatcagcttgttactaacctcgacttgtccactattctgagggtgatagggagtagctaccttgtgcttaaccccattcttcctcaaaaggttctcaaaaaccttgttgataaaatgtgagcccccatcgcttatcactacccttggaataccaaatcttgggaaaatgatggttttaaaaagttttaaaaccaccttggagtcatttgttgggctagctattgcttccacccattttgacacataatccacagctaccaagatgtacttgtttccatatgaagctggctcgaaaggtcccataaagtcgattccccatacatcaaaaatctccatttccaagattgggttctgaggcatctcatttctcctagagatgttaccaactcgctggcatcgatcacatcttgttatgtgctcatgtgcatctttaaacatagaaggccaccataatcccgcttgtagaaccttctgaactgtcttgaaagtagcaaagtgacctccataaggtgaattgtgacaaagctctaacactccctgaacttcctcttcagcaatacatcttctaaacaaaccatctactcccttcttatataagaatggctcatcccaatagtagtgattaatgtctctgaaaaactttttcttctggtaggagcttaactcactagggactattccagcagttaagtagttaacaagatccacataccaaggcaattttccactccttgtagaattccttggaaaaatccttgatgaatctcctgtagaatcccgcatgtcccaagaaactcctaatatccttaaccgtcttaggcggttgcaactgaaccataacatcgaccttggctttatcaacctcaatcccctttcctgagattttatgccccaagcactattccttcttggaccatgaagtggcatttctcccagttgagtacaagattggtttcctcacacctttctagaaccatgaacaaatttaacaaacatgaggagaaagaggacccatacacggaaaaatcgtccatgaatacctcaaccgtctcctctatcaaatcggagaaaatagaagtcatacaccgctgaaagtagtaggtgcattgcaaagcccaaaaggcattcgcttgtaggcaacagtctcataaggacaagtgaaggtagttttttcttgatcgtttgggtggataggaatttgaaagaatccactatatccatcaagaaaacaatagtagggatagtttgctaatctttctagcatttgatcaatgaagggtaaagggaaatgatcttttctagaggctgcattaagcttcctatagtcgatacacatcctatgtcccgttatggtcctaatgggtatcagttcatcatgatcattttttatgactgtcattccccccttcttaggaacacaatggactagatatacccaggtgctatcagatataggatagattatatcagcatcaagcaatttaagtatctctttctttaccacttctttcaggtttgggtttaatcttctttgtagttcaatactagaataagattcgttttctaaatgaattctatgagtacatagggtgggtgaaattcccttgatatcatctagtgaatatcctatagctctcctatattttttagttcagataatagcaggttcacttgatcggtttttggctcatcactaatgacaacagggtaagtagagtttggaccaaggaaaacgtaccttaacctttttggcagcggtttgagatcaacctttggtgccttgagttcggaccagtcatctgaagttggaatgatgggctccctaggttcgtcggtagacaaggtcgagtggttgcttgagtagctcggtcgagtggacaggttgaactcgagttgacccttcttcgctcattaccattacctcttttgctggtccattcaattcctcaaagggttctggattcttccatcgctttatgggagtctaacagcttttggtatcccaatgtttccaattgcagaaacccatctccaccacttttggttaaagcactgttaagatgatcttcttctacaagctcttccagtaactcatcagctaactgatccatttcttcgatccaaaagagttgcccttctattgtaggcttctttatcgcgtctttgacatcaaaggtcattctaaagtcgttgccaaggtttagatgaatcttctctttcttgacgtcaatcatagctcctgcagttgctaagaaaggtctccccagaatcaaagggtccttaggctcttcatctatctccaggactacaaagtcagttggtatctctacggctccaatcccgattggtaggttttcgagtaaaccatgagggatccttattgacctattagtaagaattagggatatattgcaggatttgtattgagtgaaccccaatcttttggtgaaagagagcggcatgagactgactgaagctcctaaatcacataggcatctgttgaaagccaatggacctaaagagcatggtagagtgaatgaaccaggatcactaagcttcttaggaatgatcttcttttgtatgatagcactgcattcatgactcaataccaccatcccttgcacttcttgaattctctccacgatcaagtctttcagaaacttgtgagaatccaggattagtgctagagcgtcaacaagaggtatccgcaactcaacctctttgatgttcttggcaaacatagctctatatttgtctgccaacgctttcttgtgacgcccaggaaatggaagctgcggtttgtagggaggagggacaaagaccttttctttgtttttgacagcaactggttttggagcagttggtgatgctgctgggatgacaggtcgggtggttggtcgagtaaccctgtcgagtggtagatcgagtggttgctcgagtgactggtcgagtggttgctcgagtgactggtcgagtggttgctcgagtgactggtcgagtggtttgtcagcttgatctttctcaagacttaaatcctccccatcttgatcttcactgtcctcagtgaccgtctttggttcctccctagttggaagtgcttttccactacgcaaggtgatagcatgagcatattcttttggattctgaactgctttgcccggtagttggcttgtctgtttttgagctgaagaagatgcagaatgtccctctaagtaacggactttggtattcagtgtttccatcttgacattgagatcattgtagctacagtccagcttgttatgtaactcagatatcttctttgccatctccatggagccagaggcttgcccgtgaagcagctgttgtagcatttgtttcatatcagcgtcaggagcagcacgaccttggttttgctgaggtgcaaacacaggaagtggtggttgctggtagttcccctcgaattgctgcttagg

SEQ ID NO: 18262 - DNA, 1742 bp, Arabidopsis thaliana landsberg
caaaataaaaatcaatgttgttttttataacaaaagaaacgggccaaaatattgataagaaattggagaaaaggtggtttaatattcttggttactatttagatttatcatgcaaataacccttttgggcattcgataaactacatataatggtttgactcagtatctaatattttttaataaagaaatatttttttctagataattagtttttaaagctgtgaatagtatctttttgggtgactcaatcgaataaagaaatatttttgggtgaccaaaaccgcatcgtagcagtgctgtaatagtatcaaaatctctatatatacatatatatatttatatattttcgatactatttgaaccgcatcacacttctcccgcaccgcaaaacgcagtcaccattcggagctttagattacgaaagaaaaacacgaatccacaaagtttgaccaatacttcggaaaatatggaagaaaaaactaatagacagataccacgaggatggaaatgctacttaaacaatattgcaatctatgctttggaaaacttttataaagcatattaaattagtctgcgtttttggcttttttacttgatttttatattcgatcaaatgatgctatataaaagattgcaagtaataacacgttactaaagatacatatatcaactttaaaatgatagcagtacaaaactaacagtaattttcttaccaccttatttataccgcttcattttatcgcaacaatcatttgcgttataggctaaaatgatacaacgtcaccactcaccaatcgagactaatatttcaacgtcaaattgttatatcttcataggctaatatattaatagaggagaggaaatgtcatagtaagtcgaagtgtataggaccccacgaaatgtgatttgtcggactgcacaggacaggccaaatgttctagtcggttgcatcaatcagttttgggtaagtaatagtattatttgattttcggttccctgaattttttggaaaacgataatacacaattctactagagacacatatgggtatgtggtctactcgttttgcatcttattattccgatccaaatggctcaaaattatgcgttaaaaatatgtttgtggtaaaaattttggaagaaagcagaggacattaaacagaaactcatactagtcttttgatttttttttataaaatataatcttgttatttaagttattcctggttgttaaacacgcttaaattcacaatggtccaaagttattttttaatctaagatgaatcattcaactaataaaacaagatgaattgatttgcataatataatgtttgagccggaaaatgtaatttagcatgggtctaccttatgtctttcttggttttctattgtaaaatcgttgtctaaccatcttataatatcttaaaaactgttgttttacaaattacaacaaatctttttttccgtattatcaatctctagacaatgcgggtcaattatcttactatttatgcgtttatattacaaaaattgcacctgaaaataaggaattgatttagaagcctccaaatgatttggtgccattccaaattaattaagaaggcatcataccatgagtcagttaactggatccaacccgcttgaaaaggaagaatcggccgccaataaaatgagaccgaatcttttatcatgctggattatgaatgtatcccacgtaattgagccaaaactaatcataaatag

SEQ ID NO: 18263 - DNA, 2161 bp, Arabidopsis thaliana landsberg
acgttgtttgggatccactcaacgaagtaagacgagttcttgttctgtatgtttaggatttgctcgtcgacttcttttgtgctcatctgtcctctgaaaatagcagaggctgtgaggtaacgtccgtgacgtggatcagctgcacacatcatgtttttggagtcccacatttgttgagtcagctcaggaacggtgagtgagatgtattgttgcgagccacgggaagtgaggggcgcaaaacccaccatgaagaaatggagtcgtgggaaaggaataaggttcaccgcgagttttttaaggtcagagtttagttgaccagggaaccgaagacagcatgtaacaccactcattgtagctgagatgagatggttaaggtcaccaactaagatacaccaccacataagaaagaagaacaatgtcaggattttcaaaactacaatcacatgaatattagaaaacaagagaataaatggtttgtaaatctcacatgtaggattagcaagcttcaaggtacggaaacagatatcgtaaagagcttcgttatccaaaaccatacattcatcagcattctcaacgagctggtgaacggaaagagtagcattgtatggctcaacaactgtatcagagaccttaggagatgggaaaaccgaaaaggtcatcatcatacgatctggatattcctctctaatcttagaaataagaagtgttcccatgccagaaccagttcctcctcccaaagaatgacaaacttgaaaacctgctcaacaaatgaatcatccatcagagaatgaaatcgagaacatcaaacgctaaacgaagcatctacaaaagagtttctaatagcagatctggattcaaatgtatacaggaacaggaaacctgacaaatcaaaacacaaacgagattcagaaaatgaaagcgtatctctctcaccttgaagacaatcacagttctcagcttccttcctcacaacatcaagcacagaatcaatcaactcagctccctccgtgtaatgacctttcgcccagttattcccagcaccagactgaccaaaaacgaagttatcaggccggaaaatctgaccaaacggcccagatctgagagaatccatagttccaggctccagatccataagaacagcacgaggaacgtatttgcctccgctagcttcgttaaaatagacattgatcctttcaagctgtagatctgtatcgccacatgactgaccggtttgatcaataccgtgctcgccgcaaataacttcccagaacttagctccgatctggtttccgcactgacctccttgaatatgaagaatttctctcattttcactcggatgttttttttttgttctttctttctctcgggaatcgcttttagtctattttctcgagaaaatgatgagaaaatttggcgactccctctgtttattgtttatgattgaggggtataaaaacaaatgagagtagtaatcggctatatatagtttacctccttttttctctagtttctcaaataatttgcattttcgtccttagacttctattggtttttgatattaccctgatagtttttcgatttggtttcctttatgtgctgttatacagcgaatcaaaaacaaatatctttccttagatatttttgttaattaattataaaatatttacaaaatcactcgtgaaagttatataaaggcaaattgttttctacgcttttttatattattgattagatccttttttcttcggatattgaaattaaagaccaaaagattcgaatttgcgtcattagtggattttcctttgttgtttttcacaccaatcataggcaattttacttatttagcaaatcaccaaattaattagataagctgacaatagaaattagaagtaaatggcttacaggcaaataacaactcataaatatgacgattttagaatagttaatccgttgcataaatatcaattttcaagtgaaaaaatattactatatgtcctgcttctaagtttattatatggatcaacggttcaaacaaaaccaaaatctatcaggaaggttttttagcatcttactataggcaccaattgttgataggtttaaccatagcataaaatggttcaaattatctttagacaaattttaaaaaggtaaggatcttaa

SEQ ID NO: 18264 - DNA, 633 bp, Arabidopsis thaliana landsberg
ttcgatatgcattttagtggtgcttctaagttatatgttagcaaaaaacaataatagagtaattgtacaatcccataagtaagatatctttatgtgaattgtttcattgtttagttttcttttcgtatttcagttataaacaagagaatttcttgtttgggaaacgtaattcatttgtaacaaactcatttgattgacaaaaccatatgacctgttgatgaattttgctaactattgttctcatttccgaagtagccttaattatttttggtttctttcacttactaggctttgttaggttcttagagttgtccttctgctggttcttcagagtgatccttttctaatccgttctattttattttagctgtagtttagtggttacacctaatcttctgctggtttgtgaactttgttttgttcactctgtggtattttgtcagtttcatttgcaacttgattttcttttgtggagatgaaaaagatacttcagattttgacttgtttaaaaaaaataatatctgcatatagttataatttccttttcctatatctattgctgccatatctaagatgagtttatctgtttgtgttacaggatttggaagacagtttaacatctaaatcgatagc

SEQ ID NO: 18265 - DNA, 653 bp, Arabidopsis thaliana landsberg
  unsure (1)..(653): unsure at all n locations
acaaaaattggaatacatattagcgatgatggtctacactaattcaagtgttaatagtactatgatcttaattgtttgtggaatacgacgtcgctgacatctcactccccgtagtctcctccatcaccattgatcttacattcggaacctcatgagtcaacgctccagtcaagttgttgaagtagttattctcattgttgctcagaaacagagcatcccctgttccattgtttctcagaaacagagcatcccctgttccgtggtttctggctgtattgtacgtgactccgagcatctgagacgcgaagtaagaagcagctgattctgtgaagcttgtaggttcgttcactggagaaggaataaggctttgtcttgttgatatgtggctgagaacgtctgatgaagctaagagagttgncgtgttgctgtgtgactgttgattgctgtcaggaatcgttggacaaacccaagattgtgggattgatatttgtgaggatactgcattcgtcttcttaaatattctacatatcgnccaagcatcctacaaaatgaagaaaagatcgattctaatttgtttggtcacctaacctttngtgcgggtaaagcangttagggcaaatccgataacttacgttcgaagggaagctcctgct

SEQ ID NO: 18266 - DNA, 573 bp, Arabidopsis thaliana landsberg
agagttcctcacaaggtatatacttaacccaaaatgtttattatgttatcttagactcttagacagagttaatcatctataattgtggattaatcttgttttgtatccagctctgggacatcagctggtgaaaggaagttgatgccaaccattgatgaagacatggaccgacgtcagcttttatacagtcttctcatgcctgtgatgaatctgtaagttacagttatttaatttgcaattaacttctattttgtagtaatatctacgtgccaagattaatacgttaaaattggaaaaattatgaattaatctaatttatattaaaattttagcaaaaatattttaaatcttagcaaaaatattttaaatctgaactttggactctacattctaaatttaaaacgtgaagactaaatgctgaggtttaaaccataaatcagaaaccttaaaccctaattcttgaaatttaaaaaattaacactaaaatataaaccaaatcatatatatttacttaatttcaaaagatctaattaacatgtgtttttctttagttcatattttgtcagatttttt

SEQ ID NO: 18267 - DNA, 584 bp, Arabidopsis thaliana landsberg
atcgggaacaatattatataaagtataatttaccaataatatttttttatttaaaatacatactaccaaaatcttatttctacaactaatttatttaaataattatattatatcaataaaatatacatcctaattttataacaataaaccctacgactacagtcatcacacctacatcaaaaaatttacagtaataaatctataactacataccgacgaaccaagcacccacttaacatcattgctttttgttagtatcatttcttaaaacgtttgtatagatattgctaggtgtcactttgaaacgattagaaaatatatagtttgtttcataatttgaaattgacgttaattattataatattaagtatagttttttctttaatgctgtgaataataatgggagatttatgtggggcagtggaatcggtatttgtatttataatcgagataatattttaggaaccaatttggaaaatgataaacaatttatattcttgagttcttctgcgttcaaaataaaccggcaattacgacttgtggtttgtttccacttttttttattgtttttgggggggacagag

SEQ ID NO: 18268 - DNA, 274 bp, Arabidopsis thaliana landsberg
gcaccatcggaacaatcgaaagaagtccttacgggataagtattgtttcgtctgaccaactatctggttgttttggagatagtcatgagcaagtggtcggggaaccgatgggtgagtgaagaggaccgaggatttgggtgactgtgattaatgtattgatatgttgagggaacgcgtaaacccatcgttgttacggttctacgagatgatcaccgtttgtaacggtaatggtccttcgagtgcgtgggaatgtgtttccattcccttacttagg

SEQ ID NO: 18269 - DNA, 402 bp, Arabidopsis thaliana landsberg
ataacgcgtttccggtggcaatcgactgataacaggagaaagagaacgaaaagttatcgtaacagaaaacgataaacgtgacaaagtaaataaaaagatagacgtacctgaacctccttacaagcccaagtctggtagagattcttcgctataggggattcaaccggagggttctcacgagacgacccgttaacttttctagcaaactcaccgcaataactcctactgtccgagaacggataacccttcctatcatagttgaatgaaaaggaatgatctacctcccgaatatcctgagttgagcctctttcacggacgacgggaaaagaatctcttgaactacctccgcgagaaaccttactgcgcggtgaagcatgaacactcaacggctcacggaaaata

SEQ ID NO: 18270 - DNA, 807 bp, Arabidopsis thaliana landsberg
gacatgcccattggaggacgcctgacttgagtgtacgagacacattgaagtaactcaacaacacatctaacctattttgaaggaggagctcaaattggtttttacataggcgcttacacattgttatataggagcctaggaacaatctagaaactagggcaaccttatctagagtagacagctgtattgtagcctagtcatcacatccagactgtagaacattgaacctatcttgaaggaggagcgcctctgcttttggtttaacgtttgttgcttcttttgcaggtacaacaggttttgtcatcttctgtggattgctgatggactctacgcttgggcttttatcttcttgtcccaatgtagttgagttgttctaaatcgttaacatcaagatcctctatgtggtttacaaaggtgcgaacactacaagtttctgccttaaacgcttcaccaaaaccttggatttctacacgttggagagtgttcgattcgggattgaagtagaaaacataaaacggttgtttagatgtgtacttgcgtatcgaaaacactatttcacccgaaacagtggctccagcaatggaaaggtgacgacggaagaatgtatcatcggtccaagtgtaggcatatttagaccattcctgattctcaacatcctctagaacccacacatgcaactcgttagtggcatcaacatcgagattttcctccaaatacttatcaagattcctcccccccatatgattaatctcataaataaagaaaaatcctcccaataaatcatagctaatttgcccttgtagttta

SEQ ID NO: 18271 - DNA, 2858 bp, Arabidopsis thaliana landsberg
  unsure (1)..(2858): unsure at all n locations
ctcctgataatgatttcgctgaaaagatcaggtaattctcaatcaaagctttgaaggttctgtctccattttaaggataccattaatggttcgaagcaacttagtagtattgggaatttgggaacctatagtatatagtatatggatttctaattctttctcttgtttgaatcttgcagacgattacatcggatgaaataaaagaaactacagctaacatgtgagagagctggttcttccatcttcatcacctctgttctttaggtaaaaaaaaagagagatatgtctcgccccaaatgcagtcttgaacattgataccccgagcatcttcttcgttcttctgtacaactctttcactcttaagataatattctttagtatgatcttttnnnnnnnnnnnnnnnnnnagctatataaaaggatccaactttacacgaaatcttcaataagtaagcttaaaagatctaaaggtttctctttcacatctctcaaagccaaagcttccataacagtatcaatccacttaaatcagtagttttctcataacgtatttcatttgcttcttcttcttcttcggatctcaatctccaagttttatgttttttcaagcagtgatatggtctttacagtaaccattctttgcaaccattctctcgtgatgttcaatgttctatgtcgcattcgcatgtgccaagtatgaacggcctctatacttgcaagttgtggattttgggcaagccatgcgtggatgtcaaagtattcttcacatgaagagtcgattattgttgtattccctctctagttatgctgatcagaagaaacttggttgtacaatagtgcttcgctatttatcttcaatttgaatgaataaatttccnatcataactatcggttttgggcttttaagttcaatttaagccttttagggtttgtaattttgttgttctgttgtcattgtcaaggatgtcttaaattgacggaagaagtctggaaagagttgtttttcgaaggttaacattacattaattttggtcaagggatacggtagagaagatcctctctagggttccgatgaaatctctaagagcagtttgatttacatgcaaaaagtggaacactttatccaaagatttgagctttgtaaagaagcacgttggtcatgcaaaagtacagcaaagaaaaaggagtttatcgtaatcatgatgattgattttagggtttatttgacgcacatcaatctaaacaccaacgttgaatcgtgtataaagcatgaagctaaatttactaacctagacgatcagatgaagtagatgtagcttaagtctttcactacgatggtttgttgttaaacatcacgaaagacaatgctaagctagtggtttggaacccgtattatggacaaaaccggtggatcgaggtcgagcctagttttcaccgatccgacttgtatttgtatgctctaggatatgagaagagcagaaaatgatgcggtaggcacaaaatcttgagattcattaatttttgtcgtgacaattgtttctgagtacaaaatctatgattttaactagtcctgggcgtttgggtattcggttcgggttcggatcggttctttcggattcagatctttcggaactagaatattagaccccgttcggatacttgaaaacttcggttagggttcggttcggtacatttcgggtttggatagatactggtacttccattgaaaaaccgaaaagtaactgaatattattggatactagttcgtaactactacaatatacccgaaaatacttgatactaagtaaatataccataaaacctgtaaatttgtaataaataaaacttgaaaataaaatcaataaagcatgacataacaaaagtttcatacgttcaagccaaaaagcaagattcaaaacatccaaataaaaccatccaaatagaagaaagaagttcaaatccaaagcaagacataaaaccattattcaatatcaaatccaaagcattcaaagtaaagaaagaagttcaaatccaaagcaacatccaaacatgatagattctccatgacttgttcctgttacatcaaaaccaaataagctcagttgaaaaatgaaaaaccataataaatattaaaccataaaccaagtaaaaatgaattacgaaatgatcattgattcataagtctagtatattaacattgagccataaaccaagttcagaagtaaaagaaaacaaaatggagtgatgaagttaccttgtagtcgtttccttgattagtcttttagtccaagttcacttcattttgaaactctgaaaaagattcaatcaacacccaagttgtgttagaacataagagagttttcaaacaacatctaaaactaaaactagtaaactacatagataaagttacctttctcaagcttatcaagtaattctatatcagcaagaagttgtgcatttgttagaaaagtgttttcactcagcttgatttcacttttcaaccactgctcaaggcaaaccaaagtctctaccatataatgagtaaggcagcttctacttggctccaaaagacgaccactggtgctaaaagcactttcagatgcgacagatgacacttgcattgcaagtacatcttttgcaatttctgataaaactggatacttctgactattgagtctccaccaagacaagacatcccactccattccaggaagagtcttaggattntctacctcttccttcagatagatatctaactcatctttaggatcagtaaccctaatttcattaaccatctctatataagacctgtccatcctttcagactcaacattactatcttcagctaactcacatgc

SEQ ID NO: 18272 - DNA, 400 bp, Arabidopsis thaliana landsberg
attttattcaattctttaagaactcagactgaattgatatgtctaatattggtggtgttaaaaataattaattaaaatttaactcgtattgaagcagtgaattagtgatattttatttttttaattaatattaattcaaaaattcggcttgtcaaattctttctgccaaaatacctccatttattttattaatattgatctcatttataatatgattattaattattgtctaaacattttagccgatatgggatgttgaacccacatatttttcatcaatttggtaatatatgtctgttttgaaaatttcaaattacaatatatgcagaaaacaaaattgagatttgtttaaacactttatattatatggatgattttaaaaaccagttaaaaaaaatcc

SEQ ID NO: 18273 - DNA, 547 bp, Arabidopsis thaliana landsberg
  unsure (1)..(547): unsure at all n locations
gggcaaattggacaatttgctttgggaaagtgcccactcctttaaaagtgtctaaatgggcaaagagttttttaaaaatgtccgagagtgtaatattctcataaaataattgtctctcgtacaaatcagttcaagcattgtagtgcactggtgaccagaatttttcataaatcaactcaagaaaaatactgaaattttaagaaacaatgatttccaaaaatgtgataattgtaaatgtatttttttatttaaaaatggaaaacgaacctaaattacttttagtaagacaaatcaatgttagtcgtccgagagtcatagatcgtaggatcccgagtgcattgcggaagattcgacggtggagatggcaagctcgtttccggagttggcccgttttgaactatgaaagcactcataatcccgtatggtaaatgtgcatccatgtgacaatggaacagccatacacctgcaaatatacaatttcatattcatattaacccatcgattaacatatantttggcgttgatactagatattaaatatatatat

SEQ ID NO: 18274 - DNA, 1392 bp, Arabidopsis thaliana landsberg
tagtatcttcttgttttcaacctttcatgtgaatgtgacaagagaaggttaatcttcttttgtttatgttttcccctttaatctgttttataacatagatatttgttggagggcttgactctagtgtcactgatgaagacttaaagcaacctttcaatgaattcggggaaatagtctctgtcaagattcctgttggtaaaggatgcggatttgttcagtttgttaacaggtaagtatcttatttaactatgaattaagtattttcttatcgtactataatcgatttgatgcttacacatttgcttgcagaccaaatgcagaggaggctttggagaaactaaatgggactgtaattggaaaacaaacagttcggctttcttggggacgtaatcccgccaataagcaggtaaatcccactttcagtctaatcatgtaggaaaaacctaaaactgttctcttttatattaaagatagactggttttaagttgaaaacccttatgtgtacctagtctgagataatctaagctgactttatcatccgagtttcattgataaaacttcctagggcatttagttcaattctttggtttttttctttcttctgtttatggtttggttaggtattaggtaaaaaacgtttatgaaatgttaacttcatgaatgttaaacgtatttctgatatatatttaaattagaatagtatttttgaagaatttccaatcattttatttggttgcactaagttttatcttagtttggtttggtataaggctactattatggtttctctttgaaagaaagtttggtttgctgtggtttccctcattgatgtgataaggtttgaatggctctgattgacacatctctgattctttcaagttttgtgttgtcttgcagcctagagagaagtatgggaaccaatgggttgatccttactatggaggacagtattacaatgggtatggatacatggtaccgcaacctgacccgagaatgtatcccgcttcaccttacggagggtatccaatttacggtggtcatcagcaacaagttagctgaggaaactaaaagcttaatctgagcatctatctataggacaacaaaaactcactcaggttaggtgatgttaggaggtacaaggcaaaagtggttggcttcttgtctctacttgagtttagggtttatcatcttgtggacatcgaattttggtggaaatcatacagtaatttaggagacttggatttgattgattaatttgatttgtttcttctgatctttttgactattgaacttattgatcaaagaagtgagttgcaccaattgagttttttttttctcttttggtaagcatgtcattagtttgacgttgtggagtggaacgaatctaaaac

SEQ ID NO: 18275 - DNA, 551 bp, Arabidopsis thaliana landsberg
tttttatgtaaaaataagtttttttaattatctaattaatgatttttaaccaaaattaagtttccttaatatacgtgcttttagttaaaactacaaacaatataggacagatggagtaacaattttaattttttgttacattctgttattaacttagttttatttataatatatgtatctaaaatatatatagaacagcttacaatattttcaccattcaaacatttgtactgaactgcatgttgtttttgtttccatgcataaattatctgcactagtagctccgcttgatccgcacatgttccgcatattgcgttttttcttaataaaccgtagttaaactgcaacgcactagtaaatccgcttgctccgcaccactcaatctgttgtttccattcgaagcctaaatgtataaaacactaatgtatgtgtcttggatctattatcgccttgaatgtttgaggcgtttaaaaaaaattcatagtgtgttttattttttctcaccattcacaactacaattttttattttattttttaaataaaaaatcat

SEQ ID NO: 18276 - DNA, 1811 bp, Arabidopsis thaliana landsberg
ttacccggcggaagcagcaccacaactacttgaagctgatttcccgtatactagagggtacttctttccgttaagatcgaacgaatttaccgatcttccctgtttagcaacaagcagtaatgttaaaagaggacaagatatgtatgataatatgttgtcgtaagagaggaacaaagatttgtcccttggtactttaccacaactgtcttgccgtttccgagaacaactttagtgacaaacgcacggttagtattactagcagcaacagtgaacatccacggcgcaatactcgcgaccgtgctaggttctggaccactgtttcctgcggaattcactatgaggattcccttggccatggcatggaaagccccgatcgcgagagggtcctcctcaaaaggcgaactattatcaccaccaatggatatggtaatgatgtccaccttatccgctatggcatcatcaaatgccgctagaattccgtcagttgtgcacccatcgacgccagggtcacatactttataaaccgctattcttgcagctggaacgccacctcttgcggttccattgccgaggccgtaaaagctcacatgcttcacagcatttccagcagccgtggatgctgtgtgcgatccatgtcccatgtagtccctcgctgactcaggaaacccctctagtttgggggtgtagtaccgtgctccaataagcttgctataaaacaaacaaatcatccacattcattataactaagcaattgaaaaatccttacacaatttaattgtatgatcaaatttaagagttttatacttgttccaagtgaagtttttgccgcctttgcaaacacctttccattttttaggaggaggaccaaagcctttgccactaaaactatcagattccggatagattccactgtcgatgacaccgatgattgtatcactctctatgatagtatttcgctttgtacgtttgctttccttgaggcccatgaaattccatgacgttgttgtttggagcttcagtttcttgttaggaaacacagacacaacttcgtccatacctaagaaattagatattaagaaatagcaacacattgagttaataaagttttttcatagagaagaaaactaatttgagttttgataattatttttgaaaactttcgggtcgtaatccatttatgttcacttacttgctagtatctctctttcggatttggttagccgggctgcgaatccgttgaaactccttttataattcctaaccaaacgatcctcgatcgaactacaaataagaaatacatttgttagactttgatcgatagacatgaaaccatatacaaataatcacattaacactaaacaataaaattgaataaattcagtgcacctctctccggtgacatcttgaagaatactagtgtgatgggacataggcatgtagtcaacacgagcaggaagtgcacccatgtatactatatactcctacaagtatcatcatcatagttatggttagtcattagtaatataattagaaccatgatatgattataataatcaaataacgaagaaggatttgtgcaattacctgtttgtcttgatcatctttgtctgctgaagcgaaactcacaacaagcaaggcaaagatacatgagaggagacaataggagacagcagcgtttgtcatttttttgattgatttggttataatcaaattttacaagattgtgagaatgaaaggattattatagggagagatactgatgtacatagaacgtaatcaaagtcctcatcaaactcccttaaagattggtt

SEQ ID NO: 18277 - DNA, 1663 bp, Arabidopsis thaliana landsberg
aatctatgccttttgcattgcagcatttagagactccgagatattgctgctcatcacattgtatcgtatacccggaaagtacgccagtgtccagtgagatagccctatctctactaaatacttggcacattgaatgtttctcttctgtatttcttcaaaccaatatcgcaaatctcccgcagtgtaagatctcgccgccatggagaccattttcgcaagtccctcacactggaaattatggacaacattcctgaacaaatgtactgtgcaacacgcatgcttcacaagagggtacactgtcccaagcccagcataaatggtcgcatgcctgtcagagacgaaaactagatcttcttcatgagggacaaactgtgacaactgttcgaaaaaccactgccaacctgctatgttctcattgtctacaataccaaacgctaatgggaatatttggtaatttccatcttgtccacttgcagtaactaagcagcttttgtattttcctttagtgtgtgtaccatctatcactataactttatgcaaatactggtacccggaaatcgaagctccaaacgcaaaaaaaagatacttgaaacgaatattttcgtcctccgtataatctgtatggactgtggacagcgtacctggattagttgtcctcaacaggtggagatatgtctgcagaaacttataaccttcttcctcactgcaacgagctttcttcattgctatttcttttgcgtaccaagccttcatgtatgttatggtgacatttagttcagccaatactatttctggtagttcacaggcccttggtcccttcttaccatgcgtatattttgccttaagcaactcacctaacatcgatcgtgttgctttcataccatacttagaccgcgcctcgacatcacaagtatgttttagagtcgccgtcctaatttccatattttcagagttctcgtgaaacgttgtatataccctccaatcacactttttatcatggcacaccgcaattacccgtatcttgtcggacttgtttattcggaaattgaatagcattttcatagagtacacagttaatgctttctgcaactcgcctttattgctgaatacccgcccgatatatattgcatcgccacccttcctaagattcaattagctttgtcggaagcaatcgcggctatgttgtccttgaacggaacggcatccctacacatcaacatctcgtcccccgctaattcactaaatatagtctctccgtctgatactcttctcgacatgtcctctgccagtgcccttgatgtattatcatttctcgcactgtatgtattacgaacctctacatcacattgtccttcctcttcagctgcacttgcttccaacgcagtcactacaacgtccactagtcctacttatcctccagattcagggaccaaatcacacgtatccagcgtctctgttattgaatttgtcctcatagttggccctatcctctgccccagttgtatagacattctcgtattttcctcatcattatcctcaattccattctcactatcaccttgtgcatcaacgtctgggattgttgtaacctcaacgtccactatacctaccccttgcaggctttgtccatgcacgttgtccaaacatcttggacagtccttgt

SEQ ID NO: 18278 - DNA, 556 bp, Arabidopsis thaliana landsberg
ggttcccttgtcctatctgcttgaggctggctcgggcgagacggaatgagctgaagcgaccttaggtgaggcggcgttgctcgaggtgggaggctctcgcgggggacatctcgattttttataggtggcccggctgttacccctcgggagcttagcccttatttctcggagtgcgttcgttatagggataattcgggtgtccctaattatcgcccccctgacaaataataacacccacaatgcaatgcatatgacagattaagtttagttccataagttaatcatgcgagagtcctgagtcgctcttgaccgtgagacagctgatataccagttttacactctgtagaggttgcacatctttacccacaagacgtgtttctcgattagctagggttagctagacccttagacacttctaaggtgaatggctagggatcactgcgaggcctttccaaagttccattagttcgagaaatccgctacggatttagaaagaaggaagcataggaatcctcgtccgaaacgccatcacatcagttcgacccgaggaaacac

SEQ ID NO: 18279 - DNA, 655 bp, Arabidopsis thaliana landsberg
aataatagtaaaaacatatagaaaaagtaggaaataaagagaaaaaaagagagagacgtttcttgcaggagagactgaactggtatatttacttaaaactattaaaataaaaattttttttttttcttttgagatagtctccatcgtttttgccgatggagatgataaacaaagtatggattcattataaaagactactctgtttcatttgcctctgcatttttgagcaacaatggcagcaatgatcactgttgactttcaaaatagcttcatcttcatcctcttttgtctcttctctctcatttgttactctctcttcttcaggaaaccaaaagattcacgagctggccgtgatcttcctccgagccctccttcatttcctgtaatcggtcatcttcaccttcttctctctgctcttgttcacaagtcttttcaaaaaatctcctacaagtatggacctctcctccatctccgcgtctttcatgttcccatagtcctagcctcctcggcctcagtggcctacgaaattttcaaggcccaagatgtgaatgtctcctctcgcggtcacgctccagccggggagtctctcttgttggaacttctagcttcttcttcgctccctatggagattactttaaatttatgaagaagctca

SEQ ID NO: 18280 - DNA, 745 bp, Arabidopsis thaliana landsberg
  unsure (1)..(745): unsure at all n locations
tggattcatgtagataccaatttaaactttatttcaattttttttgaaatggtggtggtacgacccttttgctttgggcttaatactttctccccctttttcattaatcgccaaaaacagagactttgagagcccttttgcatctttctcccaaatggtaatataaatatgagtgaagggttataccaattgagagtgtggaggaacaacgacaaaggctagatgataccgtcagagttgtggagtggaagccttgttctttgccgaagactccatttccctttcaatctacgacttagtatagaaatacacttgaaaacacattagttgtagccttggtacaagaataataagaaatatgcatttgcaccaaatgaaagagacaagatcaaaggtatatgagatagcgatgtgtgcaatgtttcaatcaaaattcctagaatcaatatatttagctcatgcctaagtttggtaaaagttttctcatctagtggtttggtaaagatatcggccaattgttctttggtgctaacataagcaatttcgatatccccctttgttggtgatccctcaaaaagtgataccggatggctatgttcttagtgcggctgtgctcaacgggattatccgccatgatnttgcactctcattatcacataggagaggaactttggttaatttgtaacatagtccctaagggtttgcctcatccaaagcaattgcgngcaacaatgtcctacggcaa

SEQ ID NO: 18281 - DNA, 574 bp, Arabidopsis thaliana landsberg
tcctaccttcgggttgtatttccatatcacgtgtaccttcgtcctaaagccaaagtttcctgtaacagtttatattacactaaaaacatattagtcacgttttttaggaccttcggaagagaaaggcccccagcagtagctcctcgcagtattaatttggttctatattaacaaattcagactgcgacatgaacgaatgcctttagctgaaggtccgaaaaaacaccttcccttctctagaatagcgaaagacaccgtcatgtagggcccaccatctgtggtgtgctgggcatataaatagggactcacattgatagcgtttgatgtgctatttcaaatgcttgcgctatttttgccattatgaattttcttgctctgccaaattgtgattgatttgtgagctttggcatttgcacaagtgctgactaaatggctgaaaagaaagaggttgctgaccctgcattagctaggttttatgaagctatggagaagacgaacacagagaaaatcaccaatgaaatgttggctgggttatccgaggattctggcggtacgaaagttttgatctggaaag

SEQ ID NO: 18282 - DNA, 487 bp, Arabidopsis thaliana landsberg
aataccatcaacttcaagtggaaattgtggaaaaggagaaagtatagatgatttgtttgctgaatttatccaagagctatatccgggatgtagtaagttcacgaagttgtctttcatattgaagttgtaccatattaaatgatagtgtggtattagtgacaagggtatatctatggagctagatatgctgaaagatgcatttacacatgccaaattgccatgttcatttaatgacatgaaaaaggttattcggcatgacttatgaatcaattcacgcatgtccaaatgattgcatgtaatattgggatgcagatgcagagagcgaaagatttgcaaagtttgtaaagcctatcgatggaaaaataacatttctgcacacggaatgatttcaggatcagagaatgagaaaaataaagatcaagcaaaggttctgcaaagaaatcctttaaagccaccactacaacgacaaaaaaaaaataaaaaaaaa

SEQ ID NO: 18283 - DNA, 587 bp, Arabidopsis thaliana landsberg
agttcggtttctgcgatctcaccatcgcgagacccgaatgccgaatctctttccttcctcgcacgtcctaaccttaacggttataccggaaggagtcaggccaccgccatgtccaaaccggacaaaacattccccctccttatcctcctggtgctccccagccttcataaccatggggctggaccgtacgagttcagattgagtgactgtccacacagtcccgagtggttgtactattaaagagtacaggtagtgaagatgacaaaccggtccttatatgaggggacaatccttctgctcacgcctaaaccagctgagccaacaccttaggccctcccctaaaccaaggagtccttgatcatcccactcccatggtgatgagggtgagtaccttcattgcacatccctttttaaaagaaaccttatttgaagtatcatattcccctttctcccaacccacatttcgtatcgaaagatatatgtgaatgcgggctatctctttgctcacaatgcaagtatcccaccctgaaatcccggcttaggtagtggtagaaataatagttaatttatgcatcaagggaaggatg

SEQ ID NO: 18284 - DNA, 750 bp, Arabidopsis thaliana landsberg
aaacaagtaagatcctcacactgaggtaagacaagagaaagagcctcagaccgaggaatgctggtggaacgaacctcaatacaaggtaaagacaggggagccgcctcaataagaggtagagttgtaggtatgcaacgtttaggagccttacaagtcagcttcgcaactcagagagccttagacaaagtgttagcttcagtgatactcctattttcaaaaaccaataagtttcgggcagctggccggttaaactgaaacaaataactatgtctaagctaccatgagacaatttcaagccgagccaaatcaagacagaatctgcatactgcagtaagctatcgcaacaaagcgataagggtgctagaagagagcaaaaacatagacacaaaagtatctaaacccatcaaaattgattgagttaaccccgagttccaccaaaccagaaccgcacattcaagaaacaaattccttcccatattagaagaattagagaacgagagggacaagcaaacctgggggaacatctctccaaaccagtgtggaaagaaggactcgtcgagacgcagcactccaaagctattgagtgactttgcagaaaggagacggtttctcgtcgtcgagggtgactgagctagagatacaataaaggagaggcagactgagcgtcaaggggtcaggtggttctggtggagtcggcggagaagaagactccagtggtagagcaggaggaggcctcagatcaaggaaagc

SEQ ID NO: 18285 - DNA, 645 bp, Arabidopsis thaliana landsberg
aaaaacggagaaaaccttgtgggttctgttttcaatgaaaaacacattacctctatatttaactctaaaatagagagggtttctcaacaaagtatgcatgtattctctattctaaaaagaaatattcttaaaaatattatatttctattttatataataatgccttatatttatataatttataatttaactccataaattatagttttgcaatatttccataaattatgaaattatttaaatttaaaattcattatattaaaagatattttctataatatatatatattgaaaaatgacctcgatattttcaagtaattatctaatttttaattaaaaatatactttgacaagcaaaacaataataaaacagttacaaaatatgaaattatgaatgattctatggtgaatttttaagaaaaaacttttaacaatacttttatttttgaaattatataaaaaacattaatgtaagaaattattatgatccctataaacaatttttttgcctccaccactagcctctctatgagtctcttactaatataattaactattagtgtttttaatgtaattaaatttgttaattaaattctaaactataaaaaaaattataaccaatcataacaggaaaaaatgtaattt

SEQ ID NO: 18286 - DNA, 1154 bp, Arabidopsis thaliana landsberg
agagtgatgatctgtatagttttctttcgtcctcgcgcaggtcatgttctaggtttaccactgttgttcttggtacttggtatatggggattgatcaagttcgttaagaagagaagtaagattatccgatatagaatgttctttaaacgtaatggaggcttgttgttgaaacaactagttaactacaagagtaggtaatgtgcagtcatcgaagatattcagttcgaaagagctggagaaagcgacggataacttcaatatgaacagggttcttgggcaaggaggtcaaggcactgtctacaaaggaatgttggtagatgggcgaattgttgctgtgaaaagatctaaagttttagatgaagataaagttgaggagtttatcaatgaagttggtgttctctcgcagattaaccatagaaatattgtcaaactcatggggtgttgtctcgagacagaggttcctatcttggtttatgaacatattccaaatggagacctattcaagcggcttcaccatgattctgatgattacactatgacttgggatgtgcgattgcgcatctctgttgagattgcaggagcacttgcttacttgcactcggctgcatcaactccggtctatcatagagatgtcaagaccacaaacatacttttggatgagaagtatagagccaaggtatcggatttcgggacctcgagatccataaacgtagatcaaactcacttgactactctagttgcaggtacttttggatacttggatccagagtactttcaaactagccagtttacggataaaagtgatgtttatagttttggggtcgtcttggttgagctcataactggagaaaagccgttttctgtaatgcggcccgaagaaaacagaggacttgtgtctcatttcaatgaggctatgaaacagaacagagttcttgatattgttgattctcggatcaaagaagggtgcacgttggaacaagtgttggctgtggcgaaacttgccagaaggtgtttaagtctaaaagggaagaaacgaccaaatatgagagaggtttcagttgagcttgagaggatcccgtcatcacccgaagatttggagttacatattgaagaggaggacgaagaagaatgcgccatggaaataacatggatga

SEQ ID NO: 18287 - DNA, 1453 bp, Arabidopsis thaliana landsberg
aaaatatgttgattggatccacttgcataatgacaaaataaaatctcatattaccaatatatatatacttcataaacaaaataatgttttaaatatattttagtaatatttgataattaaaatttattggaaagttgtgaattttttttatattattaattatataattttagtgtaaacaatgatattttttcttttacaattgctaatatttagtatgcctagaataatatcattttgttatgcaaaaacccagactatatatccactttttggcataatgaacttttacttgtaattaggcgaaaatgcaatcctgtgtttttacgttttttaatgcaattatgcaaattttcttaattggcaaatttcatgcataatcgcattagaaaacgtctaattatacgtgttatcaatgaaaagtgtgttaagtttatttttcttggatgttgttgtctaacttctattgcggtttattttttaggttccggtgagggttgatgggggtttattgtttgaactcttaggacaatcagttggtgatccagtaatcagtgaggatgatgtacccgttgttttccgctcttggcaagcaaaaaacttcttagtttccgtgatgcacataaaaggaaatgtaacgaacaccaatgtccttggtataactgaagtagaggttagttcaaaaagtgtcaaaatattctacttaataagattcttaaagcttaaataacacaaggctataatatgggttctgacctacactaattttcctgatgattctcctgataggagctgctttatgcaggaggttataatgtaccaagaacggttcatgaggttatagcacacttggcttgccgtctttctcgatgggatgataggtgacaacagttttctgatttacttttactctaatgaacgcttgtctagttttgctgaccagaaaagtggacttgagttttataccatgctcttgtctggaaagtatctaattgggggtccttgattggcgatagattattccgtaaatccatatttggtgcagccgatgaaatcgaattgaagtttatgaacaggttcttaaaaatatgtttccgtttgttttgataatacacaatgcatgtttaactaaagatactatcctttcttgttattaggagaaactatgaggatttgaatcttttcagtatcattctcaaccaagagatcagaaaattatcaagacaggtcaccttcccttcattctcaagcctgtgttgatatgttttaaatgagatttgatgtttgtgggtgggatggactatagtcatgggcatgacgtcttcctttttttcatggcaggtcatccgagtgaagtggtcactacacgccagagaggagattatctttgagcttctccagcatttgaggggaaacatatgctcgcatctcttagaacgttgaggaagaacac

SEQ ID NO: 18288 - DNA, 412 bp, Arabidopsis thaliana landsberg
gtgtatgcaaaaacaagaagaaacgtataacaacagcatcatcttcttttaaggaagcacaatgaatccgtccagtgatcaatgttgaaaggtagagctaggctctgacatatatagcacgtacaaagaaaccacagaagagatactgcataaatatagcacacggagacaaaaaaacagaagaggctctgacatgtattacctttaccatcgaagattttgttttcacaaaatataagttagtattttactttccatttcttataaaatagtttctagcttcatatgttacctttcatatatgcaccagagaggtttatacagatgtcactattttttttgctcatcctcgttattgccagattcttctccatctggctgtctgcacaacctctgctactacatctgaagc

SEQ ID NO: 18289 - DNA, 462 bp, Arabidopsis thaliana landsberg
  unsure (1)..(462): unsure at all n locations
ttaaagtagggctagnnattacaaaccctaatggncagnaatttgagaaaaattaagatgaaagaaacagagaaaatagatgattttgctggaaaattgtctgaaatatctacaaaatctgcagcccttggagttaacattgaagttccaaaacttgttaagaagttccttaatagtctaccaagaaagaaatacatccatattatcgcctctttagaacaagttcttgatcttaataacacatcttttgaggatattattggacgtatgaaagtatacgaggatcgtgtctgtgatgacgatgaacctcaagaagatcaaacaaagatgatgtatgcaaattcagatacaaacagagactattatcaaggagattcacgtggtagaggacatggtggcagaggaaattacagaggaagaggtcgtggacgaaacgggggaagagacacctctcaaataatg

SEQ ID NO: 18290 - DNA, 870 bp, Arabidopsis thaliana landsberg
caaaatgaaaaatgcctcatgttgtaaagaactgaatgtcaaaggtcagtttcgtttttcttttttgggaaaaaccttcctgaagatcaatggaataaatttgtggaaatgcagttcactgataaggctaaggtaaaacctattccacaactacttgttacaattgtacatttaggaagaagagacatgcaaagaaccaaatcgagctgaacattttattctattttgtagatactagatggtgtatccgcgagttatgcgggatttaatttaatttgtttattctttgagtataaatataatcatttgagttttagaagattttagtttacccatgtgcattatctttttaaagtagtaaaaagtttctcacatttttcattaaaaaatttctcgttatcttttatgattcactcgttgtctcccgacatcgtctctcttttctccttagatcgtacctattttctccttgatatcattcaatactcattttttaaaataagtttcatgatccttttattataatgaacatcagaaacagaaatctgaggagatgtttgtcataaggttttttttaccatgttttgctgcatctaaaattgctttatagaaacaaatctcatatatggactctttcgtattcacaattacataggatttcaaagtgaaattttgtactttatcttgaccattggaaaatcaaaaatttttttctacatatataatttaacgtatattatgattttagataggattcttaatattgattttctaaaatatgacactaacgaactcatagatattattctaattttaaaatacatttatttatttttaaaaatgcttttatttctaatgaaaaacttttta

SEQ ID NO: 18291 - DNA, 699 bp, Arabidopsis thaliana landsberg
  unsure (1)..(699): unsure at all n locations
atttttttaatcatattttgtttagagtttagaagagccaattctaaaaaaaattgtttacaaaagtaattttaaatggttcagtacgaatttttcatgccacatttacaatacgaaatattatagataagaaaaagctttcaaatttctttaattatgttgaaaatgctgactattttttattttattattagttgttttatttttttttgtcaagggaaaatgctgactatttatgaatattaattttggattgatgggatacaatcccacgcaaactttcaacattaaagttgaacatctggctatggctatacacagtgaaacttgacaatatgtaaccctacaaaaattgaacatcaagtggtatctccttgtcgttgattaataacgtgttccgtcaatcatcataactcataagccagtataattaaactaaattaaatttacattggtattcagtagtccctgccatgtgagtttccatagttgttttgagaggtgcgaatatagtctttcacatgatttaccattgatttctaaaaaaaattacaaaatattattagaatgatatttatttagttttaaaaaaatgtgtgaaaacattgataagtaaatgtaagttacaaaacaaacgaaatgggtccgnaattattatataatatatnnatatataatatatatatataatatttcctc

SEQ ID NO: 18292 - DNA, 2141 bp, Arabidopsis thaliana landsberg
cgtttctaagaaattagaaatcatcttctcagttttaatgcctgtgttattttatagtgatactattatgctcctcattctcacaatttatttctactttgtttctttaccttcacaatttctgccaaatgagatcaatatagacgtcttcaacatcaaagtttttgtttataaatacaaaatttaaaataataattttggtcagagtcgatggttataaggtgatgggcgtgatggcaaagcatgtgacaaagttttatgtccactattctcttttcgcctaacgcaaattcgtgtacgttacaactccctaataataatgcgttaattactctgccaagctcattttcatttattactttacatgttttttttgtttaaagcattgtcatatttattgtcattatgaaacccaaaatgaaaggagttaattagagatcattgttttcatctagagcagagctctgaaactggaaccaattatttggagtcttgatgcaaattcatgtagccttggagctctgaaattgttcttctatatgtttgctgatcaaattgttaaaataatggtgagactgaggctcatggtttaaatactagcaaaaatgataaatttaaaatcccccttagccacggaccttgagcaaagagtctagtgtatgtgtctatatatggttcaccttttggataagaaatcaatttcaagctcatctttctacatagagagaaacttggatcttgtactttttaagatgaaaacatccataaaaaggtaaagataaagctgatatggcaaaacgccaacaaaatcctacaagtaaataaatcttgggccaactttaatgttcctaaaagaaatgaacttagctacaaagttactagtcacgtctctgctgccaaaattcttgacacattctttacacttcttcgaacaaagagaatggtttgatccacaaaggatgcaatgcgcaccgcttccacaacatttgatctgtggcataaatcaatcttgcaccataagggcttgaaactttcagcttttgccactaacactctaacgcaaacttgtgttagactgcaaccaaatgaaatatttgagaagcaccagatccattaacagcaactatgagcccattacaatgatttgcctccatcagtgtcttggatcgctaacactatccaataaccagcctagctggtaattagacagaatttttttttcttctggatctgtgaaaataaatgtaacatgagccattgactaagatctagctctaattaactcagtcaaaacgacgatcaaaagattgaactattggaaatggaaggggccgcgcgaacgcaggcccccaaggcaacaaataatgacgcaggatctcccacttggggtgacctttggcttagcgcacctcaagtgcaggaagccactagcctaggccacggatcttcatgatcacccgtaaaccccgtccaggtaagtaatttgcaatcctcgaccatcttctttatttatactatgctacacacgagtgcccatcctcaaacttccgatgagggagcatcaacattatctcgtatctactataggcaggctttcgttgtttgattagcccaagttttatttcttgataggccgcaatgtctatattccggtccaaatcaaacccaacagatttttttttttgtcggctatttgtcacagatttctttttatatacgaggaacaaggttaattatattgaactaaacatttaaaaaaaaaaggaattttccggttcaggctgatatttaacgttattgtgggtcaactcaactcataagcaaagttgatatgatactatttaaattgacttcaccacatccacttgacactaataaattgacttctccatccctatccacacatatttgaatcttccaataaggttccacgaaactgctaggaaaacaatattttctaaggcaatagtcccactttggttaatcataaaattgtcaaatccactatgtaatttgtgatccataataaattaaggccagttattcatcatgtaagtcagacactactttaactctagaaaacttgccaaagtgcatgaaaagtttttgaagtgaagtagcaaaattcctacatgtgcaac

SEQ ID NO: 18293 - DNA, 610 bp, Arabidopsis thaliana landsberg
  unsure (1)..(610): unsure at all n locations
gtttaccaaattaacgaaattaattaaaatttatttatacaaaaatttagaattaaagtacatttaaacataataaattatatagtagattgatgagtttatttttccaaaattattccacaattatgttgtgtgcgcataatacgttcaactgcccacaatacaaaataatagagggcgccaaattgatgctttttatccaatcaattgaagcttcatatatagattgaggaatatcaaataatgaatcatgtttaattataacaagaaactcagctttaagaagatcctacccctagattttaatcggaacatctaacgaaaactaaaaagaagtagatcacatcgatcaacttagataaaggagtctccttgaacatctccacccatggaaatgatacttgggaaagtgctttctcaaagtaaaagtgaaacacaagtaagtcactgcccagcacagactatgaacaaacaacatgaacaaacataaaaaacaaagttgtgatttatcaattaacattagaatttattaaacagaacaagccgagtttcaaatngcatgcacttatcgggtgggaaagaaatctgaagatgtgaagatcgatcttac

SEQ ID NO: 18294 - DNA, 572 bp, Arabidopsis thaliana landsberg
ggcccctcggaagggttcggcagccgcctcagagcactcaggctccgcgcctactactgatcagaggttcgaaggctgccccctcggaagggttcgacagccgcctcagagcactctggctccgcgcccactactggtcagaggttcgaaggctggcccctcggaggggtttcgacagccgcctcaagccactcgggctccgcgcccactactgatcaggggttcgtaggctggcccccgaaggttcgacagccgcctcatagcacgcagagcgagggatgactctgggtacgttcgatacacaaccaaggctcgggctacgctcccgaggtaccctaggacatttccgagaccagcgggagtgattttgtaacggaatcccatcagagggaggcatcgagccctcggaccctatcaaacgggaccgggtccggcaaatcagctgcaggtacttttggagcgcgcctttgggccactagcctacccttatcgaacggggcacgggcgtccactcggatcacccgttagcaactcactggagacaccatgttcggcgccctccgagggaacat

SEQ ID NO: 18295 - DNA, 3741 bp, Arabidopsis thaliana landsberg
atttaatctctcgcatataagacatctacactagacacaatcataaaatgaatagccagtaccataaaccactactgaggactttgttcgtaccataagacatctacacacaataatccttaagtaacaaatctacatctagaaatttgttattagtagacgatttatttatgattcagaagttagttacctggaacagcctcgagaatgtgacggttcttggcagcttcatcccagaactgttggagcctcccagtctgcaaaagaaaaacaagtgctttaaatactcaatgcacaccttttcaactctcaactaactaatactgatgtttgcgtacctcaaggtagtgtgatagaacaattagtgacttgaactgctcctccatttgctgaaacacacaatccaaacaagtacatttattagtcctcaagaatccaacacattgaaactcacactttatcatgaatgctcagtacacagactgaactgacagaaataacttggaatggcataataacttgagtcagaaacatttgaacaatcgtttcttctgtatctacgataagctatatatgtaagaaagcaaaacattgtgaagttaagaggaaagaagaataccactctttcgggaatcaagaagaggcaaaggctgaagtctggagttggcatagccataagagccttgaccaagattcgagccacgatatgagtgttcatgcgctcaggctcaaactgcataaaagcaacaataccaattaacgaaaagagacactaaaactcttgaatttggtatcaaaaggtccagcttaagaacaactagagcacctgatagagccgaagcaagcataggtttacttccagactatacgtttgcgatgtaacctgaaaatcataacgaaaccaacaacaatcaatggaacacgatttctacaacagaatccggcttgagagaaaagggaaaggaaactgcacgttaacgtagttttcgagatcaggcaggatttcagggttgaaaggattaagggcgacgagctgctcaacggtgtaagagctctgttcctgcggcgattggatctctactcccatctctgcctctttctccttctccgtttctgtcccttttgcgtcggtctcttcgaactttgatagatcactgaggaatgtgcagaggagattcgctgataagacgaatctagggtttaaaagccaaaacgacaaagctttgtcgtttgggctaatggtgcaattgacaaaacgtttgggttaaattaggatgacagagaaactacaaagggttgtttagtaaataactatttttaagccattttgatgccacagactcggtaaataaatattttctcagtttgcttttaaagattgatactacactagagtttgcattcgattaaccatggtccaaaagttcaccagtgaacatcttttcaaacaaaactgtcagcatctacgagttctctgatcacaacttcatgaagtctcactttgtttccagtagaataataaatgtggatatccttcaagagtataaaatcataatctttcttttttcaaatttcaatatatacaagtaatctttatattcacgaagaatgaatcctttggtaataaaataaaaataataatatatagtttctttttgtaacaatcaatgggttttccttgttgttttagtcttcaacagcttcatcgaatacgattcacatgagaaaatggctcggcaactgcttttggtgcagctttttttgcagtctctggtactccaaaaacgttccaaaacctcagggtctcgtctcctgctgctgaagctacagtacaaccatctggactctgtagaaaacacaacaaacaacacaagtttaaggactgaatgacctcaaagactcaaactacttcaccacttaaagaaattgatgacgttacctgggccatatatagaactcttgatgtatgaccagtgagctcagccattttcaccatggatgggtacttccaaagtgtaagctgattctgtgtaaacccatgtgagctaagcaactctctttcattcttgctccataacaacgaacaaacttgggaaccagtgtctactgaattcaagcaagccccagtgtgagtattccagaacttgatcgtcctgtctcctccaccaccaccagttgcaagcaaagttgcttggaaagggcaccacgcaagagctctcactgcagttgtatgttcctcaaacctatgcagccattgcctagttgggtttgaggaagcgagagaacgatcccatatgtgtactacattgtcgttaccaccacttgctagtttttttccagattctgaccacttaagaccacaaacctcttcagtgtgacccacgtaagttccaacaatagatgatctgatcctcacatcattgttgacgagctttccatccattcctccagttgttagaatgtgattgttccatgccaatgatcctattcttgactcgtgaccacctctcaatgttctcacttaacgattggaaacagtatcccaaagctggttgtcaagaccaactgccagatcaaaaccatcttgcgtccagttaatacttgtgacaggtcccttgtcttcatcaatagtcacaagctcagacgtagagccactggaagcatcccacaagtaaacagtgtctcccaaagctatggctaagacgttagcactgccccagtccaacaagttaagggagaagtcatctctaagtccaggtgcatccaagactctctcactattctgaggaatgtatctacgaggctttacgggtttagggttttggtgaggagagtcagagtgattggtagaaagcagagctttaggtttgtttctgaaagcaaaaatacgggtgcgattctgattcataaccacagccaattgcggcatgtaggcttttcttgatgctgaagttacctcatcgaggttacgtttgcttccttgggtaagagcgtagttagcaaaatcgaaatccatgacggatctgtttgggatgaatctgtccaagttttgcttggaaagtttcctcggaagaaagtggtctggaactgtacacgtatccgaatccattacaacgaaacagaaggaaacagaaggaaacagatgatcaaagattaaacgaaattagagaaaggggactaatcaaataaagcctgcggggaagagaagtaagcgttggtaaacaagttagagaaagagacgaccgactaatcaaatatattcgagcagagacagagagaagacagagagaagacagagagcgaagagttttgttttgtcgctgagaggaaagcgaatgaaatagaaaatagtgggagcaatttagggtttcttttttgttgctgtccttaaattaattatcagtaattacatttactacaatggttagattgatatttgtaaaatcggatctaatttagatttcctctatgatcaaacatacaaagcatttttattacacgtgatcaaaattaaaaaaaaaaaagaagaaggatttttagattaatatcagaaccgtgttactcaattatcagattttattttctctctgataagctacttctttttttttttttttttgtgtaaacaacacaatgaattcttcaatgtaaagacaataattaaggatttttgcttaccttaattaattatttaattattaccttacaacggttagaaatcggatctgattttagatcttt

SEQ ID NO: 18296 - DNA, 1127 bp, Arabidopsis thaliana landsberg
ttcctttttggcagagttgtagtttaggtctaggttatagatcaatttctcaagcttagaattatctaatcacttttcgtttgtcagtcgaaatgttgtcatgcgttagacccattagaaaagctggtgagtaaactacttgacggctacactcacactaattaagagattagtcatgtggtaagatcttgggttaatcaggtggtaaaaacttggttcatcactagttatcaaagaaaaacaaattatgccccataacacaaaaagcacaacttgtaatgataaacaacattggatcactactatgagagacataagatgatgaacattaagaaatgtatacagtttcatacaacaaactgaaccaaacaaaaggtaacaaagaaatcaggaaacatgtgtaatcatgatattatttgaaacaacaaaagcaagttcacatctccacgtcaagaattattgggaatctatagacttgaagtttaagtgtttaggtttcgaggaacaggagtgcacttaagagggtgagccatggtcaaggtcattgttccaccctccttcatgttgattttttctcctttgattatccagtcaaagtgttgcaccatcattccaattacacttcctacaacggtataagctagatgtgatccaggacaagctctccttccgctaccgaaaggaatgtattttagcatgtcctctcttttctcatcctcttcccctaatcttgaagaagctaaaaacctctctggcttaaactcctcagggtcttcccagaaatcaggatctctcattatcgcataaacattaacaaaaagtcttgtcttctccggtatgtagaatcctttgatttcacatgtctctttgaacgtccttaccactggtcccggaggatgcaatcttagcccttctttaactattgcttgcaagtaagggagatttggtagatcagtctcttgaaccaaccttgttttccctacaacagaatcaatttcttctctcagtctctcacaaatcttaggattcttaatgatctccgccatggtccactgtatagtgttcgccgaaaattcagtgcctgcactgaacagatcctgcaatagtaaaaaagttttagtcagggc

SEQ ID NO: 18297 - DNA, 984 bp, Arabidopsis thaliana landsberg
  unsure (1)..(984): unsure at all n locations
tcggggggggataccggatgtccatacacaaaggtatttaaattttatttccatcaataataatttcaagggcaatagtccggtctctaacaaaaacaaacttaaccggataatctttcgattacataagggcaagaccgccactgctgccaatcggctcaacaatattaaaagaatcaaaaaactaatgacacttgcaaaccctgaatatgactaaggtcatttttggtttccgataaaaaagaaaacctagggaatacatacgacacatcttctctagtcgacgagttgtaagatcagcacccgcccgttgacaatttcatgctaaaatcctcatgtgttagtttcgatagaggttgtagaccccaccgaaataacagttgactctgaaagcttgatctctgtggatggtaacatttgaagttgtggaaccgaagcagctcgcctacgattttttggtctagatgtcttgggcttgttgactcgattagaaatcctcttgctaggagaacgccccctgttgttttgaattaagcaagagagctggattgnnnnnnnnnnnnnnnnnnnngcccatctcttccttttttaaatctttctttttggacttagagttggatgggccttgatccatcaaacagccaaaattttgagtcgctacggactcggacagcttcttcaccatcgtaggcgagttcaaatcgacttgagctccggtagagattcagtctcagattgctgcttcgcatctaaaggtatgctttcctaaagatcttctcctagaagatcatcattttcaacatcgaaatcttcagtatctccagtgagggaaggttcaagagcgtggtacgttcgtcatcctcaccgtccagtcagattaagggcgtccgcatcaaatggtggttacaaccaaccatctcagcgtcgtgagtcgcagtatcgcactgggaggttagaaagattcaggactagtaaagttattga

SEQ ID NO: 18298 - DNA, 2991 bp, Arabidopsis thaliana landsberg
  unsure (1)..(2991): unsure at all n locations
caagagttatgggttagacaacacaaacttcataaaccatatcatttcaaacggactatttgttcatactttaccaaaaatgagtgaatcgtttcattaataaaccatatggattgtgtttcgtatgagttagcaaagtagtgcttttaaatgcactagtttcataatcctgttcatataccgaattgcttgggttccttatgcagtattagggtttattttttgaattgcggaaataatttgttatcattaaatagagactattgtatgtgtatttgaggttcattcagaaatgagtgcttctttcaacaaggcaatataatgttttggtttgcttatgattttggccagtagtgatgttaaatgcaatagttacataatcaagttcgtaatcctatttgcttgggttccttagtcagtattagggtttagtttatgatttttgttcacaatttgagatcagtaaatgcgagaatacatcagtttgtaaacaatttgggatcagtaaacttgcaacgaatcataagacagaccaaataggcggggtttttaatatatacattgcaaaaacggtgttacagggcatttcctaattacattgagacgattaaaagcaacacaaatatacacgaattgcagggatcacataagtatcaaaagaagaaggtatacaccaaagttggttataccttaatattttgaaaaatgtattgtagcctgcattagtagaagtagacactcgcgcttccgcaaacattgcgggaacaaccgttatttagcccataccagaaagttatatcataacacctaatacccctcagtagcagtcgttgagttcttagatagcattacggcaggaggctttgttgtggcctttgccacaacaacgtgaacacctcctctgtgaaccggtcttcttgcgctgaaaagtagcagtatatcagctgtggtatttttaaaagtacacaaagtagaatggactatgatatattaatagttttaaacttgccttgaattcaccacgagacagaattctgagtttccttggtctccctggtggccgccgcactaatggtggatgcacctctcctgtagtgcctgaagcaattccgggtgcgacctcgccaccaacagagtgaattggatagatttttccctcgtaacttagtttaactagctcattgaaatattcgtttgctgctaaagaatctgttggaactccaagccgagcagcagctgctattgcgtgagcacaaggtatccctaaaccctgaaaatccaagcaagaacaaatagactcgtccaatttgacaataaaacattcaccagtccgaacttggacctggaactcaaagttgcaaatcggcttaacagacattgacatgacggcttgatagatttcctatactctttcctgcactctcgaagataaagtggtagggcagtcttcaacttgatcctttctaatagcaaaccaatccatcaaagttgttcttatgtactccagcatgcaaataagcgggtactcgcgtgcctctctaaaaacgttgtttcacgactcacatatgttactatccataatattgaaacgccgaccttttgaatgcactctggtctattctgaaaaccctatacacgttacaacatacatggttatgtaatttacaatcatgtcaaccactttactataactatatggaagctgaacaatataataatagagagtaaaacaaacgtacccaaatcaactaaataggcagcacatcctgggtttaatatttgtatcttgagaaaaatccaattgaaatcagtgacatgaaannnnnnnnnnnnnnnnnnnnntagtcagcagaggttttttggcttgtagagatgtctgacattccgccaaaggtgaacagtacaagcagagtggttggcttacgtatagacctgatgccaaagacaaaaaatcaaactgtacttgtcaattgtgaaccagattctatatgtagaataagtacatatctagcggtatactatataacacaatgcttcaaagcaatgttgtttctcaccttactcaagcccgtgtatatgctagcatgtcggtcagatataaacattaaataaggattgtctggagctataatgctgagccgctgaaagaaccattcatatgcactatcattctcgctgttaacgattccaaaagccagtgggaagatctgaaaattcccatcttggcaacatgctcagatgagacaaccaccatatcaccccttcatagatgttccatcaactacaatgaccttgcgcataaatgcgtaccctttaattgatgctgcgaatgcgatgaattgatatttgaaacggcgtggaccagtaggatcatcatcatactctgtaaagcagagactgcctgggtttgcttgttgaaggagtccagcgtaagctggaataagtgcatagctaccggccatagatcccaaagacttctccattgccacctctcgagctcgccaagctttccaatatgatatactaacatgatagtcgtcaagtaggaacttcctaatcactgcagcgtttggaccacgtttaataccaagaaagcgagattgcataagctcgcctatcacttgagttgttgctaaccggtggtctctatacctttgatcaatagtgcgtgtgtgtctctgatttgcatgccgcacttgaaagctgtcagaagaatcaaccttagaggcatacacccaccatggacaagtcctcgagatgcatttcaacaacataaactttggagtagaacgcgtagttcaaaagtgaaacttgtggttgatggcgtgtataactatcttattcttgcaatcagacttggacttaaatactctaccaacaaacagcttgtctccttcgtatttcacatcaaagaaagcagagcccacacctgaaacaaaatgaacatctttcagcaaatgtatgtattatgttacttaaataaagccagtc

SEQ ID NO: 18299 - DNA, 2232 bp, Arabidopsis thaliana landsberg
ggttgttgttgatgatgaagatgagaatgaagaagatgggaatgaagaaaaagcagagagtcttgggtaactctttcaatgaaagatccgaagagatatcaaacaaaaatctcatggatatgtaagtagtaggattcgatttgttgatatttggattataagtagtacttgttgaattggataatagaagtttgatatctggttaatactgctacatttgagaaataatattttgatttttcggtaacacaagtagaactagggaatactattataattttaggataatacgaatagaattgggtaatactggtagatttgagaaataatattttgatttttgagtaacagtagtagaactagggaatactattataattttagggtaatacgagtagaattgagtaatactgtagtgaatttttgataatatgagtagaattgggatatactattagtcaggggtggacccaccttaccacataaaggggcagttgccactgtcaaaattttggaatataatgctattttataaggaaaattatttatgctcttgtcaaaataaaatataatgcccctttccttctttatacgcacatatacattgacttttatggtttataatatttaaatgaaagtctatgtaagaaagttaaagcctaattcatttattaacatgataagcccaattatgttttaattgcgttagggttgtttcttctttcataaaagcagaaagaaaagtgtgagtctgagacaccagacatcgatattgagtttttttttattcttctctttcaattttggtcaaactttactttcgttaactcaatcaaacaaaaatctcttgatcatgtgattttcttctatgctcctagaatttaatataaacttttttataagatttttttttgttttattcctccaacatctttttttttcttattttgattttaaaagtattgtttcaatcggttttatgttgtttagttgaatgtttttaaacaattgatttaaattaatataatttactttttatagataaagcaatggaacgatattatcaaccaataacatcccaaccaacaacatccacttcaaattcttatcataatttggatgatttgccatcagatcttgctcaaagaaaaagaatattggattatcatccaaatgaaagggacaaggtaaggcgcaaatacttaactagaggtccatgtcaaccttatgatcatatttttcctcagaaaagaataggaactgcattgaggcgatttaatgcaagttggtttggtaaatatcctagttggctagagtatagtacatcgaccaataaagcatattgcttgtattgttatttatttaaagacgacataccaaaaagaggcaataattatgcgtttctggaagaaggtttttctctgtggaataaccctgagacactaagagagcatgtgggtgtgacgcccaacacatttcataatatttctgctaagaaatgtgataatttgatgaatcaagctcagtctattgtgcattctctgcataagcaagatgatgtggtaaaaaaagaatatcgtgtccggttgaatgcttctattgatgcttcaaggtatttgttgagacaagggttaccttttcgtggtcacgatgagtcaaaagagtctactaatagaggaaattttttggaactcattaaatacactggtgaacagaatgatgctacaagtaaggttattttggagaatgctccaaaaaataaacaagtgatttctccagtgattcaaaaggatactgtgaattctcttccataagaagttgtgaaatctatcatagaagaaatcgatcatgatgtgtttgctttgttggttgatgagtccgctgatatttctgacaaagaacatatggctattgttttttgatttgttgataagagtagagcagttaaagaaagatttgttgcagttattcatataaaagatagatattctttatctcttaaatctgcagttgatgggctattggcaaaatatgggttaagtttgacaaaggtgagaggacaaggttatgacggagcaagtaacatgaagagtgagttcagtggacttagatcattgatttctagggaaaatatttttgcatattacgtccattgttttgctcatcaacttcaggtggtcgtcggtgcagttgcaaaaaaacactttgatagtgtagtttttttacatgatt

SEQ ID NO: 18300 - DNA, 2775 bp, Arabidopsis thaliana landsberg
atgatttgccacccaaacaatttctagaaattctagatctgaattttcggatataaacttggagccaacctaggtttcgcgagtttgagtagaggattggccatacacgagttacgttccgctgagataagttcgagttgaatttttccattagggagagtccattcgaacccttggagaagcctggctaacaaaattgtatatgtttttattataaaattagtttggtttctttgttgatgaatttctagaactcaaccaaacaaattttatttcaactaaatctatatataaaagactttctgcattttcaaatgttctttttatcatattttactacaacgttgtgcatgcatgcctgtctacgtgagaaatgcctctcttgttttagaccttttatatagtgtaccactacttcagcaatttattatttaaaattattatttagcttttctccggaaagttacttgatttttagtgctaattgtttttctccaatatctataaaaaaagtggaatcttgagtttcaagtttcaaactcttatcggctaataaaggattctgttaagtctccgactctttcatcttcttccgttcaccagaatttcaccgaacttaatatggtatcagagcaactcttttgagcttctgcattcttcatcggagataagtctttcagctgattctctttctctttcgagaatttctcatttcatacaatctcttatagcgatttgcaatttcttcgtcagctacctatttctgttcctgattcttcttctttcattcatttgaccttttgtggtgacgaatcttgtttttctttttatttcgtcacactttctttgaattttcttcaacaatttagttgagaatgggttcgatgaacaatcctttgctttcgtcgtcttcgtccacctccggtcaatgtttctatatatgcatggatatgattgagttttacccgagagggtagtatcttatcgggatacatgatgtggcatgcataaacacattagctgggtgcagcggaaaagattctttgctacaagctttgatgtagtagagttgtggtatgtctgattcttgcacaagtctatttttaccaactattatgtccagttcatttgtggctctcgcaagaatctgtggatgatccatcatctccgctatcgtccactccacgttattcatcgtattgtcaatggttgcaatatttgaagttggattgtttatgaaatgttaatgttataaatattatattttggaatatcttttgaaaattaattgggttcacttcaacgggagatatgccatctaataacaaaaatcaaattcatttaattgtaaaatataatctgcaaccaaaatgaagttatatatcgattagttgtgaatttttttttaattaaatagcatattatgattggttaaaattattcaaaatttaacaataatttaattatcttacattaaaaactaaaaaaagttacaaccacaaggaaaattacacaaatttattacagtgaaggttttaatgaagtcgagagatgatataaaagcacacatgcatgaattgataaaataaaaacgtaaatggtactagctatttaacaagattatatgacttaatgatttatctccccaaatactttctagaagatctggattttcggatataaactcggagccaacctaggtttcgcgcatgcgagtagaggcttggccataaacaagttactgtccgctgaaatgagctccactgaacttttaccactagggagagtccattcgaacccttggataagcctggctaacaacatgatggttatagatgtcccaatcttagttcccggacagctacgccgaccggtgccgaatgtaacgaaccgcatgtccggttccatcaaagtcacgcccaatgacttttcgtcatggccatcaaggtgtcttgaacgcgttaggctcgtcccatattttaggattccgaccaagccccaaacgactcacaagaatttgactgcctatcattgcaaatttgaaatcgtacatatgccaatgttagactaaaccattttagaataaataacataattatttgactagctagatgcctagatccgattacaatctaatatccaatataaagttaacacccgccgttcctatgttagttggggtattttttttaccaaaataaaaaaatattagttgtttaaaataaaagttaaacattcgctgcattttcaaatattctttttctcatgcagagtactagtatataagttgtccatggatgtcttacgtcagaaatgcctctctcgttttataattattttataatgtaagattacgttagctatttaaggtttaatttattcatagttggataattatttacttgataagttaattgatttttatattgctaactttttttctttcaatatctataatatttgagctacttcgaactcatcaaccctatatcattaactgttttacctttggggacaaaataacccgcgagggtagtatcttctcttgcaacatgatggggcatgaacacattagctgggtgaagccgaaaagattctttgctacatgctttgatgtagttgagttgtgatatgtctgattcttgcacaagtctgtctttaccaactatcatgtccagttcatttgtggctttctcaagaatctctgggtgatttaacatctccgcgatcgtccactccacgttattcatcgtattgtcaattgtagcaagattg

SEQ ID NO: 18301 - DNA, 722 bp, Arabidopsis thaliana landsberg
tggaaagcctcgaagtaatctcggttgcagctgcaatgtgcatgacctatacaaaaccaaaattatacgaccgtcaagtagtacttgacagagcagtgagcatacatataggaaataaaagcaatcggttacacgaacaccgtaagcaattgaatgaacgttaagcatgcaaaattattggtaatgactaatgagaatgcaaactaaagcttacagttggaaaagtgtcattagaagattgtgatctgttcacatggtcatttgggtgcacaattttttcaccacgtttgtgaccaagaatctcagctgctctattggcaatgacctgtaaaaagcacaaaatgatctgtttaattacctcggacgtctggtggttaagtatctaaaaaatcatttttgacattgtaattagtcttaactcttaagccaaaatgccttgattgtgttgtttgatccctactaccatcatatgatgccccaccaatatgcaatattatttcgttatattaacacacacaaaaaaaacattatttcattactgtatatttttgctggtttttaattaactaggaagttccaggcccaaaccccataggtttttttttaccggaaaacttagattcaaaagttattggggtctttaaaaaatcaaaattaaaaattaggtctcttggcaaaaaggggaaaaaattttaaaatatcctttaaatattaaattttat

SEQ ID NO: 18302 - DNA, 914 bp, Arabidopsis thaliana landsberg
ctcccgcagtctttgcgtcggtcgttgaatgacgccaagattggactttaatcgattgaatagtgaagtaggaagacctgttgtgaaaatgtcagcttatttatgagaagcagtaatatgaatgactcgaacctcgccttttgctaccttctcccgaacaaagtgtatgtcaatctcgacgtgtttagtatgttgatgtttgaccggatttgtggagagatatactgcactgacattattgcagaataccaacgttgcttgattaataggacaatgtaatttcaaaagcagatttcttaaccaacatgtttcgaccactgcattagctactgccttgtattttgcctctgcactggaacgtgacactgaaccttgtcgcttagacgaccaagaaatgagtgtatccccaagaaaaacacaatatcccgaagtcgatcttcgagtattcagacacccagcccagtctacgtccgagtaggcaacaagtttagttgatggtgactttgtaatactgaggccttgtgatgtcgaccctttaatatagtgaatgagacggcgaagagcatgtaagtgactctctcttgggtcatgcataaacaagcatacttgttgaactgcataagatatatccggtctcgttatggttaagtactgaagtgccccagccaagcttcgatacaacgtcgggttttgtatttttggaccaacactttcttcaagcttagacgcaagatcaactggtgtgagactaggcttgcagttttgcatctcacccctggcaataatgtcctttgcatatttttcttgactcaagaacacgccattatgatcaaacgaaactgaaatgccgagaaaaaaacttaatcgacccatgtctgacattggaaattctgttttgagctttgtcacgatag

SEQ ID NO: 18303 - DNA, 600 bp, Arabidopsis thaliana landsberg
tagagtacaactttccttcacggaaatccgggaacttagggtttccgaagtcggtaaaggagttcatagggcacgggggggggggggggggggttggggtttggttatcaaacaaggtccaaatcaatccaaactctagccaaggcttcaaaataatgtgaaaagcttacataaaaagtttgggcaattttgggattatcatttaatttctaaaaatccagaactgttagtttaagctattttaaatactctaaaattccctatttgatttaaaaatcatgaatttatttttattaaatacaacaggaaattagggttctaagaaaattggtcccatattgttaggatttcctaccattttctacagtttttcaaagttctgctaaaaaagaaaaggaaaaactctaaacagtactgggccaaatctagttcaagcggcccagcaacacagggaataaggaagcgcccgccgccgcgttggaaatttctcagaaaggcccttggggttttaactaactggagatgtgtttggtacggttgtaccgtgcgctgaaacttgcagataacccctcgatttctatccttcccaaggagtcccga

SEQ ID NO: 18304 - DNA, 695 bp, Arabidopsis thaliana landsberg
cacaaagggatactgtcggataattccatagttgcaataaaaaaagctcgactaggagacagtagccaagtagagctcttcatcaacgaagtgctcatactctctcaaattaatcacatgaacgtaatcaagattttgggctgctgtctggagatcgagctttttttattgcaactagcattaggatctttagttattaggcatagttagttgatgcgactagcgttggttaactttacattagtgatttgagttatagaacggtgtgttaacaactctaatcatatataactagatctacagtttatctattttctgagaatatttgtatatctgacgtcttaatcatttgatctacatctttatgtaactgatttcttgttttaaattctttatctatttcatttggcttaatatcaaacatcaatagtttattgtgtgaacaacaaaattttagtggaattcgatcttaaaatactaactacgatcttttatttgagaaagtaaacttaacgttaatttgagatatatcagcgatctttttaagtaaagatgttacttgaaatttaatttgatctatatcatgtaccaaatcagaatcaactgtcttaatcaacaaaacggcattacaaggagtacatttatgcttcacataaaagctggacaccataaacttatattgatgtatatataag

SEQ ID NO: 18305 - DNA, 315 bp, Arabidopsis thaliana landsberg
tctaaatcatgcctatatcgatcttgaattttgtaaaatggataataattaatattttaacttactctatcaataattattattaatatgcaatcacaagaaaataaatataaattataaaataataattgtagagtagagtgttgaattttattaaataaaatcatggtaatatttaaaaattatatgggtgtctaatgataatgtagaagaaagagacgatgatatgaaatgttaaaaaatagaaaaaaatggtgtttaataaatttgatattgcacacaaacaaattgtcagttaatcctttttcactaata

SEQ ID NO: 18306 - DNA, 513 bp, Arabidopsis thaliana landsberg
  unsure (1)..(513): unsure at all n locations
taagctgtgaanaacctctaccgatgcacaacttacaacttttgaagcgaatgaaggagcatattctaattttgtatgaagaaagaactctttccatttcgttacatagaccgcagcaaaaaatgaggctaccaaagacataatcttactgcatatgaaacagcataaaagtaaaagtagatgtcaaaattcaaatcatacagaagaaaactaaattcttgtcgagctatctcccaaatcctgaaatacctggctcgtctctggtagaatcttgatgttttcttgaatacaaagctacatgataatatatgaaaacaataaatcttgtcacaagtactagtcaaagctaagtcaagtaaagtaatccaagtgacaatggtacctgtactcgtcactatatccatatgcaaagactatatcaggatactctactaaaaccgaagatgcacatgaattcatcaaatttagagatgtctcatcattaggcttttcaaacttgtgaacttgagaaaa

SEQ ID NO: 18307 - DNA, 1604 bp, Arabidopsis thaliana landsberg
tttaagggtcgttatgccccctcaaaaataaaggttttaaggtttgttggagttaaaaaactttaaaatttgaaagtttgaggtttgatggagatgttctaatcctctcgtttttttctcttcgatatatgaactgaaaaagtatgaggaccccgagaaaatctttgttaatgcatgaattaaacaagtacgagtgagtctctagggaagatgaagaatcaatctctaatccacgagctcaactcgaagcaggacaaccgacgggctgagaagcttattgcgaactgagaacgtagtgagttgagggcgctacgaggtgatgccgtttcgagctggttattccggcgagctggcttttctggctgagctggctggtcttgacgagcagacttctctcgacgaactgacttgtgttgacgagctgacttgtatcgccgcgctgacttgtctagtcctttctccaggtgtccaaaaaagtgtcttttcccgagactttctattccttatttatactcgtccgtatagtagggtacgcaaggtgaattcccgggagtgccccttttgcgcagccaaactctcatctcgaccaggccgggtttcggcccagtgggctggctcgggttctaaagtgatggtcggggctgggccgttatttcttgaaatgggccggctgatcattgaagcccaattgatgtatcaacagttgtcccccaatccgatgttcggttgcggacgtcggatttaacagatcagcgaaactgacgcgcatgtggctccgtccttttcgatgcagcgcgtggatccaacgtgccttctgattcgtgcacttggtttcttgcggattcggaagctcaagcggcgcgtaggtaatcattgcgcctactcggcagcgtgatgattacctaggtcatctctcgcctctataaatgtgagaaacacgctcagttttctcaggattctttgcagccaaaggtactttcttcttccccttctctctattttgagctcgcaatttataatgccgtcgtcagatatttccatcgattctctctccgaccatcgtcgatcttgcaccccggacggttcttcagagtgttctggagccgaccgttttcgagccaaatctcttgatgacgatcttggcgaggcgggatattcttcctctgagtcgtcttcgcaaacttctgttgtggccgagctacagcgccgcatttcttctcctctagttgaccgggctgaaacaagtgctgcggcgacaaccactttcaagccccagcttacagatgaggaaattggtgatgaggatttcaaggaagccatagcttctggagagatcgcgatcttcgaacctcgatctgcggttgggggaggttttgaggacgatgttaaggagatgacagtttctgatgagattggtgtttttcctgctgtattcggccctaagcccggctcgactgactatctgggaccaaccaagacgtcagctgcttctatgaataccgtgcttcgcttttgtaaccgcgccgcgtggatatgtgactcgggatccggaaacgcatgagcgaacttggaccactccggaggatcatatgagcatctatgag

SEQ ID NO: 18308 - DNA, 915 bp, Arabidopsis thaliana landsberg
attccatgtccagtgctatggctgggttcctccccttgtgatagtaggaataggagaacgtttccaatttccggcgaaaattgaattattctataaagaattccccgagtctctaagtagcaccgcgacttcattgacctcagtggtgattggaatatctttctatcctgagcacagctctgatcactctgatccagaagaccaccaagtggttaccaaatgatattaaccatggaagagttgacaatgtttactggcttttagtcattgtaggagtcttgaatttcggctatttccttgtctgcgcttggttttacagatatagaaacctgaatgatgatgatgatcaggaacaagatccaaaagacgatacaacctaagacacaacgtgttctgttcttgtggtttttgttgttttgatcatcttgaaagacccttttttatgacaataatcagacaacaaaaactctttcaacaactacataaccactctcactatcttgcttaattctaacagagtttgaaatgtgagaaacgtggtttgttttttttttttgttggagaaaaaggaaatcatttctgtatttcctgattcataattaataattttaaggtcttatcatacaaaagtgactcaatgattggtcgagagtatattaaattttaataaaatttatttaaagttcttgaatctttgtctatttatacttttcttatgcttgtggagtggtttactgctactgaagataaggcaagatatgggcgattgctttttagttgtttattacattcaccaacctgatattggcaaacgacactaggagatgaactgtcagaatctgatatgacatttttgccaccaaaaaagatcactaccaacatataataattgatatggatttgcttatatatata

SEQ ID NO: 18309 - DNA, 713 bp, Arabidopsis thaliana landsberg
acattctctacggcaattaagaaagcagaacaacccatcttaaaacagaaaaaaagagtataacaacccataattattgttaaattgttatatcaatatttttatgaacaaaatcaaaccatagttatattaaaggtttgttagaaagataaacaatattggaagataagttaacttcagttaggaggtcttattggtttataatttacaattttttttgataactttagtaatatcatagaagataaataaattaatgaaagattctaaactattggtaaagagtttttataatattattgattaaattttttacaattttgtaaactttttttaacaatctctattttgatattggtcgacaaatgtccatgtctacataaaccaataacacaatggtttaatttattaacaatcatacattttcttgtttcaattaaataacaatgactttataaaagtatgaatccaataactttagttttataaagattttatataatttttaaaaagttttaaactgttaacaccaaaccttaataaactttaaaatttttttgattaagtaacaacaaattttacgtaatattttaagtgcttaaagatttatttagatcataaacaaaagaggtgtagatttgagtatgaaacaagtacatattggtccacataaactagattttgtttttgccaggaaaaccaatgccacatat

SEQ ID NO: 18310 - DNA, 1902 bp, Arabidopsis thaliana landsberg
aatgtaactgtagaataagagaagggttatgaaattgatggtctgcggcatcgtcagatttaaatatcgtacgtcttttgtaaggtctcgtgattacaaatttcactcgtttagattttgtcccatcatttttctttggtccttttaacccgctcgaccaaatcatgacatatgcagaatttatttcatggatttaaacaaaaataatgatttgtttcatgaaaaatgtccttttcatttgtgctattccatttatttcttcccacttctgaatatgacgactacgaccacatggtgccagtacccacgactaaactatataatatacaatttattttatttttctccatacagaaaaatgttgggccataatgatattattttttatataatatgatggatattacccatttttttacatctcatttactcaaaaagtaaacaaaaaacctcagtggtgtttggttgcagatttcaaagtgagctaatgatatagattccagtttttgaaaacatgcatgggttcttctgatcaaaattccaaatacaaaaaaaaaatataaatttttttaaaaacagaaacaaaaaaaacaggtagaccaatttcaattgtactgttgctgatcaagccatggccaaaaaccagaatggtcatccattgcacagaacatgttactgatactattctcttctttaaccatactctgtcctgaagatgagttttgaaagaactgcattgttgtagtagttgtcgttgcggtggctggcgacggtgggaagaagtgtcgaccaactgtctgtggtggcggtgggtggccaccggttaatgtactgtcgtttgatggcggcgcagttgagatatctagtctgagattatctgaactgttatcacttctgttactgcaagatccttcagtttctttgtttagatttattgattctgtttgttctctgttttttaatcccattatctgcgtaattaaagacaaaattttaaacataaacagagttactgtacaatgtgataagcataaagaaactattgttttcagatctctttccagacaagagtgaaaaaaaaaagagataatgatgtctgaaaagtcatgaatcatgtccagtttattaaccctacctgaaagcaactcctgatccaaataattataaaccagaaatataatctttaacttttttcaaaaagaaaaaaaatcatctttttttacatggaaaaagaaatttaattatgagatcattaaccaaaaaaaaaaaacatattgatttttttttgttagattatgagattaattacctcagcttggagtttctgattatgagtttgaagaagatcattttcagctttaagtgcatcaaactgtcgtttaagagtatcataatctttctctagctgctttgttttccaacgagctcttcgattttgaaaccaaatcgcgatctgtcttggttgcaaacctaaggcacgagctagctgcattttcctctctggttcaagtttgtttccaagctcaaagttcttctctagtgtcttcacttgttccatgttcaatctcctcttcttctctcccatttgtgacccatcatctgaataatcctcttctccattcatattgttcccagtttctaaatcacaacacccttccattggagatctcttacctagaaacgaagcaaatcctgaaacagaacagaacagagcattagaaagagatagagatagagagagagaaaacagaggagatgtgtgtggaagtttatgtatatatataccatggagatcttgaggtagagagcaagaaggaagaagaggagcaagagatggagattgatgaggatgatcatcttcgtagaggtttggatcatgaaaattgaggggaaaatgacatt

SEQ ID NO: 18311 - DNA, 1504 bp, Arabidopsis thaliana landsberg
taaaccttagttagttatggctgagttatatgaatattacacggttgagttttaaatttaattagtcatggctgagtggtatgagtatgatacggctgagtttagttagttatggctgaggtatatgattatgatacggctgagtttagttagttatgactgagttatatttatacataggtatgagttttcattatttaacgcctgagttttcgttacgtttatgcagtcgaaacaagctgatgttggggtaagtaggaatcttgaaggagaatttgataaggtctccattgtgcctgattttgatttcgttgagactgtttctcctctcaaccgccgtttacgctctaggaagccacaatccccaaatgtgccaaagcaaaaaaaggagaaaacattaaatgagctaatccagaaaccgccagggagaagaggaagaaagccttcgcagcagcctaaaaaggtgcctcctactgtgccaaagattacaataaagaaaccaaaaccatctattgaagctaaggaaaaagctgaggaagattcggatgtcacggataaggttatatccgagtataatgaaatgcttcctgaatctgatgaagatgaggaggaaaccgagaggctaaagagtgtaaaagaaattcggctcaaaactgttaagctggccccggatgggagctcattgattaaccccgaagctatgcccactcacacttttccagttattggagacaataggctgagctgcatgagaaagggttgtctgccttcacgagcaatctatgatcctctggcaccgttgatccggccaaactgtagaagcttaaggcttatttgacaagtcccgaatggtatggccctttatacattactaagttgataaatacgacatgcttacactatttgtttatattaactttctttactatttgttagcaaacaacctttggaatatgggatggacaaggtgctgttctactctgttatcatggccgaaagaaaggactggccagacgagaaacatggatggctgggtgatgatgtaagttattgttatgttctgttctgaacttggccatgttatggctgtgatatcggaaagaataatttccaaatataaaaaaaactttatttattaaattaaatatctgaaatttcaaaatctatattatggtaaatatatttaatattagtatatatttgtaattttattatttttaatttattgtattttttattagttgtatattgttatttgttagtatatatatatatatatatatattttgtttgtaatatattaagttgttgacagttttcacgattgaggtatctcttatgagtacaaaaggccagcagtacgattatcctagaaagcattttcccatttattttctattaaaaataggtcgttttgtaatactccaaaacaccctcgccctaatttaacggagaattgtaaaaaaaagaaatccccgttaatggtaatttatgacatgcgaaa

SEQ ID NO: 18312 - DNA, 2612 bp, Arabidopsis thaliana landsberg
tgtatcgggcttatcggacttcaataaactcatgggcctcaagctactcatgcaaataaataaaccaataactcgttatgatattcatacgccaacaacattaggttgaatataaagaaaacattcttaatacataaatcaaacgaataacgcatcgattggcattttaggtacgacgaattcggcatacatgagaagatttccacacagatccacaaccatagcaaaactgatatccacacctacaaattcacagaaaacaaaataaacgaatattactaaacaaaaggtaatggtttaaatttaaatctaaacacaaacctgcattttatatgtagacaaccctcgactttatcaacgtagaatttgcaactaggacaccttctccactgtttaatttttgccagctcgatcaccaaagcatcgtcttcatcactactcttcttcttcgtattcccaaatctctggaactcatcacagtcaataccagcgtgcaacgtcaccttagtaccttacacagcacacagaacagtcggtgacaagacggacactccgtctgcgtcacgtttgcatcaccgccttcatcgttcaccatcatcgccgaacagtctttgaacggacagtagaatttgtcccacgaggagatcaaagaatttgtaacacgtccttagggattagatctcgacacgtgtacggctcaatcaggtgcgtacactcctcgtcagggcatttgatcctcgctgcgttttcttttatcttcgtcgccacgtaacgtacggtgcagtcggtgcagtagaagtgaacacagtcagtggttcctcggaagatgtcggaggaaggtttttcgtccaaacagatcatacagaaccttcttgatggttcggtgggttccttctcggtttttatctccggttcctgcttaaccagcgtgactagattcctatggacttgaggatgatgattaacaccaacagtagaagcgccaaaagaagaaaacatagcttcttggagatggatctccgtattatagctttcgccggcgattgggaaaatttcatcgtaatcgaataaagcagagaggtatgtttcatctaccaacgcatcggtgtccgtctttgtgcttgacgatgatgatgaaccatcattcatcgtaaagtcttgttgtagtgtttagtgcctatgagtcttaggtgcattcacgttaaatactggggcgttggatgttgaattcgaagggtttccttagttaaatgcataagattaattagttcaaatgaagatagcattggaatatgaaatgttaagcaattgaatcgtagtcaaatgccttttcgtatctctagatacataaatatatatatttatgattgaatgtattgtacggcaaaaatgttacattaacatagtatatgattgaatgtattataaggtaatatatgatatcacgtatctcgttttctttcaaatccaatgggacatttgtcgattattattaatttattattaatacaatgttttgattccatatttgtttagcttcagacaaaagtaaggattttcacgttgtttggatttggtaaagcgaagcctaaaactgattgatgggtcatttccttgttcgtcatgtgttccagtcgttcaaagtagaatcaatcttatgataacttttgtaaaatgttttgaccaaactaatttataagtattaattagtttatcgtacgatttgaagggcttattaaaaattacaaattaaaaagtatatatatattttttatgtttttatttccttaaaagtctagaattcatatggttacattatattcgacctttgaaagcataataaatacgagttacgtacgatgtgtccatgttccaaagaaaatccacctgagtaggtcgatgtttattgtattattgaaccattgttattttacctatatacagtacatgactacattctaatgccttttgataaacccttgatagagaccaagcagtgtttttttttttgtttttccaagcaatgtgttgtgttcacgtgtttttgttattttctgctatatattttttcttacaaaatatataactatctataagaatttaaagttaaaaccaattattgactatggaggaagtctagtaatgagtagagaagctctctaaaaagaggacatagaatggaccttttctctaatcactcttctttatcgcttttgcttttagttttgaatcaatgtcgaaccataccaacgacttttaaaatcttaatttttgttttgtttttccgaatccattccatgggagaaaatttcgaaagagtaaaattgtaaattcatgtatcgggcttatcggacttcaataaactcatgggcctcaagctactcatgcaaataaataaaccaataactcgttatgatattcatacgccaacaacattaggttgaatataaagaaaacattcttaatacataaatcaaacgaataacgcatcgattggcattttaggtacgacgaattcggcatacatgagaagatttcacacagatccacaaccatagcaaaactgatatctcacctacaaattcacagaaaacagaattaacgaatatttc

SEQ ID NO: 18313 - DNA, 1027 bp, Arabidopsis thaliana landsberg
  unsure (1)..(1027): unsure at all n locations
caaacgttggagctgcagtggcatactcggtttggaacctgccttctcccaaagatttcactctttttgtgtccaatccgcccgtgacagatagcaatttgggtcttagagtgcgaccttctgctgaagaggtccgttccttagttgcttcgctcggggagatacctgatgatgaacggcagatttattttgaagtgcccctgaaccctagtgacgcagacataaatgacatgctcgatctgctagctgaggattcatctgatactgctcctgatggtacattggcagtggtgccccttccagaggttgatgcgaccttggacgtctcgaaacctgtcagtactcgcccgaggcgccctagccgaaccagtcagcccgagccttctgctgatgagcagaagaagaaaaggagacgtctccggcgagtgtccagctttgacgaggataccagcaccttggctcctgctatcgaagaaatgtctgcaactaggcttgctgacattgatcccaatgggtgtgctccacctgctgctgaccccaatgaggatgctgcttgcgctgttgctgtggaagatgaggaggaagaaaatgaagctccattaactcggaaaaacagtcggcagttcgtcgccagtggtggaagtagtggagttccttctcctgctttgtccgcccttattggtctgcaagaactgtccatggccaattttgatcaaactctagaggatatggtcccagagaatttgttgtcagagcctgtggatgttgatgcaacagagacttgtgctgccgcgcatgatgttgggctgaggtcatcccgtgcctcgtcgaccttagagcgcgatctcgagggtcaggatgctgacttggattgtcctggtcccatggaagtggctgagggcctgtcaaccttagaggtggttctacagagagcatgggcccaagaatggtgctgacacatgccagccccgaggatgcgctagggcaagaatgtagcactgccagccccgagggtgttgnggggatg

SEQ ID NO: 18314 - DNA, 439 bp, Arabidopsis thaliana landsberg
gcacttcccattccaagctaaaggcaccatttttacaaataatagcctttagaaatttgcatacaaactaccaaaatcatattaaactagttttatagtacggcaaatatacaacaaaatgatatatataggttgttatataaaaagattaaagttgatcgattgtagattcttaatactttgaattttggtgtgaaaaatgatttgaaagtataataaatcatttattttagtctataaagagatgcaaaagatttgttaaatgtatacgttccataacagaaagggaaaaatgtgatcaggggagacatatcaatgtaaaacgtaccatgataccaaatgaaaagccggcgatgacggagttctcaatggagacggcggcaagagcaagagtgctaatatgtccggcgaaaacttgagtgacggctccgagagagta

SEQ ID NO: 18315 - DNA, 1035 bp, Arabidopsis thaliana landsberg
aacacattcttctggatgattgcactacacttgtgagttaacgccacagttccttgaacttctttgatcctctctgtaatcatgtccttcccacgtttgtgtgagtccgatattagcgcaagagagtctactagaggcattgtgatttcaaggttcttcaattgtttttccaagagagcttcatacttctttattagttgcttcttgaatctccctggaaatggtagtggaggcttgtatggtggaggaacaaagactttatccttggttttagcagagacaagctttttaacagaagaaagtactgcttgagcttgcgatcgagtactgcgatcgagtatggggtcctctattgctatttcagctagaatttcattctgaactaaatcctccccttcttgaacttcactgtccctagtgatagaggtagaggcatgtcgagttggcagctgtcgatcatggcagatagtgatggcgtgagcagtggcgtactccttagggttctggattgctttccctggaagctggcctgggttgttattaacagatggtgaagcgaggatgccttccacatatttcatcctagtgctcagtgattcaaacttgctgttaagttcaacgccttgtaggtcgactttgttgtttaattcagcaagcttcttagcgatttccattgctcctgtggcttgtccttgaatgagctgctagagcatttttattatgtctgaattctgatgcgcatgtgcttgttgttgatgtggtgtgaaaccaggtggtggctgatgttgttgatatcctccttgaaactgctgcgttggaccaaacccttggctttggttgtaaggaacaaacggtttggggttgttctgctgctgctgagggtagacttgatcctcagggttggcgatattggtgcttcggtatgacagatttgggttgggtcagtaattgttgtatcccttgttgtagtcaccttcattctgaacatagctgtcagcacactgatcattctcctcctcctgtccttgggaaagt

SEQ ID NO: 18316 - DNA, 1355 bp, Arabidopsis thaliana landsberg
gaatattcattttatattgacactagtaaaaaaactatgtatagccacttcaattttcgtggctaagcatgaatattcgtggctataagtcgatataaccacgtttagtcacgcaaaacattcgtggctatagtgtcgtagctttattttttcgtggcttttcgtggctaaatagccacgaatcagtcactctgcaatcgtggttatatatagccacaaatttgtcacgagaatttcgttacaaagttagccacgaatcagtcactctgcaatcgtggttatttatagccacgaatttgttacgagaatttcgttacaaagttagccatgaatcagtcactcttcaatcgtggttatatatagccacgaatttatcacgacaatttcgttacaaagttagccacaacataagaacagcaatttcgtggttaaatttaggaagccacgatttgattatgtagcataatcgtggtaagtcatgtaaagctacagatatgagaagtagcattatcatgacaatgttatcaacgttttgtatgtttggtgacaatattagcgacgttcaaacaacaaaatttcatttgtaatatcgtggctttgtataaataaacctgaattgaaaagcctaaaattcaaataacatgagtaatgagaatattttacataagctattagtcttgtaggggttacaataccaaaagacaaaagagttgtaaattaagtcataacaaagcccccatacatacaaaaggaacataaaaacagaagcttataaacctagtgaagcacaccaagcatccaaagggctttgttgtgctcttgtaggtggtatggtcggactagcagcaggagagacaacaggagaagtagtaggagcaggagaaccatcatgaccaccagcagaaccatgaacaccaagaccagcagtggcagcaccagcaacaagttcaggtggaatgattgtaactcccagagacttcataatcgcattcagcgcaagtcgggttgtcgccaattcgtccattaccttgcctacaccagacttcaacagcaacatgtcttccttgagtgcttcattgtttttcttgagtgcctcattggttttttccaaatcatagatgcgcaactcattgtcaaggttctgagacatagcaacaacatgtttctctgatcgattgacatcccggtattgaacactacctaatccgtagatatacccatttttagattggccacgctgttaaaaaacaaacaaataaaaatcaaccatcattcattaaaattcaaacacaattagagataaatagacaaaacagaatcaatcaaaccaatgagaaattcagatggacaagatt

SEQ ID NO: 18317 - DNA, 1365 bp, Arabidopsis thaliana landsberg
agtgttattcgattagacatttcacaaattcttttaaattcttgtgttatttaacttgctcatttcttaattctattagttgcaagtgttattcagttttcggtagttttgtttgacaacgttatttcacaagaatttaatagaaaaattggtctaaaatgtgaagaacaaattctgagtttttgagttgagatttggatagaatataacacatccatcctttttttctctttcatcgatttgcttcaaccatacaaaaaaaattctcaaatctgagggagagtgtttaacacatttattagaatctgtgatttcgatccggtttattcttcggatcatcattcgttcgattatatatgaggagagtgcgttaatctatagagagcagatgagcggaggttgtgatgacgtcgttgtcgttgttgtcaaaatatggatctcttccatttcatgtaaacgtcaacgtagattgtttctgggttaagaggtttgtgaaggaaaaagtacagtttttagagattgggcatggtggctgtcccgataaagagcattgtggaacaaaagatttcagtaatttatcttcttaattctagtagaattctattaaaatactgcaaaatatttatttgaattgagaagaaagattcgaaattcttttattatacctgaaaatctagaatttatgtccaataccccccccccccccccctaagatatagattttgtagttaatatgttcttgtaatctgtctgaattaagtacaaaaatactgaggcatcatccgctgaaaatgctgtgatttgatattttcccttagcgcacatctctttgcttggttggtatttgtttggtgttgttttacttctatcattatcacgtcttgggttgtttatgatctgtgcagaaggcgtcgcgggtgatgagtcaggctgctcgactcaatgaagtgttcacagaggtaagaagggtccctgtgatccgccctgctctaccatcgcctggcgcatggccggttttgagccttagatgagaagccgttttctacaatacctagacacagtggagaatcaatcatacaatgtccatcactttatgtaccgtaagaatacaaatacatgtgtttatgtcgtacctatgcataagtagtagtttaccatcttatgaaatcgcgtatgtgagtcgtgtcctaccgtgggatacactgcagagtgattccgtagcgatttatgtatgttcagagactgaaaatcccagttggtaagcctttttctatgtttgatcttaagaatttcataagctatatgtgggttttgttatggatttcattggggtttcaagttgtaactattatagagagatgcata

SEQ ID NO: 18318 - DNA, 1472 bp, Arabidopsis thaliana landsberg
ccttgcattttgcccctaatttcctagcaatcacttttctatcctttctacaaattgcaaaggaagcattgcaagcatgataaattgtagaaggttcattagtcttcctagggacatgagcaacatttctcctaaccacatttctaccatgcatataggaagaacttgaagcaaacattgcatttggctcataagcattacaactcctaaaagcattcctagaatgtctcttatcatgatacatgaaagcatggttcttatgagcactactagccataggggcctttcctttctccttggcggagatggaaaccttatggcctgttaagttcttgacttccctcttgaagccaagaccatccttaattgaggggtgtgctaccaatcgtgtaggcatcccttgcaaattttattttatcaagttcactcttgctagtcttaagttgagcattaagactagacacttcatcattcaatttagaaattgaaactaggtgtcactacaagcatcaacatcgaaatctttacacctagtgcaaatctcaacatgttctacacaagaattagatttactagctacttctagtttagcatttaagtcatcattaacactctttaaagtagcaatggttttatgacaagaagatagttcactagaaagcacttcatttcttttaacttctaaagcataagatttttgtgcttctacaaatttgtcatgctcttcatacaaaaggtcctcttgtttttctaagagtctatctttttcattcaaggcatcaatcaattcattaattttatctactttagttctatccaatcccttgaacaaactagagtaatctatttcatcatcactagactcatcatcactggaagaatcataagtgacattgttttgattgcataccttcttctcccttgccataaggcatgtgtgacgctcgttggggaagagggatgacttgttgaaggcagtggcggcaagtccttcattgtcggagtcagaggaggagcagtccgaatcccactccttgccaagatgagcctcgccctttgccttcttataattcttcttcttctccctcttgatcccttggtcctgatcactatcattgtcgggacagttagcaataaaatgaccaagcttaccgcatttgaagcatgagcgcttccccttggctttggtcttgcttggctgtcccttgcgacctttaagcgccgtcttgaatcttttgatgatgagggccatctcttcatcattaagtccggctgcctcaatttgtgccaccttactaggtagcgcctccttgcttcttgttgccttgagagcaaggggttgcggctcgttgatcggaccattcaaggcatcgtccacgtacctcgcctccttgatcatcatccgcccgctaacgaattttccaaggacttcttcgggcgacattttggtgtacctgggattctcacgaata

SEQ ID NO: 18319 - DNA, 1367 bp, Arabidopsis thaliana landsberg
caaaacagaaccttctacttcatagagagtctttcttcttccccaaagtttcctctttagttactcccccattgcttgtgaccaggggaccatttaggacacttggggctgaagtaactatcaacaaccctagagtttaaaagctcaatgatcggagcaaacttcacacaccttggtgtcttgtactgattgatcgatgcacccaagcttatcgcataatccatgagcttatcgaaagtccctgactcgaccatcttgatctccaatggtccaatggacttatcactgacccttgcttgtctatacacactgttaagtgattcctctatggttaaacagcaatcctcgaagaccgagggaggaattggcgtgttaccgttcaagcagagctcccagaataagacatagtggcccgggatagatgatgtgtccgcatagctagtgtactcggagagcgacgcatcaaatgggacaaggtgtgtcactgcgttcttcaccgcgttttgaagctcaacctcgtcggtcttgtcggaatgggggctcaagaccacatttttgcgacatatgaaactgaattgaggcgctttgttcttgaaaccagtcactctcaataaatcaccaactctgtatctgcaaagccctgcaacaaatacacaaaacattagaacagacccttaaaaaatttctaatcttttgactataaatgaatcaagaagttttgttttcttaccggcgtaagtggtgacaacaagctcgtattcctgaccaagcttgacatcaactagatcaacaagctcttgttgctctttctcagtgagtgctttatgaaggttgatggacttagtaacaccgttgtttctatgaacaggcaagaactcgaaataagccatggatggtatgagcgtgtaagagacctcgcttggtttgcagagtggccttagattcacaccaaagtaacactcagaggaagcatacattgtgcagacaagaggcaagccattactgtagtagtccaaagttggaatgtattgagacattgtcccggtcacaatcacatccacatactttgtgttaggccacagcctagtaataatcccttgccaggacgacttcttgcactcaaattccacgaaatcagctagctttgggctcggtttaaggatcttggcgaccgcctcacgcactgaaggatcggtgatcagggaacttagagtcccggttctgatgtcacggaccaactcgatccagtgtttctcaagaaacttgatggctctgatgaatccagaggcgaaaacagcgccgactctaagaacctcctggtgttgacataagccacaaagcatctgagagtacatgctctggtcgta

SEQ ID NO: 18320 - DNA, 1787 bp, Arabidopsis thaliana landsberg
gaatccctccccaatttcttcaaaagtttttgtacttgttgtcagcctctctcttttttgtttgttgaagaggattatgaagaggagccactggaggaggaattgtagccgtaagggttattgcttgcccaattccatagatccctacacatctcctctatcccattcttagtcctgcattcataccataccaaacaaaacaaaaaactgcctaaataccatataatttaatcgaaatgttgatgcattgattttatgtttgtcattcgtatatttacaaaatgaaatgagcttacttacaatttagttcccgttcttttttttttcttttttttttaatttagaatttagaaaagaaaaatgactcaataacagaaaaacgaaaaaaataataagagtgaaaaataaaagcatagttagtaagcgcctccctcagacctaaacgtcactgtccccagtggcattcaagtccaaagtaagcaagaaaaatatattcaaaattcaaaactaaaagattgagtaaaaaaaacatactagtgggttgcctttcactaagcgcttgtttagagtcaataacttgacttggcggagttcagaacttggatcgagtgatagaagacttgtgctacttggcggattgcaatcttgccttccaagggggtgtgtaaacagatcggctccgtgcagcatcatttgtcgatcgatactctttctgttatctgcaagatcagcagaagaaacaagctctcgagaatctcgattcttgtttacatgtgaagcacatttcgaagagtctaaagaaataatcaaagtaacagttggataagagatagaggagtacctatcacagggaactaaagcagttgtgggctgtggaagaggtgcagaagcatctgtctgtgaagcgcgatggtatcgatcgacatggggtgtggtgtcgatcgacattgtctctctgtaatgctcatctgtgggctgagctgtagcagcctctatagttggcgttggagttgaaatctgagcagccttagaggtgtgtctttgtttgttgcaatgctactgacaagcaatttatattccgaaccatccatgccaaactccatctgcacatcgcatatgttgagagatatcattcccttcttcacatcaatcctacctccaactgtaggtagcaaagctctaccaaggataagaggatccttgggttcttcatcatatgccaggaccacaaaatcagcagggatgaggcaattaccaactctcacaggaacatcctcaaggataccatcagggactcgtttggagcgatccacgaagaggagagtgatccttgttggactttagctagtcacgcctagtatctcagcaacagactttggcatgagattgatgaatgatcaaagatcacacagtgaatggctgaatctgctggaggagatagaacagtcaagaacgaagctacttggatcgaggagcttttgggctcgctttttcggagtgatagtacagatttactcaacaatgtcaactcttcttgttgtgtccgttgcacgacgtctctgaggtgttaagatgtcttgaaaatagtttggtgccagctcctcacgttgtgtttgttctggtatgtgtcaatcgacactgaacgagtgtcggtcgacaccgtcatgcactgaacaatcctctctgtccttagtggaagctgtctcatcatctgatacgtcccagattagactcctgtgtgtcaatcgacacagagtagtgtgtcgatcgtcaccctcgtaaggaac

SEQ ID NO: 18321 - DNA, 654 bp, Arabidopsis thaliana landsberg
gcaaagttttcaaatattttgtgtaacaacaaaaaaaaaactaagaaaccatggaaatgtaagcgtttgacatattgttaagctgaaaaatgcaataatttcaagaaaaaaatatctacacccgaactagagaatcattccagtttaatactccctatgtttctatataaatgtagcttaagggtttttattttatttttaatttaagtgttgttttcaattttctatgcaaataataaatgtatttagtattctttaaccaattatatttaatcatctatttttttattggtcgaattggttataataaatgatgtttttatataaaagaggtagattaaatgagatttttatgatttcttaatttgtgtgtaaaaaccttaaactacaactaatatgaaacaaagggagtatataatatcgtccaattcctctggctcttgctacaataaaactagagacaaaaggtggtgatggaggataagtgagtaaatatcatataaagtgaaaagttaggatttacatgtagaatacctaagatttttagttgcttgggcaaacaaattaaaataaaaaaacaaggaagtaaaccaaacttcaaagggaaaacttcaatcgagccaaatgcccataagggtaaatatctttttttcg

SEQ ID NO: 18322 - DNA, 1603 bp, Arabidopsis thaliana landsberg
  unsure (1)..(1603): unsure at all n locations
gccgttcctgtgtaaaggttttttccttctttttcttttttgaatttttaagcnctgctcatcatgttgtgattcaacttaaccaaaatgtgaaagatctatcaataatctacagatttctaccttaaaactgaagttttggacaacttttttcctcaccgatttgttttctgttttgtcaaaaacaccggccaataaaaatgtctttacatcaccagcatttctaataccgaattctaaaattccagataagaaaattccaaaaaatttcaactctatgctacatagataacaaaaacttcaaaattcaacagatctgattccggcaagatacaccagaactaatgtgaaagtctctaactttcatggccgattatttttcttagattgactgcaaagtcaacaatcacatattcactgaataatgacttcctgtacattagtggcatgagttgtaattaataaagttgatttggggtattattgattttgtatttggtagggacaaaaagcagtgactaaaaatctaattatgaatagtatactgcctagttctctaattatgtttcaaaaagtgactaattcacaacttaaccctattttattcgaccactaaattattgagctgaaaaatatctcgagtgaaaaatatgacacatatcaattacttttataatgtattgataagaaagattaaaatatgaaaatcaaatatactcaattgctataaatcttttaccagctaacaaaggttgaagaataaaaactaaaatctaatttgacatagttaaaagatataaaaacgataatatgaatattagattatttaaataccttataaaaataaaattttataaatgattggatcgagtctccccgtagtgattactatccaaaaatacctataaactttataaacttttcatattcaattagggacttttttgaaaatagacaactcaatggagcatttttgaataatgggacatcaaaagaggcatttcaataatttcaaaaaatattacttctaatttaaaatattaaaaatgatctcacatgttccttgttaaaaagaaattcaaatacacaatattaaatttattttagttttcatatattttattagaaaaataaaattaaaatgaataataggaaattttagattaaatcatgacacatgcatgttgcaatgtaaaattagaaacactatgatatatgaatcttatatagaatctaaaaaaatatgaaaataaaaataaaaattattagaattaattaaaataaaatagaaaattataaacacgattatatatgaatctacgataatgcaaaaataaaaaatggaaaaatgaaaaagtaagaaatttaaaatatacaataatatattaagttaaatatttacaaaaggaagaagtatatattgatgccatataattctaattgtaaaaaaatcaaataaacaacatgcaaacttaattgaaattttacatattttaactgaccaaaattatgaagttatcatataaattttaatttaatcatgatatatgacaaattaatcatgatcgtccactaactattaatagaacttttgatataaaaa

SEQ ID NO: 18323 - DNA, 603 bp, Arabidopsis thaliana landsberg
agacattcattttcatatccagttatactcagcattttgtactaaacttatattgatatcaataaaagaattatgtactttaaatctccagtcccttaaatcatttcagttgatgcttattcattatatacgacgaagatcttaattagtttccaccttttatataattaaactcaaatttctcaacagtatctagaatgtttcgcttcatttcctaatccacccatgttggtatcatatatatgaaaagaaaagtttaccaactaattttttcaaatacatacacacgataatttagggctttagaaaataaacgaattttttttttgtctaaagttaatagtaatcatcattttcaatctttacagtattagttacactttcgagtaatcaaaactaaaataaaaaccaaataaaaagaaaacccctacacaatataatataatccgtcttatgaacatatcttaaaattaattctcaaataaatggtcacatgtagaatcatttaagacttttggtttttgttcttctttaaatagttaacgacgctcttaattttgttattacacaaccacaacggtcagtttggatacaaaactaaac

SEQ ID NO: 18324 - DNA, 1443 bp, Arabidopsis thaliana landsberg
  unsure (1)..(1443): unsure at all n locations
caatctccaattgcattataatcctattctttctatcttttgaactatatatcaaaagttgcaaactctatctatcaaagaagaaaagaacacatctctgactacatatgccattcaaaaggtaatatagtaatgtgcctaatcttgctacaaaacttcacctgaactccttgccataacttttcgagcttgctgtgttgcattctcagtacaacgagatatccagcatgaaagttagaaggcatacgcctcatcgggtagtcatcccaactcagtaatttgagtttaggggggaaaaacttgtcaaagccttcttgtaggtgcaatctggcttctttactctgcttccctaatttcttgtaaaatcttaagaacctgagattaggcatccttttgaaggctctcttatgtatgtgcaactcctcaatctcagacatatcaaatgatatacctaaaacctttttcgtaccctgagaaaaagttgtaaagatcagactatgctgtaagagttgtagaagttgtatcaggtggttatgaaaagagcacttacagtgttatcattaagtacatccaaaatatgcttcgaatccacaaggaattcccgttctccaggctcgtaaatggactgttcccgaacaatttctctacccatttcttgtagcaaacggtgcatctcaatagtatcctctcttgcaaatatgagagacttatcaacaaggttttttaacccaatattaacatccaagtcactctctgctagaagcaacttgatgtcataaactttatcaccattgaaaagacatgcaatgtgacgaaataatgcttcatcctttttgttgtttaatccatcataacagactcttagtgtcatctcaattttcccatccaaatcattttgaagcctcggcatcacatctacccattcctctttgtccctacnccgtagatatgaacctaaaacgttaagacccaaaggaagattgccggcaagcaatgcaacttcagaagaaagctccataaaaccatcaggtggagatttcttcctaaaagcataccgacaaaacatctcaagagcgatgtcttcagatgggacaccgactttgtaaatgtgatcaatcccatgagcccttaaaaaatgcttattctttgtaaccactatgattctactcccacttccaaaccattgagtttgacccactaaggcatctagcacatcttggtcatctaaatcatcaacaaagataagaactttctggttctttagcatcttttcgattgcacctatctgatctatctatatgtcttttttgtctaacatttcagctaaaaaagttctttgcaagtgcaacttcatgttatagtcgactagactagctctacagaaacaaccatactcttagatatgaaaaccttgtctatgaaaacactacgtcgcaactgaca

SEQ ID NO: 18325 - DNA, 760 bp, Arabidopsis thaliana landsberg
ttaattttactaaaattgaaacaccaaaaaactcataagaatctagacggacattttatcgctgtataaaccgtttttttttatctacatatacatttttgcagccattttgtaaaataaatcctttagttaggacttatttacaaggaatgacattgacattaattattatcaattaattaatattcctaattattagtattttcttatctaatatatctccatcaattctaattacttttgaaaaggagaatcttagaactttattaatattatactttattaaagataaatattgtagttatttaaagtttaaaaaatgtttagaatatttaacgaaaaaacgtttagaatatatataatatatgaaatctataaaattaaataaccatttcaaaagaaaacttttaaatagatttgaattataaatctttttataaaaatattactagaccaaaaattaaaatataatgtttacttttaccgaacttgattagatggtgggacgggtttagaatattacagttcagtgaatttataacaattaaataacatacttaaaagaaaatttttaaataaatttgaattatatatcttttaaattaaaatattattaaaacaaagataacaaaaaaaagatgtttaatttcacttaacggcgttagattgtaggacgggtttgagtcagtaatacaagactgtataccacatgtgaacttcattagatatgtttaagttgactgaacgggattaggtggta

SEQ ID NO: 18326 - DNA, 1502 bp, Arabidopsis thaliana landsberg
gaataaaaaatcttaaaactctatactaaatcagattaattgatttattagtcatagacatataattctattgggacgtatatgtttttacttcattgtagccatgtgatacttaaaaagtagaaagtaataagtgtttaaaaagttctgttgaattccatacctaaaaaaaattctaagaagttgcatttatagtttaaaagtatttatgtcaaacatgctcatctagtttataggacacggtatgccttctattttatccgatagaatggcaaaaagtcaagtcaccggcccatcgaacacgcttatgtaataaagatcacgacttcagaactctcacgttgagcagtcgccattctaaagcaaaacagtgtttctattttattttttattttttattaaagagaaacaaatacaaggtcaagcaaactgaaagaggcacatataccccaaaaaaacgcatatgccaaacaacaacaacaaaaaaaaaaccaaaactataaaaaaaatcttaaacgctccagaagtccggacacaaaaggagaagagaccccttaatctaagaaaattaaccaagcggatagtagagaaaaccatggaggagcgatacgttgctttctagcaagatgatcaagacgcgcccacattaacgacttgatgtctttgatgattgacatggggtcttgaaattcgtagtgcggatacgagagttacattccttccaaaggagatagaccgctgcctgaaacacaattattatgatcaaatcaagatttggatccctagtagccgagtagacccagtgaaaacaagccataaaatggtttggggtaaccaagtgtcgttagctcaattggtaaagatcttagacaaagtttagagattgctggttcgagtgacgcttaggacgaaactaatattactggctgtagtttcgggtctgggagattatgagcttcggtccaaaacctcctgttattaaaaaaaaaaaaggttcaaacaacataacaggtaataaaaaacaagtactctcttaactcattagaaccgttgcaacgaacacaagagggagagataaaaagtccctcgatcctaagtctatcacggttcacgggggatgatggtccggcttccacaaatagatgtcatcatccaaaggattcaactcccataaattcctattcccattgtttctgttaccagtatttctattttataaaagaggattaaaatcacggcacaaattcaaccttaagcattaaaattgaagtacaaactcaaaagacttcccctaagctttccaattaaaacccgaaaacgcaataagaacaccaatatgattggagatcccaaatgaaatatgtcgtaatagcttgatggtattgattagcaaagagaagtatttatatacaatgagtttcctatattacgacaagactgtatctaagtaaatctagttaaataaaagattgacatatacatatctagtttaatatctaaag

SEQ ID NO: 18327 - DNA, 1223 bp, Arabidopsis thaliana landsberg
aaaatcttatataaatctattaaggattaaaccttgtgataaaacagagtccacaatgtccataaagagaggagaacaaagcatacatatagtgagaaccgaataaaagtgaggcaatgtcgacactcgacactcgacactatgacaagttaaaataatctttcaataaatgattgaataaacacattatcagggacagacacatgtacacaagcaataaaacatgaaacattacaacaacaaaactgaatttttatttttcccttaaacacgcagtcttatcatagacctaaaatgtaaacaccaaagctgccagagtgatcattccccaaaatatttcactatttcctgaaaaaaaaataatccaaacattacacaacatatataattactgataataagtcaaaaataacgcaaagaaacaattgttacccaaaaatgtatatatggctcacctttaatggagcaagaaccgctacggtgatacggtgatggaagcggcggcaatggtgaagttgtgatcatataattcacaaaacagttaggagtgaagatcatagcccaaaacttgtcactacaacagtcgataatttcttgcaacgcatattcaaggcatatggtacagttttcaggattcaaatgtggactacactgaacaagagagtcaagatcgtaggagccatcaaatctagttacatccaagtaataatacggcgtgagagcggaagacaacgtagacgatcttacgatagcctctcccattttcttatacaatctctttttgaacggacctagtgatttcggtattggatcatcaccgctccaaatgctattaggctttttctcaaaggtggagaggaagaacttatctgagtaacgaaccatacaatcgatgtagtaaatgattgcttctcgatggttagtacagtttttgacaatctcgattgttgcattcttgacgcaattgttgcacgttgttatgttgacgtcgcctgtgcataagaacattccatagactgtgtctgaagctagaccagttgtgagattgtaatagttaacgatggatgattggttgcgaaaagtagagagcatggtgttgagatttttgttgtaagttgtgtttcgagtggagtttctggatgaatcaatgcataaagtgtccatgtggtccgattcgaaggcagcttggttcatggtgaagaaaaaacataaaagagaagaga

SEQ ID NO: 18328 - DNA, 1995 bp, Arabidopsis thaliana landsberg
tgcatctcaggcggtatacgctggtaccgaatctcttccacagtttgttgagcgtacgcgtccgtggatgggggaacggggggcagttaatccaccactcaatccgtatggtatctttaatccatatagttgtttcattggtaaaatggcatagacatcttgtttgttaagtattcaagttaacattacttcattttcatacatcatacgtattctttgtctccattataattaccagattggtttttcttaacatggggaaatctagtgtaatgcttttgatctgaaaggaaagaagtattctcttgagtacggagattatttgaacgaatctctggtgaaaggaaagatcttggttttcagatacttaagtgggtcagaagtagctgtttcattcataactacagacaacaaagactatgcatctattagctctcggcccctgtctgtcttatcacaagatgactttgactctctcgtctcttacattaactccacaaggtacctagcagtcttctttctatttcattactcttaatattctccttctttgtcctctgatacccttgtgtttgctttctcaggtccccgcaagggtctgttcttaaaactgaggcaatctttaatcagttatctcctaaagttgcttctttctcttcccgcggtccaaacactattgcggttgatattcttaaggtatcatattatttatgctcttgattctttctttttttttcctggcctgagagacaatggttggtggatggattgcagccagatatatcagcaccaggagtggagattctcgctgcgtattcacctttgagtttaccatctgaggacaggcgcgataaaagacgtgtaaagtactctgtactgtccggaacttctatggcttgtccacacgttacaggcgtggctgcgtacatcaagacatttcatcctgattggtctccttccgtaatccaatctgccatcatgacaaccggtaaacaaaagtccaacttttactttcttgcatcgcaagtaacttgtgttgacaactctgttcttatactgtctcttaatgaatctttgcagcttggcagatgaatgctactggaactggggctgaatcgaccgagtttgcttatggagctggccatgtcgacccaatagccgctataaatcctggacttgtctatgagttgaacaaaacagaccacatctcctttctctgcggcatgaactacacttcgaaaacccttaaactaatttcaggtgatgccgtcatttgcagtggaaaaacattacaaagaaacctcaactatccttcgatgtcagctaaactttcggaatctaatagctccttcaccgtgactttcaaaagaaccgtcaccaaccttggtaccgccaactctacatacaaatcaaagattgtcttaaatcatggatctaagctcaatgtcaaggtttcgcctagtgtcctttctatgaaatcgttgaaggaaaagcaatctttcacagtgactgtttcgggcagcaatatcgacccaaaactgccttcgtctgcaaatctaatatggtctgatggaacacataacgtgagaagccccattgttgtgtatattgatggttactgatgaggcattatcagttcaccatagttatcaatcatcataacattttgctatacatatatttcttcaaaaacatgtctactccatatacgttttctgattatgtcatcataatgcaaaatgaaaataaagtactaaacgatcgagaaaaaaacagttgtacaaaaaaaaaagattttgattaaggagttgaagaaacaaaaacaaaattgagttctaaatagatgtgaccaaataaacagtagatatctatttcctaaaaatgtatttggtcaacatacgatacttctagttcccaaaagagttttgctcaacatacaatcacagcaaatgacaaaaatatcattaaaattactaattttatactagtgtataa

SEQ ID NO: 18329 - DNA, 1453 bp, Arabidopsis thaliana landsberg
gagatcaaacaccatcttcatcccaagcactcacttctgcttgacaatattgaaatatatccgagagtgaggaaatgctattgttgcgacgaagatctcggaactttcttttatcattgctcggcttgcgatttcactctgaatatagcttgtgtggagaaaccaccggtcttatctatagaccatcccaagtggcatgagcatacacttgttctgttttcaagaacaacttctttaacttgcgacgtctgtgccttggcctattcaacatctcctttctatatatgtccaccttgtggctttgtggtccatggaagatgcatagacttaccacgtgtcataaggatctcccgccatccccatcgtatctcttttaccccttcttttcatcaaggaaattggtcttgtggtgtttgtcgcagaaagattgaaaatgatttcgggggttattcttgcattaaagacggttgttcgtatgcggcacattcaaggtgtgccacacaaagcaatgtgtgggatggtgtagaacttgagggagagccagaagaagacattgaagaaattccgccgtttgtgaggataagtgatggaatcatacaacatttcattcatcagtatcatcatttgagacttgatgaaaatacatgtagagattacgatgagaatatggagtgtcaagcatgcgtcagaccaatctatttcggtaacttctactcttgtatgcaatgtgatttcattcttcatgaagcatgtgcgaatcttcctcgtagacaccatcatccaatacatgcacatttgctaactctagtaacagagtattacaatgttatggtccatcgtagccaagtttgttcagcttgtccttcgttgttgagggcttgtttcttctataagtgcgatgaacaagactgtgatttccagctacacgttcagtgcgccgcagtttctgagccgctagtccatgaaagtcatatgcatcctttattccttacatccgaaccatatgaggcaagaaactgttcggtatgcgccaaagcgccaggcgagtacaccaaggaaaccttcaattgcattgaggaggagtgtgactttgctttgtgtttcaaatgtgctactttaccacaacaagtgaggtataagcatgataaacacatactccctctttcttatgggaagaagacaagtagcatgacctattggtgtgaagcttgtgaggggaaaataaatccagaagaagggttttataagtgtgatgagtattgttgtgtcaacctacacattacatgtatgcttgggaaggacttatacttgaatcctcgttcatcatggtctctctcctgtggagcgctattgattctgcctaactatccgtggatgtctcgacctatttgctcctcctgtcgtaatcgttgtccacaaagaatatttttactcgcatgtgcagatttattct

SEQ ID NO: 18330 - DNA, 1007 bp, Arabidopsis thaliana landsberg
cccaactccaacttccaattgactaaactctccatcgaatctaagtccaaacaagccactctcttcccactactcgattttttcaaagtcgtcaccgtcgtcgtctccggtaaaaaagaacgtgtaaccaacgtgcctggtgaggctttctcactcctatgtctcctcatgtgaccaccaagagcttgccccatcggaaactccacgccacatatcggacaaggatgagacgtcgccgttttagttttcttgttagacaaggatccaagaagtgatggatcgctactgttaatgagtttgttgtggcttgcacgatgacctcccaaagcttgaaacgacgaaaactctttaagacaagtcttgcatcggaaaactcgtttctctcctcctccgccgccttctccaactcttgataacaacatcaaacatttcgccgccgtatcttccactatctcaacttcctcacttctcgcaaccattttgaatcgacttagtgacttctagggttttgattttttttttcctttctatgatcggttttttagtttgtgtgtgttgtgtgatgagtactcctatttatatactagaatctagtttagttaatattaattgacgaaaatacccattgtgcttgctgcgtaagtaagctaaagtgtaaggaaatatgattattagcgtcaccgcgtcacgcgtaacacttaggagactcagaaaaatgaaaaagtcaagtgttacgaaaaggaatgttcttggtgctttcctccacaaaatacaatatttgaagactactagaacaacttattatctttctcattggtcgtcgaagttattaaaatctggttcgtgcatattttttttttgacgtcggttcatgcatttttaagccgtcttctagattttttttttgtgaacttaaatcttctatatggatagagcaaatgaatgtatttgctgacttatccatacacagtctagatgcatctagaatattcttggttggatagtct

SEQ ID NO: 18331 - DNA, 2239 bp, Arabidopsis thaliana landsberg
tttaggtcagattgtgttacaagatcctaacttttctgtttgtttcattgattgatcttcattacttgaacaattgcatgtcattgatggaatcccgcagctaattttcgctcatacaagctacacaatcgaggtctgtgcttaagtttgattctgcaaataattttttttttttttgtcaaacattctgcaatttaatctatgttatgaaagtgtacattgactaagattttgaggtgttatacaatgtagacagttgaagctgaacggatatcagttgatcatgttgcacatcttaaaccatctgacggaggctcagcagcaacccagtgtgagccttatgtcactaatacatatcatactccacttcctgagtcttactgtttttggctgattattcgttcatatgcagtggctgctcatcttactggtatacatagtgccatcaagatgcttaatagcagaatcagagtgctttaccaaaatcttgctgcaatgcagaaaggtatattctgttctttcccaagttccgattcttatcaccgtggtttcatgtttaccagtccaggattctagctgaagatagtcaaagttgtgtaagtgtaataatttatctgccaactcatttatgtgtgtaggtgataaatcttgtgacaactcagttctgagacaagtatctagcctgctaagaagattgcctgccatggaatcagagagatttcaagataatttcttgatggtgagttagttagatctgcacttgattcttttcagtgtagcttattgtcttagatatttcgcaacttatgctggcattttttctttttgcaggagtacaacgacaaattactaataacttacctagcgatgattacaaattgttccaggtttgtacctaatgcaacattctaaagtatttgaaagcaagtatataggctagcgaatgctctttaactagtggttctttaggaactgtgaaagatacggttttcaccgggctggtggattctgttatatcagttaataattttgtttgctcaatctgcagcaacatgaacgagatggtcgacaaattcaacaccgcatatgacagaaacactcgaagaggtggaagaactgcattcatgtaaaagatcctttccagcgattctagttctaaagatcttctcttggttcctgaaaccatttttaacattgcctctgtgagaatctataactcagacggcaagactttatcctcttcattgtttctatatctataagaacatctgcttatctatcaaagctcttgtttgatcttgaacaagtttctattgttagtaaaaagattttaaggtttgattctatcagtctctctagttacatccacatcagtctccagttagcaattgcagtattgctacacaacactcacttttttcttctttgttgatttcaatataagataaagaaccagtaaaaaagaagacaaaaccaaggaatgaacaataaaacagcctttaccttccccaaagtttgaaaccaataaatgaaagaagaagaagaagcagaaattaaaagttattataaggagtgaccaaatgcagaagaagaagaagaagagtaaatttcaaatctgaggtaatctactcatgatctggttatataccgattgtcctgaatctgaaaccggttcaacctttggttccatccctctctgcatcattgcttcactcatcccaaccggttgtgtcatatacgggtgaggcaaacccggcattttcccttgaccatacgctaaaccaggcattgaaagattaaccaaaccggtttgtcctaaaccgaaggagaaaccagaaggaggacccaaatgtggctgaaagctaaagggacggctaaaaggagactgattgttagttgtgacttgtctgtcgaatctcccacgtggcggctctgagtgatgaccgttgtggtaatggtgagaaactgcggctgaaccgccgctgttaccgttaccactatcaccaccgcctccgtggctgctgttgcgtgcagcggggacgtcatggatatgtttgccttcgtaagttgttataacggatttgagatcatgagaagctctttcaacatgtttcctcactgtacatcctggagctgtgcatttgtaataactcctagaaaaacattatgaaaacgttataaaaaaagaattggtcttgtgattgccgataaacatataaacagaaccagaccaaaacag

SEQ ID NO: 18332 - DNA, 1267 bp, Arabidopsis thaliana landsberg
  unsure (1)..(1267): unsure at all n locations
ttcctccgttttctccttttcaatcgaatccctaacctccacgagactcatactcttcttcgctctcatgtcttctctttcttcttcaaaccggcgaatatcggtagtatacggcgactggtcttatccccatcatatggagaccggagcagagatagtgttggctccgccgccgccgatgtttcgtcatctattctcgacgacgagcttctgagnnnnnnnnnnnnnnnnnnnnnnnnngatgaagcgctcgcgatgatttctgatcggttcgggtcaaatcgcggtggaatcgttgaacttgaagattgccgttcgattatctccgctgctgtcagtcgcggcaatgtggaccttgcgttgtcgatattctacaccatgcgagcgagtttcgatttaggtactctcatctcaactttactattaacccagagtaggagtttctgtgattgattaagcaaatttaggattgattgtttgttttcacaggtggaagtgacaatgatcgatggagttggtcaaggcctgatgttgaagtgtacacgatgttggttaatggtcttgctgcttccttaagggtttctgattctttaaggattatcagagatatttgccgtgttggtatctcccctgctgaggaggtaacactttgctatgataccttgaaattcgtttgaacttacttaagattcatgtaattagtttgtaagcatgattgctattgattttaggttccctttggtaaaattgtgagatgtccgagctgtttgattgccatagctgttgcacaaccacagcatggagttcaggtaatgatgatccaattcgatcttcaatgaatgctctacaaatcttatatggaataactggatgatttgctgtctatgttactagattgtatcttgcgctaattgccgttaccaatacgagcttttctctggtgacataactagcattgactcagaagagctcgggttagttctcttcagtatttctcttctttgtttcctagctctaggggaaaggtgatacagcttatgttgggtgtgagagcggtttttgtttgttaatttaaccttgaaaacaaattgagacttgtgtgtttgttgatactgggatattcactttctctaaggagctacatctgccgaacgcagcaaggacattcctctctgggaaaaagggctcagacttatccagataaagaagaacaaaatcacatcttcagtgcactctatnggtggtaatcgccactgttaacacattc

SEQ ID NO: 18333 - DNA, 689 bp, Arabidopsis thaliana landsberg
cttgcaaccctggctatataaacattaatgaaaaccgcgtcgaacctctatacaagcatgtctttctacccgcgctagcccccagtctttctttcatcggtttacctggaatggttagtctcaatcaaaatagatatcactcagatttttttctagttcatgtcttagttggttttaaccttttgactgttgactaggccatacaattcgttatgtttgaaattcaaagcaaatgggtggctgcagtcttgtccggacgagttatacttccctcgcaagacaagatgatggaagatattattgagtggtatgcaacgcttgatgtgttaggaattcccaaaagacatacgcataaattgggtaaaatttcggtaagtcgttatcttccaaatatgattacgtgtgaaaatatatataggtttcaattgtttcagcattgattttgcctttgtttgatttacagctatcaatagaatttttgttaattgcataatgttgtgccttataattttgaaaaaatatactaaataaaaaatgaaacacaaatatgtaacaaacgatgaaacgtatattatgtaccccaaaagagccatatgatatctatgttacttaaagatattttctcccatatagtgtgagtaccctacctggatcgcggaagaatgtcattgttcgccccgttgaaaatt

SEQ ID NO: 18334 - DNA, 2770 bp, Arabidopsis thaliana landsberg
cacacgtaaaatcactcataaaccctatgaccattagtgtaactggctttagggagaagcctctctagatctacgcgacgaccaggcttattcgagaggtttcggagtggcagcgcttgtggccaacgacggaagctcaagtgtagcagacagtaacatctagaggtgaaagaagaagaagatttgttccctcaatcttacaaccaatcgatccaggttttgcgacgattcttcaattttacgaatagaatttagagttttgttagattgtgtaaatatcttattcatattagcgaaattgtgtttgtaaagacgatgagatcggttgcagatcaaaagttcctctttccttactctcctttgtttcagatctgttgcaagaaggcgacgagagaggcggtgataacataacgtgggacgtttctcgacttacttaatttgggttttgaaattcgatctgagaattcgaactctctcttgaaaaagaagaagaaatggcatcgtacatggaagagattccgtgagaacaaaaattgtttggagtaacctcgatattacagggttacagagatgcgaggtcctcgttactctgttcttttctatggagcaccagattggcaaattccagtattgaatttcatatccatatgatcaacttgtttggtaccatttgatttagcttgataaattgatgtttcgtttaacctttaagctaagagcactttacttcgcacatgagaataaattatttccacatggtcacatcttgttggacaagttttgatggacacaaactatcaaagcatccaacacgatttcattatgtataaactaataatcttataggtctccaagccccaagaacaatatgtagacattgctttcaaatagcaacactcaaaatccaattagttaatgatagtttgtatccattataacttgtccaattaaactttaacatgtggagtaatggtgaaacatgacaaacacttgaacacaaatgattcatgtgtagagcgttcatcaattttttatcgaatgaaaaagagtgtcatggtgatgcaagaatcacaacttagtcaaaacaaatcatgcgtctttttcttattcaacagagtatccacaataacaatacattacttacacaaaagaacgagacccatcaaacatgctttcatataaagacaaaaccataccaactaaaacccaaaatcttattaacatgctttctttcacgtattcttttctctgcatttgtttttcttacagatccataataatgtgtccatttcaaatgtgttcatacggaatcttgtttactaagcatatccattatacaccaaagttaatgtataagtctgcttttattcattcaaggctcatataatcaaattctacacgaatatatttgtaaaactacaatcatcttaagtgattatgttcctcttgtgtattgctttcattttctgttaattaaccaaaaagcaagtttgtaatcagatacttagttgaaacctaggatacctaatatctcatgtttactaaaatatataacgactccccctgtcaaatatacaataattcctatccatcaccccaagtccatacaaccatgtttacaccgctgtagaatcaaaaatacacaaattctatagaaagcataagtaataatcaccaatttcaaaaactatgtccattacgatgctttgggtttatattctaaccctttacaagtagccatccactagcgaccattctatgttgaccatatagttgtagggatcaattacaattttcttgtaaatggttagagttatgaccatatgatgtatcattgtagaatgcgcaaacaaaataaagtgctaatttaccgagctataaacacattcacagcaaatcaaagacatagttgttatccattgatgacagtccaagaagtctagtccatatggttatctaatgattcacatggtacttttataccaataaacaagtctatacatgaccaataaacgccaatccaaagtacattatccatttttctttgaccatttattcacttgtgtataaacaatcccatcagtaggacaatgtcagttatatagcttttataaagaatttaacgaagatcttatcactctcaatgaagaccattagttcacttggataaacccgtctatactaatcatttgtaataggtataagatagaaggatgtgtccattgccataaactacagatttttattcaatagaaattcaacaaatatacatctattgtataacgtcataactcacaaaagttactttgattttcattatgtctcaacctctcgtttatttcttcgtcttgactttgaattagaagtgattactctcaggaaattaaatcaatcggaaacagcgtactctcaaagtttatagatctgatgcagaacaagatcgagatctctctaattttgtagatcagagaccaccggaataattagtagcagaaggggcaccgaacgggacgaccaataatgcataaagctccctccgccgctgccaccaccaactacgacatcatcatcatatcaaagacaatcgttggaaggaatcatagcaagtttgtggtagccttcgttttgaagtttgatttttctaaaagatttgattttggttttggaaagagagagaaaatagagaggaagatgaagcgttgaaagaaataatgacgagaaaaagttcataactctaaaagagcaaaatggacaatttgacttaacaaag

SEQ ID NO: 18335 - DNA, 540 bp, Arabidopsis thaliana landsberg
caaagtttacaaatccagaaccgatatagggtttcaataacaaaacgaacacacatgaacgaaacaataaattagatattacgaagaaaaaaaattcaggataaggggaaagaagaaagtgaatgctgcttgcttacacagcttacgcatccgagggagccattgacaacatcttaagtctcgtactcctcttcttcctcctcgtactcctcctctccggctgtagcatcttggtactgctggtactctgcgacaagatcattcatgttactctctgcttcagtgaactccatctcgtccatgccttctcctgtgtaccaatgaaggaaagcctttctcctgaacatagctgtgaactgttcgctcacacgcctaaacatctcctggattgagggtgagttaccaatgaaagtcgaagccattttcaaaccctttggtgcaatatcacagacactggattgacgttgttgggatccattcacaaagtatgaagagttcttgtctgaatgttcatatctgctcataacttttggtgctcag

SEQ ID NO: 18336 - DNA, 684 bp, Arabidopsis thaliana landsberg
  unsure (1)..(684): unsure at all n locations
attttcgacgacatagattggnccattttgttgtggttggaaaacagaatgtcattgcccgagtattacaaattaccgacgtgtttccgacgaggcattttccgacaatttctctacgcttttcagacaataacattggttgagaaaccggttggaacatagtcggaaatgatcgtcggatccccgtcggaaatattttctgacaatttctctacgcttttctgacaatacattggtttggaaaccggttggaacatagtcggaaatgatcgtcagatagtcgtcgaaaatattttctaacaatttctctacgcttttttgacaatacattggtttggaaaccggttggaacatagtcggaaatgatcgtcggatccttgtcggaaatatgttttgacaattttctaacgaatattgttgacaggcattgcatcagaacgttgttgaaaatgggtcggtatattcttctgacgatttccccacaacgttattcccgagggattaccgacgatgtattttcgacgggttaccgacgttgtttgtatttataacggggctaatataatttttaattaaaatatattttttattttttaataatttaaattaccatttatagaaaatttttggtcaaatattataaaataatattttaaaagtgcatatattattctacaaaagaaa

SEQ ID NO: 18337 - DNA, 529 bp, Arabidopsis thaliana landsberg
gggacattccacctatggttcgtatatcctacaaggtaactaaatatttaacccctcccatgaccatctttcttttcctttttgtttactttcagctactacacagtctttctatattttcgtggattaggcaaactgatacgcggtgcccattacttcaaagttggatacacgctcaactatgttttgtccacgtatagaaaacctcaggtctccggtctcatcatacagactgtccctttagtgatttactcaaagtgtttaatacctcattaattcttttcttttttttttaaatataatcataggtttcaattttgaatggtattgtcatgggaggtggagctggtctctctaccaatggtcgatttcgtattgcaactgagaacacggtattcttttcttatacatgtccatggatgacatatagacatcactatgaaatatgcttatatatatcatcccatatcttttgagtttcttcaaggttttcgcaatgcctgagacagctctagggctctttcaaatg

SEQ ID NO: 18338 - DNA, 1682 bp, Arabidopsis thaliana landsberg
caaaagtggaggagctcgaaatagggagtaggaactatattagcaataatattgtccgcccttggaatgaatacaaaagagatataagcaaaagagttccaaagcaaagctaaatcatgaattgtttgcaaattgtgtctaagggggttagtaatgacaattgtggaattgttttataaaactatatgctaaatctcttttgtgttgcccctttgatataatagatgagtaatgactgttgttgttttccaatgataatgctccaacgtctgaattgttttagagaacaaattcaggcagaaactaattaaacaactcgatccggaagtatagactcacctaatatttaaaacgggaaagggttctcatgagaagagatggtcctaaagaaaaattcattcagctttatccttcatttttacaattttctcaagtagtttgtctttttcacggcggtcttcattatacctaaaaccaataagctcatcaaatgtggagtgtaaagtatcaaaacaatacctaaactcataaagaagatcatctacgcccgtaagctaaaatggagacgtcctcgaagacgtgcaccagcatgaggatgagcacatatgactcttgattggtcatagtaagtcttgagacgtagtagataattagcagtataactgatgatgaaatcccgacttattaatccttgaatctcattctcaaacccaatatactccatacgtgttgtcttgaaattcaagtaaatacagacagtagagtcccaaatccgtagaagcaatccttccttccaagcaccgaccacatgtaatctgttagtcctccagtcatggccgcggcagaagcgtcccactttgtcgctgaatacattggcgtcaaatctgtagtcgaaagaccattctcctctcgccttgtctctcagtgtccacaaccctaaacactcctcggaagaaaaatccaccattgccaaggtccctcgaagattagtgaggcggaagagttggacgagagacccctggatgatagttgggtgaggaaaccactcaaatgtctcctatataggaccatgtgctttgtccaatttttagtttccaaccgatagcctgtctcagcagatcgacaaccacatgtacaagccccttgagatccctgaaatatttgtaagaaataaaactacgatcatacaaaatactaataaattaaaggtataatccaaaattctatgtatacaataaattatcgatacgctataatagtaaaacttgttgtctgacaccctatttacatttgtattcatgactttcatcatacttagtgacagcttaacaattgttatgaaaacaagaggcaaagctattacttagacactactcacctcgcttatagtggcagtccaataaacatatccaccaattgttaccgtggaagaagagaaggaaacatggccgaaaggtagagcggaggcggaagaggagatgtctaagctcctccattttgtgtctgtatctccgaggctgaatatttcggccacaagcacgtgctcttgtgtctcccaaacactaatgatcttgtgagtgtttcctttgggatcatatccgaatcctagaggctgtttccatgcgttttcgtccccctgtgctggtatcttcataacctctttccgtatagggttgaagaca

SEQ ID NO: 18339 - DNA, 1172 bp, Arabidopsis thaliana landsberg
  unsure (1)..(1172): unsure at all n locations
atgctgatattagaattgaaaatttatttatagatggttagatgattggttaactaaattgacattggtttaagatnttagttggtttaattcaattttacaaaacttgataggttaattgggtaaaccattgaaaccattaaccattacaacccaactcattttactcatcaaccaattgacccaataactcatttgacccatcaactcatttgagtcaaaaatttcaactcattagggttcatgagttgaattgagttgacccatgaattttgacccattttgacacccctaggtataacaaaaatataataatgcaattgatacaaataatataactgaaataccgattatggacaactagtacaaatcctatactattatttggggagtacaaacataagttgtaaccttaaaagtgccccaaatcaccattaggatgtcattagaatttttataatattgaaacaagataaattcactaaattaacatgtgggatatgatctaatctctatagtatttttgaaatacattttaagtgggtgggttaaattgtgatccgacaaatattgtacccgaccctataacaaatgtacttcgaaatcttacacctgatattctatatttttctttggatttgaactttttttaattgttttgaaacatcacataatacataaagattaaaaaatctcaattctttttcaatatatatggtgattaaattttttaaaaatggatatatattatccaattgatgaaaaagatgtgttcaatgtcccataattgctaaaatgtttaaaaccataatataatataacattttattcaaattagaaaaacaacatactttgtatgggaaacatttaacaaaaaattacaatactattacttacttttaaaaactaaataatcaatttagttcatacaaaaaattcacactcgtgctggagcatgggttctgatctggtgcaattaataaaattatataacttagtaaggaaaagtagtacataagtactgaaacaacttataattcctaaaccatagcactgtcacattattgtcaccttttttgtcggtgttgctgattatcgcctgtcactgtaatttgatgacctttctttatctctattactattgccgattctacaacaaaaccttaaatcta

SEQ ID NO: 18340 - DNA, 2538 bp, Arabidopsis thaliana landsberg
  unsure (1)..(2538): unsure at all n locations
agtctaaaaacacaagcatggagtcacgaggtaagacaacttaaatgcttgttagttgttatgtggaacctgaatttcttaattttctgctaaatctggtgatataagtgatgccggtatcattagatgtgtttttgtattcgagtgatagttaaaacccttaaattctgaacttgtaaggacttgctggatgcactgaaccaactagaagaagggctaaaagacaagatcaagaaattgagttcctttgataaatataagcaagaggtgctccttggccatcttgtctggaacccaatgcacaaggagtccaatttctggcgtgagaatgtcacatgctttaaagagaaagacttgcaggtattcttgtttaattcctctctgctcaacacccacacatgtagtgcttttagagcgggctggttcaatccgttttggccttagacaacaaccctaaccacttgttaaacttgtggacgcagatactcagggtcctcctcacaatcctggacacctcaagtgatcccagatcatggtcggtggcatgctttgatatctcgcagttcatacaataccatgcagcggggagagtgattgtagcagacctcaaggcaaaagagcgagtgatgaagctgataaaccacgagaacgctgaggtgaccaagaacgctatcttgtgcattcagaggcttctcctgggtgccaagtacgctagcttcttgcaagcttgatgggactcttccctgtttctttcagtataatgaaatgcaaccaaaacacacagattgtgtttccttttttcccctgtccaaaacaaaccgtgctcccaactcctgcatatgcttcttttctttcgattctacacattccaagacacatctgttcattatttatcctggagaatctggctattgtatgcttcaataatttctgggtttgtgttttctgtatttatttattcaataaagagtaaaagagaccttgaagaagaatgctattgttgcagacagacacatttgggccagtttgttgtatgatgcgagagtttcagcttatatggagatgagattacttttgatttactctggttaccatgtctaattagattctctcgacaactggtaatataaatgggtcgtttcggtctaatctgaaatacaagcaaagaaacactcttgacaatgaacataaaaagccaaggcacaaaaatttcatctcataccaataagttagatgtatgaagtctcatacctaactcttaattaaactcaaatagcctatattagagtaagggttcattttggtatcacagacagactcaggtttttccaaaggatcatcttcgattctggtggcacgacaatcatcaaatttcagtatgaaaagctcaaaagaatatgtagcagctgtttccggtttactcataacaaggactattatccctatcgtcaatgtcctcacagcatagcaagagcaagggctgccttcagagatagtgttctcagatcaagtttgaattctcagtctcagatgactgagacttcgtttccagctccagtgacaccacctccaagagtagctcctcctccgctgaatcatgaagaattggcacgtgcaattccatacttcgccacagtgagagatgttcattacaggtatggtagagaggctaatattgcaagacaacaaaggtattccaactctagcaacactccaccaagagaggctgctgacttatccggtaatagcatagtctatgtagtgggccaattatcaagaaggcatgaagatggagaagttaaaagagagttaggggatccacgacttcagactcatcaacaaggtgctccaagaatgggagggattctgaaacctccaaagaaaagattgtcactctaacaagaattttgtcatcactttttgttgaagactgctgaggaacaaggttcgcagcttcaatgcttgaataacaccaaatagtttggttatgatttttggttaggacatacccttggcttggttaagattgatgtttgttgtttcagtttaaatttctaaggaacaatgttttgttctgtttgccttaagattgtaagtggtaagtccactgttacactttttgtaagaacacagtggtgataacaatgttctaaaaatcgctaggcgctacttaggcggtgtactagcgcctagcacttagacggtcgaggcagggattaatcggagactaggcattacaaaaaattaaggggatatacataacttctatcattaaataggttatatactacaatagtctataagatttgtcgaagttcgagtggcaaaatggataagtcatgtgtaatttttgtctacacccgggttctaatagctgaatctacatttattttatagtttagagataattgatagggataaaaagaacaaaatattacagatctatcaataatttagagatttcaaactaaaaaacaaatatttaggtggattttttttccggccggtttttgtagcgaattccnccaaacgttatac

SEQ ID NO: 18341 - DNA, 1810 bp, Arabidopsis thaliana landsberg
aaaacagagttacttagcgctatcgtttcttgcagtttccattgctataccaagaaggtgtgcagaacattctcttcagctggaaaaggattatcggatggatgttcaatggattcataagcgctctcgccattttcttcctctgcaaggaatctcttaaacaccagctatttgacccagatggcaaaaccgcaggccgggaaatcctcggtggaacaatgtacacttgcgttgtgtgggttgtcaatctccaaatggctttatcaataagttacttcacttgggtccaacacattgtgatctggggatcaatagccttctggtacatcttcctcatgatctatggcgctatgaccccaagtttctctaccgatgcttacatggtcttcctcgaagccctagctcctgctccttcatactggctcacgactctctttgtgatgatcttcgctttgatcccttacttcgtctacaagtcagtgcaaatgaggtttttccctaaataccatcaaatgattcaatggattcggtacgagggtcactccaatgatcctgagttcgttgagatggtgaggcagaggtcgattaggcccaccaccgtcggatacaccgcgagaagagcagctagtgtacggcgctccgctaggtttcacgatcagatctataaggatcttgtcggtgtctaaagagtatagaattgtttatttgtaaatatatatacgtatttctctaacgtggagattaggacttgttttattgagattccttgccagagaaggcatcggtaattttatttacacgaaaatatattgtacataatttttttgcaagattcatgttatgtaattctatatatatattaatatatttagaattgatcgattgttagaaaaataaatttcatgtgtccactgtccagtccaacgtatttagaccacacaaaaagatgagacaacagataatatattggaattttcaaacttcagacaaaaaagacataaagagaaggatccgatgattatttaagatattttcccatcattattatgtttgatcaacacttttattactagtattatttttgtcaacgatttcaattattgaactgtttcgaccattgccatagttcaatactacaccattgcaatttgcaactgtctcaaccaagtgcatgcacttaaatgctgttatcttttaaatccaaatgatttagcacatataccatttgaaaatttatatataatgtaatttagcaacaacaaaaattaatgtaattaaaaagttttatctgacgactgatctttgttaagcactggatttagagttgtcatagattgtaatatcatattgacaaggaattttcagagtcatatttgaattagctcatatagtagtactttataagactaatgttctggtcttaactcttaaattaagttttgttttcacacatcaaaaaccaaacggtggaaagtggaaactcttgaaaatattaaggtacttaaccactagtttaactttgccaaaattaaatttaggtgtttcatgtaaaaaaatactcctaaattttaatttaggtgtttcgtcaaaagtcaatcttgatatgacattttaaattattttagtattaccaccaagtataaatttttacgtcacaccaaacgagtcataaataaattaatgaaagattagcacattgttaattgcacaagttgcattgacaggagaagagaaaaagagagtaattaaaacaaaacagatcaagaagcggttaatccaagaaaatcagcagccgatttagccataatat

SEQ ID NO: 18342 - DNA, 698 bp, Arabidopsis thaliana landsberg
ggtgatgtacacataaacaaaatatgcttatgttttgtttatattttgcataatactagtatacatgcatctatatatcgataattcattatcatctaaaagataggttttaaaccatgctaattttttcatatttttataaggattccactcttttctttgcttcctttgttgaagtaattgagttttaatattctactttatcttttaagtatttaagtatacatgtaaatttgactagtttgtcactcagatattcatcattacatggattattacaataagagcatttttgtacttatacaaatatatgtgtgcatttttagtatcaaagcacatgcaaattatgtggttgtatttaaacctgtttccttctcttatgagaaaaatatcattagcgacaatgcctcttttctctctattctcttctctcctgcgttcttcactctcttcttcaactcgttttctctttatttaggacaatggatatcatctacgaggccagtcaaggtcgtattcgtagctacatttgccatgtcgagtttgagtttaatcgattctatggaactaccacaatttgatattggggatgcttgttgcgtctgcaatatactcatatatatttctctagtatctgtattggcaagtttatgtttgcaatatcaaagattaatcaatatccctgcattactactacg

SEQ ID NO: 18343 - DNA, 1214 bp, Arabidopsis thaliana landsberg
tgggagtgttacttgatacttacgacaagcgtcttgccatttccgagaacaactttggtgacaaacccacggttagtggttctggctgcaacagttaagatccacggcgctacgcccgatactgagattggttttggaccgctgttaccggcggaattcacagtgagaacccctttggccatagcgtgaaaagccccgatcgcaatcgggtcattttggaacatggacgcagttttatctccgatagagatggtgatgaggtctactccatcagcaatcgcgtcatcgaatgcagacagtagagcttccgaactacaccctgtcggggtgcagactttgtaagcggctactctagaggctggaacaccacctcttacggttccattgccgattccaaagaagcttgcgtccacaactgcgtttccagccgccgtggacgcagtgtgtgtaccgtgtccgtccatgtccctagtaccttcgcttgtgtagtctcttgccccaatcaacttgctgaatcatttttaacacatcaatctattaagagaattacttgttgcctaaaacaatactattagagaaattaagagaattacttgttgcaagtgaagtttttgccggcggaacaaacaccttttcatttcttaggaggaggaccaaagccttgatcagaaaaagctctcggattctggccaaatcccactgtcgatgaatccgataatagtatcactttctatggccaagtttcgctttgtattttttccttccttcaaccccaagaaatcccaagacgccgtcgtttggagtttgtagttaatgttcggaaacacagacacaactccctccatttctaaccaacacaaaagggtttcaaatattttaaccttaaaaaaacatttcaacgtaaaatatgtctcgatcaaagaacactaaccggctactcttattcgttctgactccgtgagtcgggccgcgaaaccgttgaaactcctcttgtaacttcttaccaagcgaccttccaccgaactagagtgtacatacgtatatatcactatagttataaatcctcatgactaatcaatggttagagaatgaattaattaaatcgcacctatctccggtgacttcttgaagaatactcatatgatgcgacagtggtgtgtattccagtaaagacggaagtgagcccatgtagacaacatcgaccttcatgaatt

SEQ ID NO: 18344 - DNA, 1528 bp, Arabidopsis thaliana landsberg
taagactttcattagtcgagaccgggaagatgaaaagaagaaataatgcttatcgcatttttcctcttccgcaagaaagtcctctgcaacaaacaatcacagggaagaatagctttcattttcagggtttaggaaggaaaggctaaaaaaacaaaatgataacgctaagttgaggtcttgagatgtatgtacctcgacatatttcaagtagtgggaaatgtcggatcgctgcaggacttgctctgcttcctcggcgtaaaacttagaagtggaatcaagaaaagggtccttatacacatatgtacactgccactgcatgcggaacatgtccataagattctttaggagatcactcgtgttgttcgcagccttgcctaatctggtagacaaacattaacacaaaatgcaagggaaagagtgagtagatcgagactggaacggttaaagaaagaagagactcctcttacttacatactaacctttcatcagtgatgagtcttaatatgccggtaataacttgatcttgaagttgaggggccatggagagttgtttatggaaaagcttctggcccacgtcccacaatgtcaagccattaagagtctgatacatggctacgtcagacacaagactcatcttccttttaaagtctagccagcgattgtacacgtgtggcaagaacacagagggatcatcactgccactgcaatgctttttctaaagactgtataagctcagcaatgtgaggctcacactcatgcttgacaagatcgaaaaccagttctgattgtcgaggatcgcctaagcaagcacgcttaacagctctaaaaatcgtagtgaaacagagaacgtcgccaggctttttgtattcatcatcatctaagatgattttgatcgctggctttagcaagtcccaagcttttgctaagtatagtttgtttctgtcttgtgtatctaatttggatgatatcaaaacatgagatttagaagatcaatcaacgagaacacaaaaaaaaaaacatcccaacgtacctttgacagaattgggatccaaattaaagataggaggaggctccctcgcctgggagataggaaggcatgagaggttttcatcgcttaaggtaaaaggaagacgataaggattgccctctgctcctccatcatccggagagtggtgaacgagtttcggcgacttcgttgaggaaaaagggtcggggctgatcgagcgtttcatgataatccaattctgaagaaaaatgaatcgatggacaacactgatcaattcgcaatggtatagtattcagtctcaaggaataaaattggagaaacgtaaccctaaccctatggagaaacaagtctagtaattaacaaacatttggaggactttattatttaaaaagatgagtatgacattgatttatttacttaatattgtttgtttccagaaaatacgatgaattaaaatctccttcttaaatgaaaattatccactgctctttgatccggaacttctaataattacctttcacg

SEQ ID NO: 18345 - DNA, 657 bp, Arabidopsis thaliana landsberg
ttatttttattttatatgatttttcaataaaactattttaatagttttctcatactcgaagatttttttttgttatccaaattcaaagtatgaatgtataatagtcgtggattacttaatgatttgagtaagttattctcttaaattgatatttatattctcttatgatatttatagaataaatcactgacgctgaagaatacgtaaggagctttatcatcatattcttaggtttatagaatccaatactaccctctgttaaattaatttaagacaaatgttgtttatgaattatatgtatgatgcattgttgagaatattgttagaaaaaaatatttttaatactaaagtaattgcttattgcatgagtgaataattagacaaataaaaattaaatttaaattaaataatataaaaaaatccaaaaaaactgcggcgtaatacgggtgatcatctagtgatattaaaacagcaatacataatttctttttactgagtgcagattttgtatggaagataatcagagaagagaaaatgtacatcttcaattaaaaaaaaaaaaaacagatatgagcaattgtccttatcggattccactaaggaaaaaaagagatgagaacaatcaactggcagtgacatgttttcctattaagaaat

SEQ ID NO: 18346 - DNA, 744 bp, Arabidopsis thaliana landsberg
taacttaagtgtcagtattaaacgcaatagtaatttgttatcgaatcgacagagagttatcaagcacacgataaagtatataaattagatatatagatagataaaaatctaatactccctcagttacttattagttgattttctagaagaaattttttatttctaaaagattaattttgtaggttttctatgcaatattaattggttattattgatgaatatcaaacttcaaaataaataattaaatattattggtttagagttataaaagaattaaaatcacaaaaagttatgaatttataattagtttttaatatattttcttaattaatgtgttttttctagaaaatcaagtattaatgaacagagggagtagtaattagtgatcaaatccgcagtaataattatttttgtttaattaatataaataattgcctatcattttcctaagaattaaactatccttcgtttcaagaaattctaacaagcattaagatcatcattcaatcaattcacaaagcacaataaaatcgattgtttgttggctaagaaagccttgcccagctaatgatagatccatcgattcaacacaagtacacaactcttgggggcttgattaattggattgtagagcattagccaaattggccctaattaaacttaggcatggaacacaggaaaagatagagaacctatagaaccaaccccatagataatataacaaggtattttaaataaaacaac

SEQ ID NO: 18347 - DNA, 673 bp, Arabidopsis thaliana landsberg
gccttcttgcaggcatcaaaagagcgatgattcttcagaatgagaatatgataatcaaaaactcagaagtttaataataatgtaaaaaggggagtcgcattctcaagtcaagaatctttgttattcatcttaacccgaaaaaaaaataaagaaatagacaacggaaagaaaaaaaaactatatgagaggttggttgtctctccacttataactagccttgtctcattatttgttaacatcaatgtctttgttgttcaccggtagttacttatgatctataattctatatttctatatcacaaacaaaaaataaaacttacttatataaatcaacttcatttggcagaaatcatttttctgttataacctattttcaaagttgtaagttgtaacattaaagtttgattgtctttacccgcgagtggtttgtttaatttttgttttttcggttcaatattttgttcgtttctttatgttttttaactccatagaaaatggggaagaaagattccaaatataacttggttaagcaaaaacttttaactttttgcaaaaatgtgtttataaacttttttttgcattaatttccacctgaacgtagagtttttaattgaccaaaaaaaaaaaagcctgaaaaggctctaaaattgaaaaaagcgaacccggccgaaaa

SEQ ID NO: 18348 - DNA, 2816 bp, Arabidopsis thaliana landsberg
aaaaaatattcgcggtgaacctttatttaccgcttttattccagttaattagaatttgtcacctaataaaaaaaaataaatttatttaattataaaatcttttttgacagacggataagaccatgttttacctgatttatgggcgggcggataaaaccatcaccgcctgccattgaacatcttatctgtcatgactattctccattcactagtctttttgaagaagcgagaggaggaacccctttttgaacaactacttttgacaatcaatagaaatccaaaagctaaatcgattcatatcaaacaatattgctaaaatataatatcgaacgcaacaataacaactacagcatgttgtgcaatgtaatatttctcggaaatagatagtcaatgctatcaaatcatgatttataagtttagaatatatatctaaaaagtaaaaacatatttcggatcaaattcgaatattttgattttgactttaaaataaaaatattacaatcctgatctggaaactctgtatcatatttgttggaagttggatgggatcaaaatttctctaacctccacgttcagcttccatttctcctaaagaaaaagagaaaagaaagaatctcattcacatacatcatacatggatacaggagcagtaaagctacccattcacgagcaccctatatttccttcggctcggatcgtttttagtacatgtaaaggctgcggtgtagaagatttcgtctacggcgggtacgtctgcaatgattctgactgtaaagctcggtttcataaggagtgcgctgaggccccatctaagatcagccactctttccaccaacaacatcctctctttctcaccaatggcctgggagatcttccatgtgatttgtgtggacaaaagcgattggaagccgctggttatagttgtcccacatgtgagttcaagctggatttgacttgtgggataaacccatcaccgcctgctattgaacatcctatctgtcatgaccatccacttgtctttttgaagaaacgagaggagaaggccccttgtgaagtttgcaaggattctattggtggaccttcctattcttgtcttggatgcgatctgtacttccacgtggattgcgtccatctctcaaaagaggtaaatcatccttgccaccctagtcatcctctcaagctcatcgcatctgaatcacttacggataatgctgagaagatttgtcttttatgtgaacaacaaccagaaaatatgctttattattgttctgtttgcaacttcacatcatgccttggttgtactaaacgcccaccacctctttttatcgagcataccaagacccacaagcatcaacttactctctttctaaacggaatttcatatcaaggttccgcgctgacatataacagcagagcttatatgtgccttccttgtggtttcgttgtcaatgggaatggtatcaacctacctcaagtcataaacatcaaccgtcacgaccatcgtatctcttacactcatcagcttggccctggatatttgaactgcggagtttgccgcgaaattgttgacagggattgtggggcatatgcttgtgtcgtttgcagtaactatgcagttcactgggaatgcgcagtacatgataatgtatgggatggtgtggaattagaagggacatctgagatcacagaagatattgcaccattcaaggtaatgggtgataactcgataagtcattttagtcatgaacaacatactctaaggctgcacaaagaaggcatcattcatgacgcgtacgcactatgtgaagcatgtacatatccgatcggatttgatccgatctacagttgtgaggaatgtcatttcattctccatgaaacgtgtgctaatcttcgtaagaagaaacgacattttctgagcccacaacctctcactctcgacttcgtaacaaaacgaaaagaagaaaaatgtggagcttgtcatcaaatctgttgccaagggttcatctactctacatatcaaaacgagaattttgacttactatgcagttcgattactgtgccttttatccatggaggccatgatcatcatttactctatatcaaactagaatacggtcaagtgaagacttgcaagaactgtggcatcgatgaagcagaagtcgttctaggttgtatcaaatgcaattattttttggattttcgatgtgccactctaccattaacggtaagtctttctaggtatgatgatcattcactcactctttgttatggtgatgaaaaggcaagtggcagatattggtgtgatatttgcgaaagagaaacagatccaaagagttggttctacacttgtaaagattgcggggttagtttgcatatattttgtgtagtttgggatatcagattcgccaaacaaggagaaacaatcagagacggtgttgaattgctgccaagcaatacatcttcacggccactttgcaaaaattgtcaatgccgttgcctaggtcccttctttgttaaggattatgacaacatatgctattgttcttactactgttatgcacggattcattctatgtcgtacatttggagtaaactcagatgccctccatggatatcagaacccagtacttgaagatgtggcaatgctcgagtttgaattttcatctattcgattattatttttggattttctttgttgttgtttttgttgttgtgagctggaatggattgttaatgtaataatttgatgtagctagcgaaaattttcccatatgttttcctaaacttatgttccactacgagtgtcactttgtttc

SEQ ID NO: 18349 - DNA, 710 bp, Arabidopsis thaliana landsberg
aataggatatggggaaatttaccaactagaaatatataagcaacatatttccagtgaattcttaaatatcgtatagactatgtaattgtgttcgagtatgagtaaccaaaacgatttatttgacccaatggagtccattgaatggacctattaataaggcgcacatggcagtagggtaagagggttacttgttacttgttttccatgaacgatttgtactattaataaggcacatggccgtacaaattaacggtaaggaagaaagttactggaaaactagtaaatctgatcaaagccttaatttgactaacttttgaaaaccaaaaaaatatgttcatcttcataaagagatattcgaaaagtttacaaagtataatcgataccgtttattattgtttaattttctcatttgcgaagtatatggatttcaattttctggccttgcacctcctacatgagatcttgaacttcgggcctagccctcatcaataattaaagagtttcttataagcatcttgtgtcaagcaaaagtaaatgagaaagttcaccttacaattctcggggttttttcttggattttgaatcatcacttaaagttcaccttcataaaacaggacgaaaacattgacaatgcaaaacatatctatagaagtgtattgattacctcttgctttttgtatgcaagacaccgttttcgcttgtagtgacta

SEQ ID NO: 18350 - DNA, 1120 bp, Arabidopsis thaliana landsberg
aatcattcacttctaaattattacgaaaataaagccaaattattatatattttctccaaaagcgatcgagatatatatatatatattatttatcggagctaaagtatgcatcgttttcgggcatggatggacaaagagcgatttacttctaactcgttgctgacgacagagtatgcggccggcctcacggaattcatggccttagcaacaaatcaggcgtcttgcttagaaagtggtatgatgttttgtccttgtccaatatataataataatgcatttatcgataaggctatagtgtggtcccacttatatagagatggaatattgccgagttacaaggtctggtattatcacggcgaaagtgatacataccacgtgggtagtagtagtggaaatgttccagatagggatgaagaatctaaaatcccagaagaggcggtaggtacggttcaattggttcacgacgcatatagggaaaatatgcatttgattccagacatagaaaatggaggaggtgaaccaaactctgaagcaaaaaggttttatgatatgttggatgcgtcgaagacgccattatatgaaggctgcgggaaggtcattctcctttattcgctgcaacccggatgatgaatataaagacggattataatttgtctgaagattgtgtagatacttgggccgattttgtgaaagagatattacctgaagacaacatctcaccgggttcttatgtagaaaatgaaaagcttgtttctggtcttggtttgccatatcagatgatcgatgtttgtatcgacaactgtacgatttactggcaatcggatgcagagtacttagcttgtcgtttttgtggaaagccccgattccaagacacaagtggaaggattcgagttccgtataagcgtatggtgtatctcccattagttgataggttgaaaaggttatatcaatgtgagtgcacggcgggcgtgatgtgttggcacaaagagcattctaacgaaggatccatagcacaccccttagacgcagaggcatggaaacattttcagacaatgtaatttatttttgcagatgaaagtaggaatgtttaccctcgtcttgtactgatggtttcaaccca

SEQ ID NO: 18351 - DNA, 2677 bp, Arabidopsis thaliana landsberg
ttcttcttctcttttttttgttacaccagagaattttacagtaagaaaaaaaaaatgaatatcacaaaagcttatgtgatttttttccttgtagtgatattgacaaactcattgtccaactccgacgctttgccttcattgggtatattgttatattttccaattatttttgatcattaagtaattgttgaatattttattttttgatgaaaaaatgtaccgattttaatatatgtgtttgtatattttacatttctttaacattttttttttggaacaatacttttctttaatataagttatacactacaagaaaacaagcgatttgcgaggacaatttgcgatggaaaaaatccctcgcaaattgctacagatttgtgagacatttgcgagggagagaagacacgtcgcttttccgtcgcaaattttgcgagggataattccctcgcaatattgcgtgaaatttgcgaggaacttgcgaggacgacaaaattcctcgcaaagtcattgcaaattgcgagggacttgcaagtacaaatattgttctgtgggaatttttgcgacgaaacttacaaagatcgtgatttcgctggatggttaaaattatatgtaagtaatatttggaaattttgatatcttaatgacttatgttgaaatgataaacttaattaaaatctactttatgtaggttactaacggatgtgaaaatgaacttttactactttggttgtatgagatcgttcaagaaccaagatctaagatcacaaccgcaaaatcattcgtggtcgatgtcaatgcaaacaagacttatgcaaagttcaaaccatttatcctagcatcacaagctttctatcttacccgcgtgtgaggcctaggcgtgaagtgtggttatcggttattaaagttaactccagaggccgtatagtcggcctagttgatgatgttgtgatgtaacaagaaagtctcagagaagtttccataccagacataacaacagaagatgttatccacattgacctacaaaatagacaattagaagacatcacagacggttccgaagaagaaaaacaataagacgaattcagcaaatctgctgaaagcgttgagtcaaaaaatgatagtaatgattcagaaaatgaataagaataaatgttactatattgtttacttttgatgtttttactaaatataataaataaatgaataaataattcagaaaatgatttatatatactttcaattttataattttaaagatttttggtaatttcaaaacttataaattcttaataaatttctcattttaaatatctgaaatttttggatatttttattaatttttgttttttgaatactttgcgaggagttgctattgacctcgcaaatccctaacaatttgcgagggacttacgatgaaagacacaaatccctcgcaaataagttgaaaaccctaataagtcgtttcctcgcaagtccgtagcaaagtttgcgagggacttgcgaggctttttaaatatatatatacactgcaaccgtgtttgagctgcgctcaaacctagccgcacacaccgaaaccctaaaattttcttcttctctgttcttcttctccggatcttcttctccgttcttcttctcctttgttcttctccgttcttcttctccattcttcttctccgtcgtgccacatcctctgcgaggagatccagatagccgccgctgaccaggaaaccctaatttcggagacaactcggtcttctttgccgcctctcctctcacatcgatctgcaaggtaaagaaatgtttctatttgaaaccttatcgattttctgtagatcttagtaaggtttacttttacttattcgatttgttctgtttcatttgatttgggtttcgtttactcaatcgatttgttatgtttcatttgattagggtttcttttactcaatcaatttcttatgtttcatttaattagggtttcgtttactcaattgatttgttatgtttcatttgattagggtttcgtttactcaatcgatttgttatgtttcatttgattagggtttcgtttaacaaacaactaaatgatgagcatgtgtatagcattagacaactttatattttgttggttatgcaaattttttagtttaatcccacaggatatctcgactaattgtgattcttttataatagagtttcattttaatgtttgattttctctttagatcttattagggtttcataatttgagtttgattgtctctttactaatgtgttatttttatttgcaagatgagcttctccgggaacgattatacaaggtatctgtctcagcagcaacagagtccgcacacgagtgtaagtgaagggaacacctcagctgttaatggtactcgtcgttcctctgcacaacagatgccaaccgatctgaactctaatcatccggatggttctgctccccaaccgcaaaatcattcgcctcaaccttcagtcaatcattcgaatcctctaactgccaggcttaacgacatgacactagaagagttgcttgaaagtcctgggcgtgcatctttgcctagattagatcctaaccgtcctccgggaactttctggtaagtataagtcacttgttaagcaaaataagttaatttacataatgatacagtcacttgtctctgtc

SEQ ID NO: 18352 - DNA, 747 bp, Arabidopsis thaliana landsberg
aaatccagtaaaaaaaaatcttcaaggtgacaaattttttatttgctcttaattttcttacaatatatacaaaacaaagttaagaaaacaactcagtaatatgatagtttaactttaaactcctaattttattatgcattatatggatatgtaatatcaaatatcaatttatttttgttgttttaagttcttaaagagaatatttaatttattctaatttaacttacatttacttaaagtattgttgatcatttggaaattgggtagtgtcatgacgtctttcactatatttatcaaattttatatgatttaattttccctttgaaccgatattctgagatctttagtcaagtaagagaattttccattgagagacatcttaaatcatatgctttaaattttcatatgtgaagaaggttcatttattatttcgactttcaagacaattggtaatacatgtatttgtattttcacaaaaaagaatattttaagttaaaaaaaaaaaacatacatttttcacgaaaaaaacggaaaataaactatagtgcattgaaaactcttaaaaactaaattatcttttttaaagacatcacaatttgtaaacatcaaaattaatatttttaattactttcgagttttctattaataattatagataaattttatatatagtttatttttttagtacacttatcatattttatgtgacttttggtttcctcaaaactgacattcttagatctttag

SEQ ID NO: 18353 - DNA, 565 bp, Arabidopsis thaliana landsberg
  unsure (1)..(565): unsure at all n locations
aagcattttagttggtcaacattttattactaacacatgtcttactaataagtgtgtatcctaattatctcatttatacaaaagtataagagtatatcaaaaacacttaagtgaatccacttaagcaaaccattggcagatcgacggatcttgatttatttccatcttcaagttcaattatcatgtgaggagtccaggctgctcttaaccgtgagcacgactgacatatcagttttacactctgcagaggtgacgtatatttacccatgagccgcaattcccttcttgcctaggttgatcagagtcgtattcacttccgaggtcaatggctagggtctcactacgaggattttcctagagtctcaatannnnnnnnnnnnnnnnnnnnnnnnnnnnnnnnnnnnnnnnnnnnnnnnnnncctatactccagactgcagggtaaatctttgggaactatgctcgtatccaatctgcctgagctagaactataagcgtttgccagatgccccgttctggtcgccacgacgatcaccaacataagactttcctatttatttagccaag

SEQ ID NO: 18354 - DNA, 1262 bp, Arabidopsis thaliana landsberg
tatctagtaagtcttctttaccaattaccatgctttatcagtttttcttgctttactttaaatgatcggttttttaagctcttgtctcattagatggaagaggctccattaacccgaaagggttacaattttacaagaacttcatccaagaacttgtcaaacatggtaacacccgtcttttcactcttcttcaacttttcgtttacttactattaattggactatatgtattttttcctataggaattgagccacatgttacactacatcactacgatcatcctcagtatctcgaggatgactatggaggctggaccaaccaccaaatcatgtagagcggcatttactttgcttcttcgttcaaatccgtttacaaaaacaaatctgaaaaatgaaaatcattgttatttgtcatcgcagcaaagactttaccgcttatgcagatgtttgctttagagagtttgggaaccacgtcaaattttggaccacgatcaacgaggctaatatattcactattggaggttacaacgatgggaattcaccgcctggtcgttgctccttccaaggaagaaactgcacgttagggaactcttccactgaaacatatatcgcaggccataacatgctgcttgcacacgcctctgtttcaagactatataagcaaaagtacaaggtctattttcttaaaccatgcatctatattttagataaacctctcttaaatatgatgacaaaggagtaaggtattataaatgtaatgtgcaggatatacaaggaggttctataggctttagtttatatgcaatgtattttactccttttacaagctccaaggaagatgaaatcgcaacgaaaagagccaacgatttcttcctcggatggtgagtcagacacaaacaaacttaggaaacatatccatggttttaaactaaaagcaaaagaaaacatttactctttgaaatcttaggatgcttgagcctcttatatatggtgactatcctgatgtgatgagaagaaccattggatcaagactgccagttttctcaaaggaagaatcagaacaagtgaaaggctcatctggcttcataggactcgttcactatctcacggcttcggtcaaaaacatcgatatcaacccttctctttcaggaatgccagattttaactcagacttgggtgaatctattaatggtatgaaccaaactcaatctattgaatataagaggctcaagagaaataaacatatttttggttaaaaatat

SEQ ID NO: 18355 - DNA, 1211 bp, Arabidopsis thaliana landsberg
acttaactaatgtataatttcaccaccagtggatcgtgattccaccaagttgatataaattgttacaactataaatctataatctatggaaactgaatgagttgcacactgtcacactgagtcaagataattatgctctctttcttcccccattctaaagccagtcatagagaaatgacatcaacagcagcaataagcacattgtttcccagtatgatcattgaacacgtctagaggcacatagacagacattaattagtgagcaatgacataaatatatattgaatatcaactcaaagggatggaggatatgcttattaatctcacagagactataaagaagataaaatagattttgatgtttcaagatttaaaaagaaaagacagattctagactcaaactcagttccaaactagttgtctatattttgaggtggaatatagacaccggtccccattcttgtaagatcaccaacgattgaagaatcttccagatcataatatccgtcttcgtccgcatccatgtattcaacattgttagggaaaaacatgcgtggtaaggagctaagagagacacaaaaaggttcagattttgagaggaaaatgcatagatctccaatgtctttagtgtaaacagcatttccttcgtcgtctagcctaaacaccattaaagcttttgtgctcaatttcgacatacctctccagacggccttcctgtaccacttaaccaagaaagtttcatttgtggttcttgactccaccaagtgttcgctcgtgcaacacgaatgcaagagctcccttttggtcttggtgagctcggcaaggtttttgaatcgcaacctctcaatcttgggtttgttcttgtgtttgtgcagatcccatgatccaatgaggtgacctccagatccaagaattcgaagcgtgccgtctgtcttgcaaaacataacaggggatgagtagaaacatgggttttcgattctcatgttggtccactcagtttctgtgagctggtctacataagatgagatgaggtcctaagaacttgagagcgacaacacagtcttcatcctcaggagaagaagaagacatggcgacgttggtgacaactttggtttggcaatgaggcagagtcacaacaggagacaggggaatgcgtttcggatctgtatcagatgcaaccaggtttagatcgtctggagacgcactagtcc

SEQ ID NO: 18356 - DNA, 2127 bp, Arabidopsis thaliana landsberg
cggaatgacttctagcagactcttgctgctgagaggagccgggaaattcctcaccagattccacttatttctcccgaaccgacggtctgtcctgagaatcctcccccagggcatacgtgtgtgttcgaaattttcttttcgctatgcgttggaatcgcacttccacagttgtgcccgaatgttattcgaactgtcttatgcctcattactctagctgaagaagacagattttctccctcactgaacgatctccttcagctatacgcagttaagaaagggcgaacaaagggaacatttttcgtgtcacctcggaaaggtttctgagttttcgatgacttcccagataaagatgaacaatggagaaaatcatacttcttctttccagtgaacgatcttacttatggaaacaagactggcttatttgtatctgaatgggcagctcacaccaatagatagtgaattcgctttaggaaaacacaacttaatttagttgtaatttttgaatgcaaacactttgtggcacctgaactgaccatcttcttttctgtttttgttttcatttaaagtcagcacgcctcccgtttcacatactttcgctgctcacttctcgaatttctgtcgccaagatctaggttgggagtccttgaccatagatagaatttgagcttcaggtcggagaatcaaatcccgaactgaccttgccgtatcttcgcctcctttctgtccacgaataatcgacaaaggcgacatgtctctctcttcgtatcgcgcagaaaagaaacttgaggagagagagagccgagcaggaaaaggcgcgaattaaatccgacaaaaccgtgatggcggggacccttgaggacaacaaacttcgttctctggagaaatcgaaataccaacaatctgactctaggtcgaggtcccgccagacgaccaacaaggcttcggtgtcagctgggaaaaaacctgaaacccccacttcgggctctggaaagactattaaggaccccgctagaaaagactccgagaagcgggctgctgataagaaaaggaagcaacccgaagagactaacccctccccacctcgctcttcccgccctcgccatgaggaaaagggagcgaagttgaaggggattgtgaaggaagcccctcagaacctggtggtctgtcttctcgagaatctgaaacctgcgaatcggaacgtcgcaacgtccctcttccaggtaacgaactcatcaattgtttcaacttttgaatattgtctttcgatctgacttcaaaatgtttgacctcctccaatgacttttgcggatacaatgaggactctcgttccgcctggttctgccatagctccttttcacgagatgaaagaagttcaacaaggaaaactatcttcgctttgccgaaaaacttggcaaggtaaggcccgaactgaatccatatttgttatgtccatggatgacctacttgattaacaactttttattatgcagttaatcctagagttcaactccgttttctgcagtcacgaggaccaactctctaacaaggatgttgaaattgagagtttcaagcgaagtgaagatgaaaatgccaaggccgtggagaaagccaataaagtcatgaaccggatgaaagctgccgaactgcaggtccaaaagcttgaagtgaacaatatcgatctgaccgcgaagctcgaggccgggaagaatgcctatctcgacgcaatcgagaaagagactcaagctcgagccgacctcagaacttgcgaagagaagatgaagaaaatggaagaggagcaagccgaaatgattgccgcagcgaggacggacgaaaggaggaaagtgcgggctcaattccatgacttctcttcgaagtacaggaatttcttcaaagaatcggaagaggtcgagaccctcaaagtttaactcggcttatatcgcgtagaaatttgacaagaaaaagatgacatccgtttgcaagctgagctcggcgtatagtttagtacggatatcacttatgaccgcgaacttaagttattagcttaattcgggtatctctgaagcataggttcggatgtttagtaatccgcctgaagcagtttcagatgtgaaaaccaaatacgacttt

SEQ ID NO: 18357 - DNA, 2518 bp, Arabidopsis thaliana landsberg
ttttatccttgtcgagttagggctctggtcattggggatattgttcgattctgattctgtggagggcgtactcaccctcgatccccatgggggacttgacgttgtaaagaaatcatactatgagggcctctgtgcgaatatcatagacacagagaaatactgctatggactctttacgggtttttcaaatcgctaggggtctctgtgcaaagacaccaacgcggtcgatcgctcagtcgcgttttcccttacgtgggccggttcgggctggtttcaacccaatactgatcaccatttttccttttctttttctgccaggcttagggaatttgtagaaaattctagaaaaatgataaaaatatgagaccaattttactagactcctaaatccttctattatttaataaaaaaagttccaagattttgaaccccaaccatgaattatttagtaattaaaaaggccaaaacctagacttttggaattttagaaattatttgataactccaaaaatcacaaaaactttttaggtaatcctaatatgatagttagaacccttgggtgaagtttgacatgttttggacattgtttgatcccaaaaccccaaaccctagttcttagaataaaactgcctaaccctactagggtgttagcctagaaaaccctaattaccctagtgtactgtgaaggaaagttgtattcaagatacaacttgatgaatctatactatagttgcatattcatagcatcacatgagcattcatgtttatatatggttatgtatagaaaatgaagaagaagtaagtgttgaagaagaagagattgcatcaccaactaaaaatccacttgccgggaattgtttttattttgatatctgtggaatagatcccgactcccctacaacacaaggcaaaccccggtacatttaccttttccttgtgatttaaaatctttctcacttgcttgatgcattaggtgataggagttgattgataaaacaattcctgcattaccttccttgaatttgattaccctccttgatcacccgttttacaaaagattttgatgcttagccttgctttagaaaaacaaaatgttttgtttttacaaaagatgatgtggcaaaagtgggtgggatgttttcaaaaataaaacttgatggtggatccatcatggccatgatggattcaacatcgaaaaagatgtacctctgccaggtaccaagttttgggttaaaaagattaagctgagaccgggcgggtgacttgcacgagaagagagtctcggtgtagtgtctccgtctgagtcgattaaggaccttgtcgatgtaggcttgatgatcgaggaccctttaactggtcacatgcctcgtcatgggtaagccttgcctcgggtagactaaggccagaataagataacacgaaatgggcgtggagcggtggcgagagtagagtgtaccctccgtggcaagaggttggacggtggtgtatctgtgctctcggtttgcgtgaacctgatctggtcttaagaaccccggtggcgggttgacatatgcaagggttaagtgctacatatgtcgtgtgatcggagatcctcaactgagtataatcgattcggatcgccgtacctccgcggttatggagacttggccactgacttacacgtagcattccactaaagatgatgggtttttgttaagaaattggctagtgcaggaccagtgattgaactagggtagaaagaactctagttgcaggtaattttacttaacttgacaaataaaattggatttttaaggatccacttttagtaagcatttctgcaaaacagagtctttgaatattgaaaagccttaccttgactccattataaccagcatacccttgagagtcttttctttagtcgggtaagacttgctgagtattccatactcagggtttatcccttcgttgtttttaggtgaggaagtagcagacttttgctacttctgtgccaaggtggttccaaaagaagaaaatcaagactgaagtgcgggaggactcggtcctccacctaggatcttttgtttattaaacttatccgggaggagtttgtgcctcccctggcttgtataatattactactctgcactcacttatagtctagtctgtaataacataactcaagcttgctttcgaaataaatgtaagattatgtaatgtcgttccgcatttctttatctccgatgttctgtaatgtctgcaagacgggtgagacgttcctggtaaggtaaggaaagataccgaacttgtcaagtagtcaggggcacctacagggttgtctaaaatccgttggacaaggacaactgtaggtggacctaattacttgggaggttccgtcacaattaatttcactataaaatcaatatgtactgtatagcgtattttaatttcccaacaaatgtaatgttgtttttaacgaccgataaacaacatatttgtgaaattaaacaaataaacaatgtagatatagataaccgaa

SEQ ID NO: 18358 - DNA, 2049 bp, Arabidopsis thaliana landsberg
aaacattaaaattactaatcaacaaaaaagaaaaaatttaagctgtgcaaaaaattctaattttagaacaaagtgacacgaatatgagattcatatgaaattcatatgaattaaaaaaaaaaaaaaaacagatggcaagtttaacaatgatatcgagatagagagaatccaacaatgaaaatataatgtggtttaagatgggagaaacatgaaggatgtggatgattcaaaaagaacagaaaaatcaaaatcagacgtttccattacaattgacaagattctaaaccattttggcctaaaacaacgaaagaaccaagagtttttcacatccattgggataaataaatctaaaaatcatttaacggctactacagtctacagccgaactagtgggagatcagaaaaatagacagtagaacttcacttccctgggtcgatcaacataaagatgtaaaaatgctcagcaaaatctgaacaccgaggcgagcaacaccattagtagcattagcttcaagtgtccatttagtatagatgttgcagctgagtggtgttgttccctgcaacaatcacaatgaagagtgttaaaattctcataatcgaaaggtataacaaaagagagtgaaagaaaagtttatgaagaatacttctgcaagttcttaagagcaccacagtataggacattgtcaggaggatccatctctgtctttccatcctcctcggggtttgtgatccgcatataagtttcttcaccaagataccatctgtcaagattctctactcgaatgttccaaactccgacattatcaagggaaatcagtacagccgtccaacccccagggtatacctaaataacaagaaaaccattaagaaaacctgcagatcagagtaattttgagtgatgctacggtgtattaacctcgattgtgcttcttgagatggcatcccagttgttatatgaaccctttttgtcttctgaccaaataccaaagtccatcctggataacatggtacatcaacaccagacttttgataggatattaaaagaatgaacaagaatagatgacaaggtgcaaaggtttcgcttacccaacaacgaaaaatgaatagccatcaacatggaagctctggatcttggtgtcattgttctggaaaacaacttgtataaagcccttgtatgttgcgttgatcatagatctatccaaacgaagaggtctattaaaaggtctgtcagggaagtccagcttataagctcctttcactttattgcgatccgcaagcctcactggagtgcttggattcacaaatgagatcccgttaagtgtagcacgaagtgccccgttaattattgttggaggcaaacttctcaaaatgtatgtgttagtgatgtttatttgaccataatgaaatgatccctgcggatttggacgagctccactggcagatgtattttgcttgcaaatcaaaagaatcaggatcacatttacatggcaacaggtttatgtgaaacattcatttgcttgaacagttttctagacatactttatggctctcggttggttcattgcagaccaagggtgattaacatcaggtgctgaaagtggcaaaggaccataagcaggtcctttggaattggaataatggagaatgccaacacctgtggctgtttgccaccctgtttcattaacaaatctagcactcgccacaatgtagtagtcacttgtggcgttttggtccatggttaccaggaaagaataagactgtcccacatgaatatcaaaatcggtgaagttcatttgggaggtgtagcgaccctcagtctcaatcaagagcaatttgtggttgtgaatcctgaagttcaagcttgtcgagataccaacattgtgaacacggatcctgtatgttttccctgtaaaatgtaactcagaatgaagtaagagggaagaaatatcaaagccaactttgatttgcaaagcaaagacagcaacaaaaaaaactgaaactggagatccaatgcacacaattccacaaccaaatgcaaatggaaggaga

SEQ ID NO: 18359 - DNA, 1955 bp, Arabidopsis thaliana landsberg
catgtcttttgtgttgtatatatttcagatattgaagaaaaagaaaggaacgtcttgacttcctaagagttcaagagaaaaacagaacaccaaagagaacaaaaatagagacaataagaaaacagagaggacaacccgaagaggcacttgatggtgataagtgtttgatatccccttgtgatatctttcatgattttttccaattctagatcacgtccaagttgtaaggtacgtctttggtataaacgcttctacatcgttaaactctaatattagctttggatgcacggatgcacatgcatgcaacaatttaatcactagaaacgaaagtgaaatagatctgctaactgtcactgataatgaagagtgcttaacttaggtaagcttgacattttggtttctttgtccataataaacatgttattgtcaccaattacctgtctttttttgaagtacaaacttggagaattatggtggtaaaacaaaacggaggcagatgaggacttcccctcttaaatcgtgaagtatatatatatatatatatactacgagaaaacatggtattagcgactacactattcatagctaaacagtcgcttaatcgaaatttacgactatttggcgactaaaacacgtagttggcaatacaagcgtcgctatattgatatgtagccaaacagtcgccaaatggtgaataactagcgactacataagtagtcgccattgggtcgccacccagtcgccaattagcgactgtttggctacatttatgccactatatagcgattagttggcgactgattagccactaccgggcgattgttgtaaaaacatggtaaaaacatataattaatatccaaaaactatttttcttcctcgattctcattacctttagaccggttttagttagctttaaacttcggaacttcgacgacggtcgtggctagtcccccaaccagcaacgcctgtatgaagtacccagtaagcagttcttctttcacaaccttgcaattacagcttgaggaagccaacctcaagatagatgaacaagctactctacaagcacatcgtgaggcagaggctttgcgggttgcagctgagcaagcagagatcaagcgtgttgctaatgagcaacaagaagagatcaaacacttgaggatggtgaagaagtacttgaccaaaactgaccctaggtttctcgtcttcctcgagtctgctggtgctactgcttcagaagatcaaacagaggagatcaagactgctactgcttcacaagatcaaggcgaggagtgaacatctcatctccccttccattagttgcttttcttatcaaaacttaaaaacttgatattatgtagcttgaatattatgttgtgaacatctttgaattatgttgtgtgtttgaatcaaggttctttgtttgttaaatacacattgtttgttaaatacagcttttgataaataggattccaaaaaatgaatgtaaatagataattaaacttctaatcagtcgtcaaatagtttcaattcagtcaccaatacattaactaaacagtctccatgtagtggcaaaacagtcaatatatcagtcacaaaacagtcgccaaagagtcactatgtagtggcaataatgtctcacaacagtcactaaataggcgactgttaggtgactatatagcgacaatattacgtagtcgttcagcagtcgctaagtggcgatggtttggcgactaataaatttagcgacacaaggtttatcgactactacgctacttaatgtgttgtcgccaattacatgttaattaattaacctctaaaggagttattaaataaagataaagtacatcatgtagttcaaataaacagagcaacgtggagcaaaacaaacggaaattagcaagtcagtgtatggtggttggtgatggatactagaatcttggagatgattgtagaa

SEQ ID NO: 18360 - DNA, 716 bp, Arabidopsis thaliana landsberg
ttctgcttgagacaccaatatatatggtacatcctcttcattatcttcagtgtgtaacaagcgtgaaaaattaaccatatgatgaccatatgcatctattttatatcctctttctgtacgagtgtccgtccacttacacttgaataatacaactttgaaaacttcatagttgtttaagtccataacttcgatcagattcccatagtaagctacagttcccgttcttgggttagtatcacaagaactagcatagctcgtagtctcagcagccacatacacaccactatattgtgtttttagatctaattctctttttgttgtcctgaatttgaaaccattgacattataagctgtatactttacaactttttcagatggaccctgagctaagcactgtaaatcatcagttagctcatctaactcattcgtctcaactttctgcttgatctagtttgcaaaattaagatgcatttctctgtcaatatcgataacacgattcctcctgctttgatgagattgtttattcaacaactcgtttttatatttcctaaacatacaacaaccctaacgtttacattagagaatttcgattaaacataaatataattagttgttcttgaattagataacttactctcgtaggtgatctattagtcagcagttgaccaatacatgtcgatgtgcttgttgccgctctacatgattaagagtataaa

SEQ ID NO: 18361 - DNA, 517 bp, Arabidopsis thaliana landsberg
gcatgcatcgccctgttccgaccaataatctgcatcgctacatccgtagtagaagtcaacaaactcctagacggatggccgaacaaacttgtaatcaaaatctgaaatcaatcatcgggtttcaaaaggaggtaatagttgaggcagtccttataaaagagtctacgtatatttataaagtttttatttcggttttttacatatagggaccgccatcaaactttcacatatctgtaggcattcttgcaaaaattgttagctatatagctgaaggtggaattaaggagttaaagaatcggaaatcgccggtagggaaggaatggtagctatatttagtctagatagcctaaaatctgtaatgtttaacaaatctagagattttgtattgtggtccacacttgataatgtgtacaattcttcttttttccaaatgtgtaaaagaaaaaaaatccttatgctttgtatgttaaaagcattattttggcatttctatttttttacttggaagaggcaataa

SEQ ID NO: 18362 - DNA, 3227 bp, Arabidopsis thaliana landsberg
acacatttcacacaacagtaattgtttttttcatagtatctttcattttattgtgtgacaagagaaggttgatcttcttttttttttttttttaaacatagatatttgttggagggcttgactctagtgtcactgatgaagacttaaagcaacctttctctgaattcggggaaatagtctctgtcaagattcctgttggtaaaggatgcggatttgttcagtttgttaacaggtaacatataattgccttatttaaccatggattaagtattttctcacggtaatagatttgattgttttaaacatttggttgcagaccaaatgcagaggaggctttggaaaaactcaatgggactgtaattggcaaacaaacagtccggctttcttggggacgtaatccagccaataagcaggtaaatcccactttctatctgcattagtgtttagtcatgtagaacaaacgtatcaaaatgttctctttttttatagtaaagaaagactgttttgtgttggaacccttatgtgaacctagtcttgtgcatttggttaatttgtttttttttccagtttttactttctctgttttaaaaagttaaaaccaaactttgatttgaaattttactgtttcgttaggtattagaaaaagaaaaaggttcataaaatgttaaacgccttctgatatatatttaatttaaaatattgtggttcatttactttgtttgatcttagtttggtttagttaaggattggtataagactactgttatggtttctctttgaaagaaagtttggtttgctgtggtttccctcattgatgtgataaggtttgaatggctctgattgacacatctctgattctttcaagttttgtgttgtcttgcagcctagagagaagtatggaaatcaatgggttgatccgtactatggaggacagttttacaatgggtatggatacatggtccctcaacctgacccgagaatgtatcccgctgcaccttactatccaatgtacggtggtcatcagcaacaagttagctgaggaaactaaaagcttaatctgagcatctatctataggacaacaaaaactcactcaggttaggtgatgttaggaagaacaaggcaaaaattgttggcttcttgtctctccttgagtttagggtttatcatctagtggacatcgaatttttggtggaaaccatacagtaatttaggggacttggatttgattgattaattttatttgtttcttctgatacttttgactatggaagttattgatcaaaaaaaagtgagttgcaccaattgattatatctattttttgttattagtctaaatacttaggttttattttgttgttgtgtttggaggtagtaatcgccatcaggccacagctaataatgatcctcaagttagctttttatatcctttattatttttaaggtctcaaagcctctttcgactgtctcaattaggaggcgtataaacttagctattttgtattggtggtacacacatagtattagaatagctagaacctagaaagatcagaacttgcaatggaaaagttgggcacaatccttagtatcaccgcatagttttaatacaatgtcgtcgtaaatcacatccaatcaataatgattctactttaaaccttttatatatgtcagacatagaacatagtgaagcagtatatcttatactttgaagaaggagaaatccgaaaaggcctgaaaggctggaacaatgagaaattttaggacagaaaattaagcattctgtacattatacttatttaacatttttatacaaagagttatgcatataacaaatataaatgtttaaaaccgatatttaatttgtgtaatgcgccggcaaaaaaaaacaaaaaaattgtgtaatgtagatgtctattggttcacacctacatcaagtgccgaaagaggaacataaatccttttccctcaaccgtatctaattaggtgcttaatttggtacgtagttttgttatatttggtttgtagtttttttttttatttgttttctctataaaaaaaatattattaattttttataatgagttggaataaggtgaattacacgtatcaaaaaacgatatcgtaaaacaaaacagaatcagaaaaagggctcgaatcttggtataccatcgaaaagaaacagctgttcatgagttccggcggatgcaaggtccacaacttcacgagagaatcaagagaccgaaaaaaagcgacgaaagcaatcggtttccctgcttccgtgttagaatattgagagaaaaagaaaagacagagtaagagataaatatatattctcttgtaaagaaaacaagaacaaaaatagaaaacttttaatgaatctgaaacttgttagttatttacatgacgatacaatgaatatatatatatatagaaaacaagtagacacaacaacacaatgagttttgtctcttcctacttgtggatctcctgacatataactatcttaatacataaaactttaatataatcagaaactcaattatcgaccaacattcccccttaattgagtttctgatttacttcaaacttcttcctttgttcttctctttggtacacaatttgatactctttgtcaattgtttcttctgcaagacaattgaacttgtggcctttctcttaccaccggtatttctccatgtctttgaggtaagcatcttcttatgctccattttttctccgaggtaagcatcctcttactctccattttttctttgaggtaagaatcctcttgtgctccatttttcactgaggtaagcatcctcttatgctccatttctctttgagaaaagcatccttttgtgctccatttttctcggaggttaacatcctcttatgctccattttttttttgaggtaagcatcctcttgtgcttcattttttttccgaggtatgtatctgttatgctcccatttttctctaaggtaaacatcctcttttactccatttttctctgaggtaagcgtcctcttatgcaccattttttctatgagttaagcatcctcctttctggtttggtgtatctctttgatcacaatcacgtctttgtgacgtctcttcttcgattatctcttgtaacctttttgctgagtagccttgcactattctttcacagaaactactccgtgttgtagtcttcttacaactcaccacaccttttgtagtagctga

SEQ ID NO: 18363 - DNA, 3648 bp, Arabidopsis thaliana landsberg
atacactcttctgagtcatgtttttcaatcaaacaaataagcaatcaccacacttgtatcaaattccatatcacataaaattcataattggctcaagcgtatcatagtcatctacaaattaaacagagttagacttgataaagttttccttaccgaaaaggtacccgtttctgtcaccaataaatgggccgatccagaacttctcaaactttgttttcggtttctaaactcgtcggaatggaaaaaatttgaaaagcatcactgaaacgaaaataaaataaaatgggccggacttaacaaatatattcaccacacaactacgcgtgtatcaacatttttttgtctaatgcatagttcacctgaatacgaacgctagcataaataccaaattcaatttaaaaaataccaaaatacgttgttatcaaatctttcggttagagatcggatcaaaccccaaaggccaaaacacatgctctcgtagtcgcacttatataatcaataactgctaaagattactattgtcacgtacgtgatctatattctcttcacatgattagagaaaatgatttcaattataatggtgtctccagcaatttaaatatatatgcaagtataattgatcttaaattatatatacaaaatacttcagatcatagagcgattttttagctgcaatgtttcaaaccataaaacgtgcattgctcctttaaattctctttttaatgtgtggttaaatttttcttagtggatatcttattactgtcctttacaaagatatcaatgtaatagtgaaaaatatattaaaatatctgagagatatcatatgcacaataatcaagtacagtgtatcagatatcgaatggtgactgcgttttgcggtacgggagaagtgcggtgtggttcaaatagtaacaaaaatatatagatatatatgtatatgcagagattttgatactgttatagcactgttgcggtgcggttttgggtgcgattttggttaccattcacagcatatgtatattcaaatgcagacactattatcagatgtcatttctaacaaaaaggtaaagataaacagaaagaatcacttggtgatcatattatattactccttctactaccaaagaagaaataaacagttactaccaaaaacaaaagtttaaaagaaaattgaagctaggtgcacaaaaaaaaaaaaattgaagctttcttttcttcttccggattgttatttttctttgttaaaatctaatttatcaaatggatatcttttttctctcatataaatgtgtgagatcttaataggttgtgattctgcattaatgcacgtaagtacattcaataaaatagctttttataataagaaagatagattttaaaaatgtatcgattttttacccatatacatttttgttatttctaataatatttttccaataatcatttacttaatacagaatctcaatagctatttatctaattcgaatttttttggtttatgtattagtttgcaagtcgaggacctaaaagtgatccccgttcagtgtattcgtgcgacttgcatatatgtgtaagacacattcttgattaaacaaattttcatctttcaaacagttaaaaaaaaaaaaaaattttaagttggttagattcaactcatcattaacattttgattatatatataatttgtcttatatgctaaacacatcaacaatagtttatgttgcataaactgttctactgcatacattttaagcatcttttacgaacgaggacaaatataattggtagtgcaaatagattgaaatctcaacattacttttctattttattttgttctttccttcctcctttatctttctttagctgttcttcttctttttctttttcttttgttgtgacaactacaccaactgattagtccctccatctcctattgtctccttcataacacaatctacaaaaaagttgaagctgtctcttagcaaaaaacaaaaagttgaagctgccatttttgacttgaggaatcttcatttttcttcctctactttgacttcaaattcttcttcattctatattctttaacaccgtacccttttccaaatcttcaaggtctctttattcttttcccgggctttggctcttgaatgatatcaaacaaaggcagatatatatatattgtgtgtgagagtgtttaagagagagagaaagaggttatggctatagacgtttgttgttcagaggcttctggttctggaatcagtccaagaatctcattctcctacgatctagactcaacggacgacggtgaagtcagattagactcaacacttctagattcaggttcggagttcgatttttgttttggctcaagttgttctgttcaagaagtgtctccggctgatgaactcttctccgaaggcaagattcttcccgtacagatcaagaaagaagaatctttaccccagacagtaacatttcgggttccaagatcagcttctctctcatcatcatcatcttcttcctcttcctcttcttcctcatcgagagcaccagaaaagaagatgagacttaaagagcttctattgaatcctgaatctgatttcgaagacaagccaagaggattgttcttacagttcaagagaagcataagtcttaactacgacaaaagccgaaacagcaaagggctgatcagatcgtttcatttcctctcacgaagcaactctactccaaaccctaaccttgacttgcttcccaaggaaacccatcaccctcacaagactcacaatctacctaaacacaagcctcctttaagaagatcatcttcgctctcttcttcatcagttcctttttactcgaagaagccactcggaagaaacagttttggaaacggaaacggtggaattcgagtcagtccggtcctgaatttcccaccgccggcctttatctcaaacgttgccgacggatttttcagcattggatctctctgtaatggtaagacaaacacaaagacaaaattatgaaaacatcttttgtttttttgtggccggagggaaaaaaaattcaaacagaagatgtcttcttctttttttttcttactgtttgtataatgatggaatataaatatcgacagcacatgtgaagattagacagcatgtggtttttgtctgtaatttcaaaaaccaaaaaaaaaaaaacaagaataattcactaactaggccgtagcagaagatcaaaggaatgcttcgttgattggatctttgtgataagattatagcagtttggagtagagttatagcaaccccaatggtaaggatttttaagggttagttaccaaaacaatatgttttattggatcttagtattaacatgtgtaaagaaatttaccaaaaaaataagatacggtatttgtaaagaaaaatggatagttatgatgataaatgatgattatgattttaaaaataaaatatagaaaaattgatcgtcgtggtgatattcgatgattagtataatgtcttttgcatattcttgggttgactttgactggcattttacgtcgctcgccaggtcctaatagaggtgggctaggatcgtaagactaaggttcagtaaattttagtcgaacaactcgacattggatttgtgagttt

SEQ ID NO: 18364 - DNA, 646 bp, Arabidopsis thaliana landsberg
gaggcaactagaagaaaaaaactaatcgttggatgaagtatgaggcaaagttttattttatgacacattgaacagtcatcctccatgctttccttacaaccttgatgtctttgcttgttaaaacgaccaatctaagttagtttttcaatacagttttttctgtgaattttagtttagatgtagctttctcaatacaaaaacacatgtttaattcgtcgtaagttgattacaactaaagcaagaccaagatcaatgtaaagaacagagaatggaaggagctttaggcttgtcaccaataacaaaacgattttaaattgatattttataagatgaaggaggagagttgtttccaactctcaaagttacaatcataattctcattaaataactatatatatgaatttgctaatttgctaaaaccctagttacatggacattacattgggcttgggcttgctttagttgtgaaccctaataattaattcattgaaaagaatttgttgttaattaaattaattctaaactttccaacaaaataacataggtatgaatttggtcattccaaaaaacggaaagtcgttgctaatttacgtgtcaacatagcaatagatttgcctatttgggattatcattgcggatattttac

SEQ ID NO: 18365 - DNA, 777 bp, Arabidopsis thaliana landsberg
ttacaccatgtacagtttccaattcaataatttgtttttaattgaaattagaactactgtaatgggatcaatattagtgattatatttccatgttggtctaactttctgttctaactaaataaccttagctaattagtgtaacaataggaactgggaatataagtagtacaaaatattatgcaaaaacagtaaactttattaaagcaataatctcatgaaatagatgtctacgaatagagaacttattataacaaatcaaaatctagtaaaacaaaaaccaaacaaaaacagtccaacatgatgatcctatattgggaatgaaaatcaaagtgaaaccttttgaatttatttgtgaaagttagagagtgatcactccttctcaactttgaccttcacagccacattcttcttttcatactgattgctgctcctcaaacttggtactccagtctccacgccttttcctttctcatccctatcctttccgctaggatctcctagttgtgcgtgttgagaagtgagtctgaattctgggtttgacttttccaagtcaataggttcaacatatatcttcttagaggtgaaagattcatcagcagtaccatccgtgtttgcgtaaatacgcttggaagaaggagtaccggagtctgatgtgtcgtggctattctctaacatgagttgtggctgtggaaaaaaatcgtttaccatattagtttctaattgtaaatacacgggcaacaaagtttgagttaatctttggtttaaaaacctgatca

SEQ ID NO: 18366 - DNA, 505 bp, Arabidopsis thaliana landsberg
caaacagactacaattctagcattataacctgataagataaataacaacaaattcatctacccacaaaaacactgtcactacagagagaagcaaggtttaaaaatcgttttaaagcgtaagtaagtagcatagaataatttacaagggattttaaaagctttgaaaagtggttaacatggtttacaaatcgttttgaagcgtaagtaagtagcatagaataatttacaagggattttaaaagctttgaaaagtggttaacatggtttacaaatcattttaaagcgtaagtaagtagcatagaataatttacaagggattttaaaagctttgaaatgtggttaacatggtttacaaatcgttttaaagcgtaagtaagtagcatagaataatttacaagggattttaaaagctttgaaaagtggttaacatggtttacaaatcgttttaaagcctaagtggcatacatctattacgaaagcatatgcaaaagaggtaaacactaaa

SEQ ID NO: 18367 - DNA, 590 bp, Arabidopsis thaliana landsberg
gaataaagtggattggagcatgtggtcgactatacagatctcaacaaacactgtccgaagatcccttcggactccctagaatagatcaggtggtagattcgatcgccgaatgttctatgttgtccttcctggactgctactctggataccatcatatcagcctggcaaaagaagacgaggaaaaactgcattcattaccccgttggagctttctgctatacccccatgccgttcgtcctcaagaatgctggagcgacttagcagagagccattcaaacatgcttagccgatcactgggcaagcgggtagaagcttatgttgatgatgtggtgattaaaacagaaaactcagaaaacttcattgaagatttgcagctggtcttcaacagcctgaggcgataccggtggaagctcaacccagaaaaatgtgtctttggagtacagcagggaagttactcggattcattgtaagccacccgaggaattgaagccacccagaaaaaatcgaggccataatgagaatggaagcgcacgatcacagaagaaagtgcaaatgcttactagatgcatggcagcattgagtaggtcata

SEQ ID NO: 18368 - DNA, 736 bp, Arabidopsis thaliana landsberg
gtattgttaataaaaatgagagcaaacactaatctaatattaaattgaataaaacaattgtagaaatatatattctaaattagaaatagataacccaaatataataccacaaactaatattaaaatgaaaaatctcctttaaatggtgaaaatatataccctaaattagaaatagggaactcaaatataataccataaactaatattaaaatgaatcaatttgtttttaaatggttgaaatatataccctaaattgaaaatagagaatccaaatataatattttaatttatttctaatttattttggttgaatagattttatataaaaattatgatattattcaaaaaataaattagtgataatacttttagaaaaaaacttcataataagtcaagtagtgctatttttggaagtttatggaatgtgtgctattattgtccataaaaccagttttaatgctatttttaggaatttctcattgtaaaaagagcattgcaaaaatattaagacaacaacaaaagtaagctctttagctgatatacgaccaccaactatctggctatcgagaagatctaatatgcagggaaagtattcactagaataattcaatagatttgtttagtataaaactattattagattgagtaaatataaaaatagtatatttaaatttgagaggaataacatacttcaaatgaatcaaacaccacttgtcagttttttacggtatgagtt

SEQ ID NO: 18369 - DNA, 1113 bp, Arabidopsis thaliana landsberg
gtgttaaggaattgactctaaaatcagatttagcatcagatcactaagtgatccgttcgtgggaaaccttgccggattggaatccgggaaagggatcctacaatttggtatcagagcgattacggttctaggatctttagtatgggttgggagtcaccactcgtcggcttaatgagatcacgcggtagatgttttcttataccctaacgattacttttaagtttatgtggctaacttttgagttttcacagatgggtaagagggaaagtctgggaggagtaagaaagacaagcgtgttgtcgaagagacattggtttccaatgagacgcaagtcattgatgaaacaagggtcgagacaacaaaggatgggactaatccggccggaactgtggttgggcaagactctccggttcgttaagatccagagaatagcgatggatcggatgggaaggagaatccggatgcaacatcaaccgcccaagagcagtgggacatgataaaagcgatgatggcacaattggccacattgactaaatcccttgtgcctgatcctgtggcataagcggttgaaaatccgagggatggtgattggaagttgtggaagtcattccaccatctcattcttcgaggaagaggggagactatttgaacttactcgagcatgtcacgaagttgggtacaaggcatttcacggaaagttctgatccaatcgtcgccgatgaatggaggagtcgattcaacaggaactttaactccactcattgtccggaggattaccaaaaagacattgcgatccacttcctggaaggagatgcacataattgttggctaaccgtggaaaaacggaaaggtgatcaaatccgaacttttgcggactttaaggaggaattcaacaagaagttattcccacccgaagcatgggacagacttgagtgtgtctacttggactttgtacaaggtaatcggacggtgcgtgaatatgacaaagagtttaatcgtcttaggcggtttgtgggaagagaactcaaggatgagcaatcccaagtgcgccgtttcattcaagggttaagggtggaaatcccgaatcattgtttgattcgcacctttaattcg

SEQ ID NO: 18370 - DNA, 720 bp, Arabidopsis thaliana landsberg
gcctcttcttttttgagcctccgggggctgctgacatcgcagtatcttcggccttcgaataagcaccaagcagctcatcacttaaattttcaatgctttttaaccagtcatcatctggctcagcaaatttatctccgaacttgaaggtgtacttcagtctcacaagtccaccttcgtcggcctcttttatggtttcttgtggcatttcccatttctccgcgagcggccatacccggaaggcaatatgctcttgtactaaatctctcgttccaataaaagagcagacaacgccgaaggccctctggcattcttcggcagcttcactcatttcaaccttcggcttgcgaaggcggaagcattgccagatagggcgcataattatccctttaatgtctactcgagccttcaaatcgtttttttacgtagaaccattctttcatctagtctccaggccacctcttccgaaaagttggcacggggcagcttgacccagagcgggcaacgaagctataacagccaaaattattgtgatactgttctttaccccaagcttttgtctcatataacagttcgtgcaagctgcagaaactttttgcatttggctccaagccttggctcctcacggcccagacgaagatccccattcttatgattgcttcgggagtaatttgatgaaggtaaacctggtaaatcttcagaacttccaccacaaaactgctt

SEQ ID NO: 18371 - DNA, 606 bp, Arabidopsis thaliana landsberg
ttttacaccaaaaattattattttgcggtttttggccaaaaaacgcaattccacgattttacgatttgcataaaagataatccgggttttcatgattttttgaatttttttgtttcaatatgtaattttaaaaatattaaataagaaatttatagaaaataaaattatttaaattatgactataaatgaggatatatcagtcttttcttatttttggatgaaccatctccatccaaatggtttaatcaaatttatccaaatgagtttcataaatttgactaaatttagaaactcattcagatgtatcatccagatgatccatccaaatgcttgttaaattgtcaaaaacaaacatcatttttcatttctatttggatggatcatgtggatggacaaacaaagaggcctaactgtatgaaattactaatcaaatctaattatttttaatgaatcttttggttcatgttattgactgcgattttttcctttttctttttgcgaaatttgtcaataactactttgtttaaataatttattgatactgtatgattcctttttaaaaaaaaatcttctttgggggatacaaagaaatggaagtttcttaaa

SEQ ID NO: 18372 - DNA, 647 bp, Arabidopsis thaliana landsberg
ggggatgcggttcttttaacgtttgagaaagcaaaaattgctctcattgatggtcttaaacgtgtagaagacattgttcctagctcaattgggtcacaggttattattactcagttcatttcacattgtgatgattaagataagtccacttgttgattgatagttatgatgtttatagttgagaagtctgttttttttatgtatgatttcttcagattttggaaattgttggtgaactagagaacaccaggttcatgcttgatccatcggagaaggaagtcggtgatcagattattgcattgcttcaacacgggaagaaatttgacaactgtaatgacaacaccgagcttgaaattttccaccgtgctgctactagactaagtatcacttcttctagagtggctctggcataacgaagggctttaaagaaactcattgacagggcacgcgccgaagaagacaagcgtaaggaatcaattgtggcttatcttctgcatcttatgagaaaatgctccaagctattcagaagtgagatcttggatgagaatgactctccgggttcctatccatgttcgcctaatgaagatcatgggagtgttcatgggtttggtcgtcagctatcaaggtttggttctttaaacgacaag

SEQ ID NO: 18373 - DNA, 1504 bp, Arabidopsis thaliana landsberg
ctgcactaaccaatttcttaacaacccttcatctttactgaatttctacgtataggtcagtgaccaagtcttcatgtccgcgaagttatggcgatccgaatcgattatactcagctgaggatctccaatcacacgacatatgtagcacttaacccttgcatatgtcaactcaccaccgaggttcttaagaccagatcaggttcacgccaaccgagagcacagatacaccaccggctagcctcttgccacggagggtacacgctactctcgccatctctccacgcccattgtgtgttatcttattctggtattagtctgcctgaggcaaagcttacccatgacgaggcatgtgaccatttaaagggtcctcggtcagcaggcctacatcggcatagtccttaatcggctcagacggagacactacatcaagactctcttctcgtgcaagtcacccgcgcggtcttagctttatcatttaaacccaaagtttggtacctggcagaggtacatcttgtccgatgttgaacccatcacggccatgatggatccaccatcaagttttatttttgaaaacatccccttccctttgaagcatcacctttggattaaaacaaaacctttttgttttctaaagaaagactaagcatcagaaaaccttttaataaaacaggtaatcaaggaatggtaaatattttcaaggaaggaaatgcaacaatagtttggcacacaactcctattacctaatgcatcaaacaaagtgataaagattttaaaacagaaaggaggtggcaaatggactggggcttgccttgtgttgtaggggagtcgggctctgttccatagatatcaagataaaaacagttcccggcaggtggattttcagttgatggaggagtccctcttcttcaacagtcacttcttcgttttctatacataaccatatataatcatgaatgctcatgtgatgcttatgaaaatgaaaagataataaaagcatattatctaaggtcttgaatataattttccttcacggatctccgggaaactagggtttttggagtctataatgaagttcatagggcagaagactagggttttgggttctaggtaccaaacatggtccaaatcatgccaaactttacccaaggcttctaaataatacttaaagcttatctaaaaagtttggtgatttttggaattattaattagtttctaaaattccagaagtataagctttggctattttaaatactccataactccttattggaactaaaaatcatgaaactatttttattaaatactatggaaaattaggaatctagcaaaattggtcttgcatttttagcatttttctataattttctaggaattctctagttttggcagaaaaagaaaaagagaaaggtgctacagtattgggctgaatctagcccgagccagcccagccaaggcagatagccccacgcgcgcgcccgcgtgccgactttgcaaagaggacctc

SEQ ID NO: 18374 - DNA, 2914 bp, Arabidopsis thaliana landsberg
tttgatttaacaaatacgcttccaggaaaagattaagtcacttaaaacttaccttagccatatatgaaactgggaaatgtgagtctctaaagtgatcttgccaagccacctgcgcagagaaatgtaaagagttttacatggaaatgaggcaagcatatcaaaccaggttttagtttaaatgtaagtacgagttgactcacgcaaagagagtcaatgagacacttcgaagctggtgggtgaaattccgaaggcatatgtaaacactggaacccagaaatcaaatggtgagtcatgtttcagtttcagcaagtgacataagagacaaatataaagaccaataaaaaaagagttttatgcacagacgtgatggggatccatgatgtgtacggatgatacatgttgtaactggtcctgtccagcttgtagatacattcataccacacatagccaacctaaaatgtgaccaaacgggaaaattatatcaatctgtacaatgggaatggtgcaattaccaagctaaaagatgactaaatgacttacaagcacagtaatagtaacaatagcggcctttatggatagtcttttcttcgtttcacagtcctctaacttctccatccatctctctacctagagaatgatcccaagttttgaagtttattacatcgacactacaaaaaacggaaaaaaatggaagtaagaacttacagttgggtgataataggcataaatcattccgatgatccatatgtagcgatcaaggcctgatctaaagtgccattcatgcagccgatgaagatcgggcttggcagggtcattgtaacctggagttattcacaagtaatatacaaatattagaaacttcttctaattccattatgaataatctcattccacattgggaattcaatcaatttcagataagctaaccacctagcaaaaatgttaagggaccccaaaatatttcaaaagctccaggaatttcccacaacaaaaagacaacgaggaagcatgaaaatatcttcagagccatcaccgatcctatctcattgtacttgctgaagatacccagagctccatataccattagggtgaaaagagtgtgcattgggcagatgtagtataacatatagtcgttgttgagaacaatacagcaaaacgctacaaagaagttcagcctccacatcatctgcaagagaaccaagattttagatgcggattatcaagtacaatgacgagagctttctgtggaatgaattgtatcacctgcgcaaaacgtgcaacagagaaatcctttctgacatagtagtaagagaagtttccaaaaccagtcatccaaacataagcagcaataaagatacggattgcgttgtatatctcggccgcagcaaagtagtgatacattaagaacaaaacctgttaaaaagtaagtcatgagactgtatatagccagcggcagtaagagctcaatacagttaccggccagaaaaaggaaatgatcatattgggaataatcaagagaaacttgcctgcatccatcctttccattcttcagtttggtggcgattaaggtaaagaatggacttcccagatatgggtgacttgtcattgtgttttctgagagatgtcatggctgatactatgatgagaagaacgtagagaaaaaggaaaaggtcgcggttgtaattctgtcataggaaaccaagtcttatgagcttgcgttcacagaaaaagcaggtgaaagacataggtaccttggtagaatctccaagcaattctgtgcggtcacagatatagaaatatattaagattgccccaaattccgacctacacaagattatgaatgatagtataagataacaaacaaatgcatcatcacttcttggggttaattttcacttacattgctctcaaggttgctcgatgttccagcaaaaatgaatcttccatactcaaaaacctgttatgtcataaattatatacaccctagcatgagaactgctgaagaattgcaattaacaaactagaaaacttatgagctggtaacaccaacctgattatgtttgttctgatagatgaattatgaaactttacagatggtgatcgggcaagacctccctccaacagatcagctttgtcgtcgtccttctctgctacgtctcccaattcaactagattattatccgagtgactgcataacaagaatgcaacactttttcaagagtaagtcggaagagaggagcacaatagagagggtgtaaactctgctacattatagagagtatcacattacaaaaacttacggtttcaagggaacccaagattttctgtactcaagtaactccgagtatatccaaccaacaaatattgggattactccaagaagaaaagatacctacaaaatttaagtacaaagttaaatcttgtagatggagatcagtatcaagccaactctaaaatgactcatggctactagaaaactagaaagaaagacttagttttcatgtacttactacacttaaactttgatcattttgagcttttatgatccataacattgacaggaatactagttcaaaaaatggtaacataaaagtttcaggtaagggttggtaacatatccatcattgacaggaatactacttgcacaggctctgcaacttgttcaatctctgaatctctcgattccatatagatttcagtaaatcccctccaaaaatgcaaatgtgaaagattcaggcattatacttgctatgtcaaagatgctgatgagaccaaggaacctgtcctatgctttaggctaacttttgaagattaaaagtcactctcttaggtttcctcctactaaaagtggcgtctttcactaaactacagtcataattccttccagttaaagtctcaaccttttcgaataaat

SEQ ID NO: 18375 - DNA, 387 bp, Arabidopsis thaliana landsberg
accttgctctcgagtacattagtcgagtatgagccagagtcatggcgcatggagacgaagctgctgaacaaacccgacgaggttacggtgaaggagtatatcagattctttgagatgaacgacttctgggggacgagatatccctactatgagactttagcctagctggggttactggaggacgtgcaacatcagttcaagaagtgtcatctggagacactcatatcttacccttacgctgcctataaagaggagaggatctagtgtctttccacactacaagtggagatgtattagagtctcacagagtttgagctggataccatgggattagggttcttgacgttctcagtggatgaacaacgttatcagctgtcgatcaagaag

SEQ ID NO: 18376 - DNA, 963 bp, Arabidopsis thaliana landsberg
aactttgccaaaaaaattaaaaacttatcaaaatttttaacttaaaaatttcaaaactttattcattaaatatagttaagaaccttgactaatatctcatcattgaggatggtctaaatgagctaagttgattttttttataaaccacaaacatacatatttacatttttaatatataaaatttttcaaattaaaaaattaggactaaattaaatcactatactgtaattgagttactttctcatcatgcatactttaaattctctttgaaagttagtttttgaaatatttaatttcatccttccccacaatcacaaaggtttcgaatggagaaagcgagtcaagcgtatcaagcggaacaagagcggatcaagcggttttagcgaaacaagtgcggatcaagcagttctggcggttcaaataaatgtttgaatggtgagagcgaatcaaatatttcagatcatattatacaatctttaattatgattttatttaatatatttattgtgataactattaaaatatttatttatttttaattcaaatacaacagcaaaaaaaaaataatttctagtattttgattttttccataatatatttgcaatatgttccctcatatttgtcataagaccgccatcaactatctttgtagtttcgatattccctaaactagtttcaaaatttgggtcctccatcttcatatcccccattacctctgcaaaattttcatctgaaaattttaaaattatgagaaaattaggtagtcctattgtagtcattactatttttttttgcacaggagtattatatctaagaaattcataaagaatctttcattttttttcgaaactccaaatttcctcctaataagagaatgtaaagatgcatgacatcgattaaacagttcctgtttattcctaggaggagaaccattttctaaattgggggatcctctagagtcg

SEQ ID NO: 18377 - DNA, 730 bp, Arabidopsis thaliana landsberg
gttggatatgatatatttttattaaatttataaaaaaggaaattaacaattaatcaaattttaggtgaacgtgaaaccaaactaattttgtaacatggagcgatatagaaatttttataccaaattgaatagaaatatatgttgataatttttttttttatttgactactcaagtttagaaaaaaattatgtttataatttaagtcattttaaattcataacttgaaaagttagaatttaagttagaacaaattcaaacaaaaaataaacagaatgggctaatctataaatgtttatagtttacgtaataatttttaatggcaatgaaactaattaatttttatagcataaaaatcaaattttagaaagaaaaattgcaaactaaaatttgaaaaagtaaatttcaaactaagtttgtttattgtttatttgttaatattaggtgttattttaccatttttaaaaaagttagggtttaaaacttcaaacaaaaaaatgaggtttttttttacatgtatttggaaaagatgagaattttattacccttttttcctatattttctctatttcctaacactcgttacagcaataatccatgctgattgtttataaatatttataatttgtcggaaaatgacagctatggcaaatttcacgttataaaattataaatttttttttttggataattggaaaatataaaacttaatagtttaaaatcatttaaaag

SEQ ID NO: 18378 - DNA, 660 bp, Arabidopsis thaliana landsberg
cgattgggaccctcagtaaatctaacttccgagcaatgtcagcggtagcatccttccgagctaaaaaggtgccgcctcctcggatgcattggaggacgacattgcgtcagtccgagtgaccacgctacgaggaccgtttcgacccggcccggcttcaggctatcagaacgttctgactttgaaagctaaaacacttatcttttacttttctaaacacttgtacgatcaaatcatcatcttttcaatactaatatcaagaacctgtccgcggtaattgattaattctattattctttgagagtctgacaaagacctattctttgaagaaaccctaaatgtatgagtttcgactcttacaatattttatagaattttttagaaaggatcgtgaatatgacggctctctgacctcgtcgcctagttgacttggtaaaagagatgaacaatacaatactacaagtgtctttagtggaaataatagatttctaattaaagttctgaaagtttatttttaaagtcacaccttctttctatataaatcatcgattcttaactctacaacccactacaaaaaaaatgaaaatgtttaactcctatcctaaccttttagtcttggctattgctcttgcactatctttttctgttcctctgaaagcccaa

SEQ ID NO: 18379 - DNA, 527 bp, Arabidopsis thaliana landsberg
tactctcctcaattcatggacaacaacagttaccatatggtttacaaagggtttacagacattcaccatctgaagaaagatatttgggtttatccaatcaaaggtctcctcgcagtaactcatcattagaccccaaacaggaggaatgtaaatttttttttttgataactcagtgtccagaccacacagtgatctgactagtccactgggccgaagcccgcgactagggatttttgagcctccacttaagggccccctggaactggtggtctgaggcgctagagcaaatccgcatgttaattccctggtggccaggaatcaatttgtaaatttgtaataaagctttttgtttttgtttaagttagtgatttttttaatgttttggggcttaagaatgcaaaaaaaattgtctgtgtaattaacatttaagatgctaatgttattgcttcacaagtttttagtcaacctcagatacatcgatgtcactatctaaatagacctctggaacttcatcatctggattctct

SEQ ID NO: 18380 - DNA, 1456 bp, Arabidopsis thaliana landsberg
  unsure (1)..(1456): unsure at all n locations
atcttaagttaaaaacaaaacgagccgtcgaatcaaacactaatgttcaaagagtgtttcaagcttcctacatggagaagatgatgacctaacgcgattttcctcttcccggtctcatcaaccacactcagatccttacacacattgacgttaaacctaaccaccgcttcttcactctttcccagacgaatcttctcagatcctagtagttgcttaatcggagatccgtgtacttgcggcgacgtcgtgaacagaaacaccgtgtggcttcccgctctgtctccggtgttctttacattcaaatgaacctcgaaatccgatcctccctcaacggcgttctcgcagtgcggtccgatcgcgtccaaagattggcactccgatgatcggcaagggtggttctcgtcgagactgagagagacgagtcttggcgctttgattagctgatggtcgaatttagtgtaggtaagcgcgtctgcgaaggcgtatacggtttctccggtgtaaaacctgtaactccgacccggatacccctttgatttgtcgggtctcatgttcatatttgacatcggaactttttccacgtacgattgaggataccacgtcatcggcaaatttccacctaccagaaaaaaacttaccggttagagaaattgcaattttaaaaccgaaccgggagattaaaaccggttgaatctgtagaacagagtattactcggattatgacgtccgaagataacgtcagcaatggcgagaccaccggcttcaccagggtatccgacccacattatgcttgtgatctttttatcattcttggcgaatgtaatgtcaaatcctccaccggacatgataactagcaccaccggtcctcttgctgccatagcaactcgagtcacaagctcttgctgctttccaggaagatacaggtcgactcggtcatggccctccctctcaattgattggtctgcgcccaccacgagcacaacagcatccgcagaagcagccagatccacggctgagcctatatccgcatctacgcaagccacgttacatcccagttgataggtagacgacaccgtttctgccaatccctgaagcggcgttgtgtacttgcatggtacacctgaatataaatacaatctcagtttcacacattttaagcttgaaaactgaatcatggagaccgataatcacttgtgtttcttttatgtttgtttcaatttaccgtggtagtttccgatcattgtttctgtggcattggcgtttggtccgatcacggctaatgttttgattgcggaaggtnnnnnnnnnnnnnnnnnnnnnnnnnnnnnnnnnnnnncaatgccttgtcttgcggcatctcttgcgagttcttggttatcagcggtgcatacatccttaggaccaagaccaccgtagagctgcttcttagggtctccatcgaagaaccctaacgcat

SEQ ID NO: 18381 - DNA, 1187 bp, Arabidopsis thaliana landsberg
ctagtaaataaaaagtcccagtccggcagatgttttatttaccggtatctgataggttgaaaagattatatcaatctgaaaatacagcaaaagatatcaaatggcatgcaaaacgtacgatgattgatggagaaatatgtcatccttctgatggagaagcatggaaacattttaatgaggtatactctgattttgcatcttagcctagaaatgtttaccttgggttatgtacggacgggtttagtccatttggaatgtctggacataactattcactatggccggtaatcttgactccgtataatctaccaccagatatgtgcatgaaaaaagaattgatgtttttaacaattctagttcctggtccaaatcatccgaagagaagtcttgatgtttttcttcagccattgatagaagagttgaaagatttgtggtttaatggtgttaacgcttacgatatatctaccaagcaaaactttctcttacgagcagtacttatgtggacaataaatgactttcttgcgtacgctatgctttctgggtggacaacgcatggtaggttagcatgtccttattgtatggatcagacgaaggcatttcagttaaagaatggtagaaaaacaagttggtttgacatcagtgttctttaccaacagatcactactatcgacggaacacaaaaaaatttaaaagaggaagagttgtgaacgacaatccacctgatttgcgtacaggtgaaaagctcttgaaagaagttgaatgttgtccgaaaacagttgtgtgtggaggaaaccatgggcgattacgaggatacggcaaaactcacaactggcataagcaaagcatcttatgggagctaccttattggaaaaatcttatgcttcgacacaatcttgatgtgatgcacatatactttacttaatgtgtaggggaagacaaaagataacatcagatcacgtcttgatttaaaagtgtattgtactcgaaaatatctacacttaacagctgagggcaaagctccaatccctaaattcagattacaagccgatgcaaaatcaacttttttgcaatgactcgacaatgatgtcaaattctctgatggatattcatcaagtctatctaactgtgttgaaatatctggaggaaagttaagaggaatgaaaagtcatagttgtgatatttaatgc

SEQ ID NO: 18382 - DNA, 1761 bp, Arabidopsis thaliana landsberg
agtatacaaaggacttgggttttactacttactcttcatggtatcaacaaatgagacacaacttggagtttggaaatctttacttgaagactagaggtgcatagagaaacccaaacaatatcctctgttccaattcctctgctgtcagaggaatcaactttggaatacctcctgaagttcccgtgctgcacaaacaagcacttccttaggtctttacacttcaatttaatctgcattcacaaacttccttttgtaaaaaataggaattaagagtatttttttgaaggtacgtggccaagagaagactgatgggtcgatcacaaatgagatcagacggctctccattagcgatacgatcgatatggggcttaatatcttcgtaggtcacaatgggtacgttcttcttgaagctctgcttatcaaattgaccggtgaggaaacctctaaggtacttggtctgagcattacgtgaaattattgcttccaacaaggaatcttgaattttctttacgttggtcgtcacatcctcaagaacagacatggtagctaatgggtttgttggatcgaactttggcaacatgattgcttgtgctgccttttgactgtcgtcaacaataaccaaaaagaaaatcctgattttaagtccttccaatgaaattgcttacaagaaagtgaaagaacaaaccttacaagagattgcttagttcttgcgaagtagatgagctctggccactttccctggcgaagtagaaagcagacaaaatgtgtggtttggcgaaatgttcggtggcgtaaaattgtggatgagttgccagatttggtatttttttcaggaagagggtcaattagcatagagagtccaaccttttggtgagcactacgaggagataaaaacattttaaatggagaaatcagtgacacgttgaagatttgaaagtaagattaagtagttttgtcttttcccccaatctttagaaacaatgaatgcagacaaaaaccatgtggttactactacggtcatcaatcttgtggtacaagtgttttagattgtggatggtatatatcacattttcggaaagattatggtatcccaatttcaggaaagatgctatggatatcattggacacttatagaaacatttttctgtaaaaatgtaatttaaaaaaaaatcaaattgaatcacaacataaatataatgtattataggtgaaaatataatttcaaactcaatttgatccgcacatacatacgagatttcttattttagaaagtacgttttaattaaattaaatttaatataaattatttttgtagttttgatcatatatatttagactcagaatcacatgtacagagtaatatttgtaaaataaaaaattggtataagattcataatttgaactcatattagtttggtatccatttgtagacaaaatgagtaaatggatttgtttttttatcagacaactacgtaaaaaaagacaatgagaaaaactagtctttaaaatagttgaatgtttataaaaacaaaattttgactagtttggtattttgttgtaagataaaatgagtgaatggatttgtttttgtaatcagacattttgtagtctttaaaatagttgaatgtctaaagtaacaaatttttgactagtaatttaaaatttggcctgatctacgggaaatgaccgtgaaacggattggagatacatatttgactttaggcattaaaagaaaaagacaatttccaggaaatcaaacac

SEQ ID NO: 18383 - DNA, 2280 bp, Arabidopsis thaliana landsberg
tatgccatgttccgaatcgagctcggtccatatgtaggtttaataggtttcaaattggatttattagtgttgaatgtaaataaaatagatcgaattccacaaagacattcacattattctaatcatgttcgaagcttcataaactatcaatctactgacaagtgacaacaatgaaacatcataataccaaaaggttgagagaagagcaaagatcatatgcaagttgtgatttataaagaatatttattaaagatcccttactgattctcattaaataatacttaactctaatggttcacaagatttcacaaccattgtgtaatctggaaaattgactagattggaccaaaagatctaacaagagagaacacaagaacagttgtttttaacttcaaacttcttacaatgtagtacctcctccatccgacataagagatgcagccgccgcagcagcggttggcacaacccccgtggagatagatggtttcgacaagtgaacaagcctgaaaacacaaggaatcatatcactgatgaagcttatatcaaagacactatcacaggtgctgtaaaatatatcagatgaacttacggagcaagaaattcacagaaagatgaaacagcagcagcgacttcactgtaattctcagaagttgcaggagcagttacatcaacaatctgcataccaggtgttacaggaacagcctcatctatagcatgaactttaggcatcttattaacagaagatacagaaacacttatgtgcgcagtccgttggaaatgaaaggcgaatccgactttgagaagctcatggtctagtttgtaaccgagtgcatagaacatacgcaaagcattcttgcttactttactttcaatcatatttctaaccaaaacagagatttgatcagctcctgcacctctcatcgcaccaccaacatgtttaaccgtcctatggttcttaaattagcttcctttgaatgaaacaagaacatatacaacaacaacaacaacaagaagaagctgtaccatgtgggttcgggttgatcaagatcacataatagcctaacttctgatgacacaactcctgaaaaagtgaagatttcacaaatgtgaatcatgtatgattcataggaagcttcaggtttctgaatttaacaaaaggaattggctttaccaagatttgggccgcttcttaagcataactcatgaactcttaaacgttcgcgttgaacaccacaaagaccttgaagaagaatctcaagagcttcaacatgctgcaaaatccagtagaaaatctaatcaaattctaataaaaattcaagcctagggtttatcaattggacatcataagaaagctaaaagctgatccatgaactccaaaaacttgggatttgttcgtcaatcaaaaaatacaaacgaacctgtgtctcgatgattccttgaaccacacactccattgacattgagctatcacaaaatctctcaattaaaatcgtaaatatattctcaacaagaccaaatccgaaattggaaaaactaacgaaagcttcctaaatcgtcctcgggagcgaatctgagattttttaacaccggagaattttagctagttactagaatcacctgtgtagttgttatatagtagttagctgtagataaagcaagatggcctattagctcagttggttagagcgtcgtgctaataacgcgaaggtcacaggttcgatccctgtataggccatttctttttttctttttttggtccttcgtagcctttttttggaacaaacaaggttgactgttccttttgatgaaccgaatcgaaccgctaaccaaactcattttaaaaagtcaccgatttttacgattttagagttgcatttgtgcataaccaaaggcacatagactaggtgccagtatatgaaatttgttccagttgactaatttataaaaaataatcacatctttagctggatccacaaaattaggtcagggttcatgaactttttagcattgttttagattatcttgaccattagttgtagtgagagttgacattttaagaagtcaactagtttccaaaattaaataacataacaaatggtacttaatatatatgctttaatgcttatagttaattaaactttcagtaccagaatttgatttgaggaaagttgactgaacaacagcaagaagcgtaaatgtactaaacacatagtaattgattcatgaagaatcaatatgtaagtatgtaacgtgaaactttataaaggagaaatcctggga

SEQ ID NO: 18384 - DNA, 508 bp, Arabidopsis thaliana landsberg
tgcaggtcgactctagaggaccccctgatacctatgaattcaagcgcacaaaatagaaacgtagccaacataaataaactcaccacaggcagctgactgggggaggtcgctagcctaatcctcgaactcgtcgaagtcctggaactcctggagatctgtcacgaaaccttcttctctacctgagcatagattgcaccaaaggcaacctggtgttctgtgcaagcaagggtgagtacacatcaacgtactcagcaaatgtcctgataggagaaactggactagctttatttggggttaaggtcaagcagttgcttatagtcggtcaggtactcagtattagtggaagccaagttttatcatataaccaacccgtgaatcatttcctcatcgaggaacatcattatcaacatcgaaccattctaataaatagaaccattatatatcgaaccatccatatctctaatcacagaggacccagggccactcataaccgtgagcacgactaata

SEQ ID NO: 18385 - DNA, 620 bp, Arabidopsis thaliana landsberg
tggtccaagcacccgatcaccttcactcgggcggatcagtggctcaacttcgaccacacgggcaagtacccgctcctcgtcgatccggtgatccgagaaagcagggtaaaaaaggtactagtggacgggggaagcagcatcaacgtcaccttcccccggacgctccaaggcttgggagttcccctcaaagagctccatgagtcggacactcctttctttggcatcgtgccgactgagggagaatatccactgggacacatctacatgccggtcaccttcggaactccggaaaactatagaaccgagttcctgaggttcgaggtggcaaacttcgactatgggtacaacgccattttcggtaggccaggattggcaaagttcatggccattccacattgtacgtacatgatattgaagatgccaggaccacaagaaatcataactgtgcgcgctgactttcaaggcgccgcataatgtttccgagtggccattcaggtggcctcaccaccaaaccgttggtgacttcttgtgtgcaggcgatctcaaagcctgaggaagactcgtggtaccgcgaatgaactcaagtcgtgactctatgcggctgccgaagaaacaagaga

SEQ ID NO: 18386 - DNA, 734 bp, Arabidopsis thaliana landsberg
  unsure (1)..(734): unsure at all n locations
catcaaagagaatccagagagccaaaaagtaagaaatattgatgatttgactgtggtatgtactaatagcgcgatatcaaacctaacaaaagtgaaaggaactgtagagaacattttgaatgaaagaaagtataagaataagttgagtcatacgttcttacgggagtgcctcaagctttattctgagggctatgagttgttaaactcagctttgaaatacctcaaaacactggattacgagaaatttataggaaatatggatatggcaaaaggtaaaccaagagcttgcgaaatgaaattcaatgatgacaatcaccagatatctccagtgaagaaagagaacgatgttctcttcgacatgatcaacattccgtattatttttgtttcaatgctcatattaacggctaggttgtagaagagcaattggttaacgtttaatgaatatattgatgcatagaactagtagtccaatatttttgaatgtgtctatttcatgtgtgtgtttttgttaacgtagaaatggtctatttcctccatcccccaatttttcccaatcttaatttttttttttttaaaaaaaaaatttttttttttttncanttnnnaaaaaaaaaaaaaaaaaaaaaaaaccccccccccccctttttttttttttaaaaaaaaaaaaaaaaaaaaaccccccccccccccccnccccccacccttactcnnnnnnnnnnnnnnnnnnnnnnnn

SEQ ID NO: 18387 - DNA, 603 bp, Arabidopsis thaliana landsberg
  unsure (1)..(603): unsure at all n locations
ctcaagaggcgatacagaggtagacctcttttgccgaggcgtgagatgaagcggcttagagcgantgacatcccatgaccctctgtacgcctttcaagtccttgatgggccccatgctggtgatggctgcgatcttctccgggttggcttcgatgccccgctcggagacgatgaaccccaagagcatgcctcggggcaccccgaagacacttctcgggattgagcttgacgcctttcgccttgagacatcggaatgtcacttcaaggtcagaaaggaggtcggaagctttccttgtcttgactacgatgtcatcgacgtaggcctcgaccgtgcggccaatgtgtttgccgaacacatggttcatgcaccgctggtacgtcgcgcccgcattcctcaagccgaacgcgatggtgacatagcagtacatgccgaagggtgtgatgaaagaagtcacgagctggtcggactctttcatcctgatttggtgatacctgagtaggcatcgaggaaagacagggttttgcaccagcagtggaaccacgatttgatcgatgcgaggagatggtagggaacttcggacatggtttgtttagacgagtgta

SEQ ID NO: 18388 - DNA, 1108 bp, Arabidopsis thaliana landsberg
gcttccggcagtggcggatccacgttggaggcaggtggggcaagtaccccatactaactcttctaaatattatttaagctactactaaacattgtaattcagttagctcaaatggttttccagcaacaagcgccccatactaacccgagttctagtccacaaattatcatttttgtaaaaaaaatttataatcacaatacaatttaggtaactaaattatacttagtactatttatatatatggtgccccaaattaatttacattctacctttatctgcaacttcatttctccaaatgaaactccaggaatcgaaccttctacatattcaacgccaccaagtcaagttaaaagtcaacagtttccaaagaaaccatttggattatgttcaaaattccctttcatagttgagcaaagagattgtttcagaacaatctcacaaggcggagagtttggtacctcttctaaaagccttcatagccggagatgtcaagtcttgctagtttcgaggtttttaaacattttcaagattcagtctcacatcggtgtatgaccgatacaagacgcgaaattttgagagtagatttgatcgtactcgtcctgattttaacccacacccatctcaacgaacaatagcttcatcgtattgttgggaacaccgctggaaattgtctccgccgacgtcttcattacgcttctcgcagtgactttgatcggacgtgagatatgagaaaactggtggagacagagttgcttactacaggaagagagggaaagtggtcgcgaagaagaggttctcaacggagattgacggatacgatgctcagagcagataacaatcgaaccagaagtcaaggaaagagacattgaactagttgcctgattaaattgctctatgctaaatgtttgggacaaatttgaaagaaatgaaaaatagaggtgttgttttcaaaagtcaaatttgagacgaaacaacatcggtttggaaaaagatatagtattttttatttgaaattgcggtttacaaaaacaaaccgaaaccacactaaacaacacggtattgataaatcatgtattagcacatgtgattccgaatgtacgtttgaatt

SEQ ID NO: 18389 - DNA, 2105 bp, Arabidopsis thaliana landsberg
  unsure (1)..(2105): unsure at all n locations
ttccgtcttgttacctaaccttcgtgacgaggtgaaatcgctgattcctcatttgggttatcctgaaatctttagggttttgcttnnnnnnnnnnnnnnnnnntctcgagctattacgttctttaaatgggttaaatttgatttggggaagaggcctaatgttggtaactactgtttgttgcttcacattcttgtgtcttctaagaagtttcctttagctatgcagtttctctgtgaattgattgaattgacatctaagaaagaagaagtggatgtgttcagagttttggtttctgctactgatgaatgtaattgggatcctgttgtttttgatatgcttgtgaaaggttatctgaaattgggtttggtagaagaagggtttagggtttttagagaggtgcttgattccggttttagtgttagtgttgctacttgtaatcatctactgaatgggttgttgaagttggatttgatggaggattgttggcaagtgtatagtgtgatgtgtagagttggcatccattccaatacgtatacgtgcaacattcttactaatgtgttctgcaacgattcgaaatttcgtgaagttgatgactttttggagaagatgtaagaagatggttttgagcctgatttggttacttataatacgttagtgagtagttattgtagaagaggaaggttgaaagaagcgttttatctgtataagatcatgtataggcgtcgtgttgtgcctgatttagttacttatacatcgcttatcaaaggtctttgtaaagacgggagagttagagaagctcatcagacttttcacaggatggtagacagaggaattaagcctgattgcatgtcttacaatactcttatttatgcttattgcaaagaaggaatgatgcaacaatcgaagaagctgttacatgaaatgcttgggaatagcgttgttcccgacaggtttacttgtaaggttatagttgaaggatttgtgagagaaggacggttactttctgctgttaattttgttgtcgagcttagaaggttaaaggttgatatcccatttgaagtttgcgactttctgatagtaagtttatgccaggaaggtaaaccatttgcagcaaagcatctattagatcgaattatcgaagaggaaggtcacgaggctaaaccagagacttacaataacttaattgagtctttgtcccgttgtgatgctatagaggaggcattggttctaaaaggcaaactcaaaaaccagaatcaagtacttgatgccaagacataccgagctcttataggctgcttgtgtaggattggtaggaaccgtgaagccgagtctttgatggcagaaatgtttgattctgaagtgaaaccggattcatttatatgcggggctttggtttatggatactgcaaggaattggatttcgataaagctgagagactattgagtttgtttgctatggagtttagaatctttgacccagagagttacaattcgcttgttaaggctgtttgtgaaacgggatgtggatataagaaagcgttagagcttcaagaaagaatgcaaagactcgggtttgttccaaacaggttaacttgtaagtacttgatccaagtgttggaacagccttctttgcccaatcatctgcctgagaattgaagcaacgcttgatgcgatgaaatttgtattccttaatcttggccagatgcgtaacttaaagaaaatacaaacttagaggatgagtactgcggatcgttttaagtggtggtgaagtctgtaggatctcgcacaaagggtccagtacttgcttagcatcctggaggaaaatgttgtccttataattcagtgccaagagcatttgcctcagcttttgctgctttgtttgctgttgaaagcttacctcgactccaaaacacaagtcttctctgttgatcaaacaagagccaagcaatgccgatcggtgtgttcttattgatacaggatgcatccagataacaggtttattgagtagttggaactaaaggatgcacctgaaacggttgcagactgccacaattttgtattctgtagtaattgtaagagtttgagaatgattgtctattggacc

SEQ ID NO: 18390 - DNA, 575 bp, Arabidopsis thaliana landsberg
aggttcatcgattaatcagtataaggtcccgaggtgcgtacgcctcacaccgatcatgaaactgcttgactctagagttgtgtctgctcatttcagcccttcgttgccgcattggtcgccagaacgacgtcattaggtaaaactttatgatagatatcaaaccgatgctagctgtgcggttttagaatatgaagctctgtttctgattctaagtctccctattagatttcttattatgatgttgtgtacttgtgtttagggttttgtgaatcgcacaataaaacctctgcttgtagaagctagcattgcctgctcagtcttctatatactatacaggatcttcttgtttttatattttgcttgttacgcaatctctgcttatattatgtagatggtcttgtttaaaaaactagtttaataattcataatataatttagttgtgaggtttaaaaatggatctgccaatacttgatgccttgagggatttgcgtttcacatcaacatcccatatccagccgatttaccttataatttgaattgcctggatctgtaccaaactatatatcatgactaa

SEQ ID NO: 18391 - DNA, 1058 bp, Arabidopsis thaliana landsberg
tttatggttttcaagtgtatttcataataagtcatggattgaaagggaaatggagccttcggcgaagacaaggcttccactccactccatcaaattattcattcgtcgccgacactccgtatcgctctccaatttggtataatcttcactcctatattatttaccaaagggggagaaagtttgaacaagggcttatatttcactcacaagtatccgtttttggcaattcatgccaaagggggagaaagtattagcccaaagcaaaagaaccgcaccaccaccaatttcaaaaatgtagtctttcaaatttgtgttaagagaagatttttccattggtatcttattattgataaaattttcaaattggtacaacccctttcaaaattaatatctaaaacactcttgaacactaagaggaggatttcattaaggggggtttgcttagtcaaaggaaaagcatttgaaacagggggagaaaatttcaaatattgaaaatgctttgcaaaatcttattcatttacctttgactatttgcaaaagaacttcgaaaaggatttacaaaatagtttgcaaaaacaaaacatgtggtgcaagcgtggtccaaaatgttaaaaacaaaagatcgatccatgcatatcttgtcagtatttatattggctcaattccaagcaaccttttcacttacattatgcaaactagttcaattatgcacttctatatttgctttggtttgtgtaggcatcaatcaccaaaaagggggagattgaaagggaattaggcttacacctagttcctaaataattttggtggttgaattgcccaacacaaatattggactgactagtttgctctagtgtataagttatacaggtgcaaaaggttcacatctagccaataaaaagaccaagtgttggattcaacaaaggagcaataaggcaaccgagggcacctctggctggaggcaccggactgtccggtgtgcaccggacagtgtccggtgcgcccgtagacttcgttttctctctctcgccagaggacttcgacttcaatccatagta

SEQ ID NO: 18392 - DNA, 554 bp, Arabidopsis thaliana landsberg
gattatctttgtgctttcaccatctcctttgcgttgacctatctttctcccgccccacctttgctacgactctaacaacaatcacatctggtccacgactctcgcattgtccctttgtctttgacacatcttcattgtcttcttctaaagatatatacatgttcaatcctcttttttctagccttatctttttgaattttgaaaatgaactgttgtcaacagaaacaagcggcatcttttgctatatgtagacattatttcctctttcgaaccaaaaactcagctctaattttgtccttttcccttctactccaagcgttgtggcaattttccgatcaacatcagaaatcgtatcttcttcgcttacatctacacactttgcatatttctttgccgacattttgaatcgccactctccacttttttgctttcccagccaccgaccaatatcattactccttcgtccatcggtacctgccatcctctattaaatacaccattttagaatgtgggttgattgcatttatcacaaaccaacatatttaaccgttttt

SEQ ID NO: 18393 - DNA, 589 bp, Arabidopsis thaliana landsberg
  unsure (1)..(589): unsure at all n locations
atctgcaaaaattccatctccttttattaaacttcttgtctttttcttctttcaaaatttctaaatttaattatggacaaaattaaaaaaaaatgaggagaagacgtcaacgttaataagtaaataacatgatttttgttttcttttttctgttttgtaattttagctttaactttttaagtagtttaagtatgatatgacatgacatgtttttattgggtaatgcaaagggaggtgaataaaagattttacccctaggggtgaacgcaagtttcgttcatggagatagttatattatatatataggccgagacttggggtgaacttctttattcacctcctttttccctctacaatctaaataaaacaatatgtcatgttatactatgtattcaaaaatcagaagtattgaaggagttgtcccaaagagatgaacaaattaaaaaaaaaacaaaaaaagaagaaaaaatgagaaaaacacatttaaactttacaaacgtaaaagtcaaaatatcatctacagctacanaataaggagtacatataggaggaggcatgcaaccttaaagagagagagagcagtttacat

SEQ ID NO: 18394 - DNA, 713 bp, Arabidopsis thaliana landsberg
taaaccgacaattagaccgaatgcgaaaaagctatacaagttgtttatgagcaaagagaatactacttgggaggagtttgcttcaagagtgagaacatttcagaaaggattcatgggaaaaccaaaggaggtaagagccggaaaaggtgagtttcatgagaatccagcggcttgtatatgcgaagatactgatgctaaagtaaaagcgggaaagatggattcgagaaaattcgggaagaaagagcagaaagaagatgaagatgcagagttgtcgtcgtcagagacagattatgaggaagaccaaactgatttacaggacagaggcttgtataatggtacgaggttagattatgatgatgcgttatcggtttcagaagagcctgagctagaagaaatgctatcagattgattcagttcaaagtcagctttttttttattgtggtcatatacctcatcaatgttatctgtacatagaaatccaatccgaaggaattttcagttcattttcttacttagtcgttgagtctgtttaggtcaaagcaactgaatattgataccgatagaatcttggtgaatgatagatagatacatcaggatccacaaagattgtgtcaaaagtacattgtttcaaatacaatagtgccaacttttaccaaaaagaatggttcgtgtcttggggtcagaagcaaaaagaagatggcttgggttttttt

SEQ ID NO: 18395 - DNA, 745 bp, Arabidopsis thaliana landsberg
caattcatattgtacttacttggacaagaacatatgaagtctaattagcatggatccaaatacctttgtcccatgttgtaactgagcagagtaaggagaaacaattgattgtggcccccaaaattctagaaattttttcattacaaaatagtctcccaatttttatttttcttataaataagcccctaattttaaaaattacaacaaaacctttagaaaatttttaggctcctaaaatttcagggccgaccccataagtacactatccaaggagcggactacttaagatatcagaattaaactcactagttcaatgtcttactgccaaaaaaacatcggagtcatagaagacagattccatatatcagaaaatgaacatcgtataatacttttcttttgacatcatgcgtattaatttcaaatgttcaatttctagtatttttttttgtttttcattttttattcaaacatcatgtgtaattaatccaagttttaaggttttcacacatactaagaaaacaagttaaattttgattaataatgtttccataactttaaaccaatagtattcaatttcttttattttatttttgaagtttatactgataaagaaatgcatagaaaacttttaaaaaactttagaaataagtttgagagggagtattaaacttgagaacatacattatgtttctccctttaaacaataggtgataacaaaataaagagtattacaataagaaaaaat

SEQ ID NO: 18396 - DNA, 1452 bp, Arabidopsis thaliana landsberg
ctatcgttggtggttccagcactggagagcaaagaattttgtttttttttttccatgtacctcttcatgttttgtttttctttttcacatttttgaatgacttatttttcttgagccacttatgacgttctcaccttttcaagccttttgcactgtcatctattttggttttttgaactatgtcgtttttagtcactttctctagctgatgatattgtacgctagtgtctcttcccatatgctttgagaagtatgagagaagtctgtcaaaattttcttatcttctactctttgaaggcgtgaggagtcactaccaatttttaaaagacgactttttggtggattgctagactttgctgccagagaactgcaagctcaggtaacgtattccttgcgtttttttttcttgtcttttatatattattatatagattcttcttcttattattgaaattaagagtcttaatgccttccatagttccatagatcgccaattccttcctttccttgaaagaccttttccagtgagctattaaatggctatttaagttcttgataaaggaaattgtagagtgtctgttttcttacgaatgcacaatatagataaatttccagggagtttgcttgcaagaaaacaatgctgtaaagctttgttggtgatatcagattatccattccagcatgtggtgtgtgttcgcctgtcttgttatactgggatagaactagatttttatctacacaatcgttttttccctcaacagactcaagttattgctgcagcagctgctggtgttgctgcagagggtctagcaccaaaggatgcaaaagcaggagcagaaaatgctgctcagctttctgtttttctggtggaaaatgcaatcgtgattttgatgcttgtcgaagatcatttgcggtcacaaagcaaacagacttgtgcaaccaatgcagttgcttctccatcccctcttaaaaaacgtacaagcacactgacagcgatcggagaatcatcagagatttctagcagccgtgcttcactgtcaagtgattcagggaaagtccctttagatgtaagtggaaaacattctcaaatgcctaatttctctgaattagactttccaatattttgcttctcaggttctcttgtcatgatcaagtgcttttaaagaaatcacgcttagaaataatcatatttttgtatgctgttgatctgttcatgtttctcttatgtcctgattaattcgtatccttgttggttaatacctcttttttattttcattgtatcttttacgagcatgccatttttaatatcagatttgaatttgttatttgggattcttgtaaacaccatgttctttatgctaagaaaattcaagtaattttttctttcttttttcagatactcgcatcaatggctgattcaagtggacagatttctgcagtcgcaatggagc

SEQ ID NO: 18397 - DNA, 542 bp, Arabidopsis thaliana landsberg
ttcggattgagtgttaaactttgcttcatcttctttcactttatccaccaatgaaagtagaattttgtccttctctaaggctttgtttctcagtttaatgacttctgatcgaaggttgctaagagctatcgtgcagctctcatcctctgcattcttttgcgccctcaaggcgttgctaagaattaagccctgcaaaaaaggacaaaggattagcatgagaataaaatacttaatttccaagtccatagactttaagttcacaacttttctaccttcagactgttgtatgcaaggctgtccgcgaggtcattctttgacatggcggagaggccaacttcgagcttcggaaatcccatacttttggccatcttccggcagacgaatatctctttgttgttcgggagacagtatagaaaatcatcttcgtccgtgtcgttgaacgctaaggccccttcgggtatctcagtccccaggcatagagtttggcttctaaaatttcttctttggataatctttttcccgaagcatgtcaaataatatag

SEQ ID NO: 18398 - DNA, 1678 bp, Arabidopsis thaliana landsberg
acatgaattctttagtcacggacagtggatcttgatcacgggcagtgtttctcgatcagacaaaatcacgacattgagttctcactcttgacgatgttactacatggttttctcgatcacgtacgacagcctctctgctcttttctcccatcaaatagcctgaggtggtcaagaatttataggcgggacagcttgggctacaaccgaccgcatgccatccggtggtgacacctcgcatgacacttgtcacccgcccttgaagatacatatgcagcagggatgggacgacgacacgtggacggagtggctttggctccaagggtcctaaatttggctccactccacaagaattcggctccaagctacatttttgggctccaagttagccggcccacgagtccttggcgcggtcaaagggcgttcaacgcccggcggagcaaactttgtcccacgacacgcccgtgttgcccattcttgcccattaaagatttatcgcatttgggcacatatgggcaatcgaccctgtattcggggtaactttctcctgttttggcttcgcccggatgaccccatcttgaactagaatctgccatttcacgattctcctttcccatgatacgaccagatgaatcagactcggcatttcatctgacattgcacggccatgttcatttttgtcttgcccatctctttgggtttcgccccttaactagttcctttctcttccgggtcttcttcggacgttcctcgatgttctgcatgttcgcttaccccttggcgagggtcactacaaccaccatatatctacaactctccaccaccagagtactacgatccttcctccaaagttgcaatactactttccaacaccaccatatgtctacagcttcccatcaccaccatatgtctagagctccctacctccaccttagaaatctccttctccaaaggttaaataaaagtctccatatgttctaggtcttcagttagtctcgtcaatactgttgtaaattattcttgattatgtgtaatcaatctctcttaaaaagagaattgattttgttcttaagagatgtcacaaattgcggagaagtaatatgaacctcatctttgccaaagtagatctcaacaatcaacaggtagcgctccgacaaagctctgaacaaatcgatgttgaataaaaagataatttggttttatgtaatgattttgttcagaatttggattaatctgggtaatgggattttggtgaggtacaagttttgaactatgatttgaagattttgtaagtttattaaaagattttgaactataattctcaagttttgaagttttgaatatttacaaaaatgcccaagaacttttccctaattgcaacgaagtttatgtttgtgtttctagatataaatagttttttggatcattgtttagactcatctttcattctactttagcttgggcttaaacattttgggagataatttgggagagcttttagagacagatttctaagttctttatttcttctattgatttcttaacgcaatctattttattcatgatgtttgtttcattcactatgtcttagtagattccttgttagctttagggttttcaaaggtaaaagatgaattgctaggttgatggttatttatgaataaatcaattgagttattta

SEQ ID NO: 18399 - DNA, 2402 bp, Arabidopsis thaliana landsberg
atcatcttttctggcattggaaagcctcagctcaccggcgtcggaacttgtctcttctattgccttttttcgcattatctattccgctttaaccttgcttctgctcttttctcaatcttttcaaaactttcatcaattttctcgaacctcttttcaatccacaagtttcaacgagtgctcaattgatagtggcagaaaacataggagttttgtggtgagcctcttccagattcaggctctacccattcctgtggcgaagccttaactcccagatccacctcaaagcttgagatccgaattaattcgaaggctgaatttgtctaccatcaatccatttccgccataacaacttcgtgtaacatgtctactccgcctctttcaatctcgacgacaagtgtctctactccaatcctatggtcatctcagcgtaaccgccgcatcatcaccattggtggtagcgtggagtcctagaccagccaaaacagggtcaaaagctacaacatagattaaaattgacagaattatctcgtaaccggatatgggcaaatacgatatataaccatagtcacaccgtcgatcaagagccagcaagtttaggcattcacaaagcatagccagagatgaatattgcgaccagattgtagggtgacaatagaatggtttgatagctatcatggctgaagtcagatggaaagtttattacaaaccctaactgagccttctattccaagtcagtaccaattgcccaagagtggagaagaatggcattatgaccccgtctccatggagcggtggttaccatagattcttcaactctctatcttcttatccggtaattatcgagctcattcaagtaatcatcaaatatttgaataatttgcaaacttgtgaaagcttggaaacgagcgacattatgacactgtccttaggaggtcattaccgcgtcttctccaaccttctatatccgacagtctttcatgtggaacatctttctaaaaattcgtatgcgttatccgcgctagccgtcaatgaccacacgtttgtcaaggattttgtgaagctcgtttttatggttgaatccgcaaagacctctaacagatttttcagactttgtaaaaaaaattgaaagtgaacatgtctttagaaaaatcacatttttatttcttttatatcattttagtttcagtttgtatagttttcctcatttaaagtttaaataataaaattctgtttgacaaaaaaatataaacaccataaatagcaaaaaaacgcacaagttttcttttatgacttgaagattggttttaggtgttggtgtacgatatattatatacattagtttaattagaaggtaaatctaaataagttatagtgatatggaacattttttttaatcaccgacacaattagctgaaatagcgtcatgtcaaagtcaatattttccaaccaccatacttcatgcatgtgagaatgggtacagtgttctaccaaatttgagtatggattaagacttcattcggaaatatgataaaacgtgcaaaaacatttgacaaaacgtacatgctaatagttaatcaatttataaaaaataatatatgtgtgtatccatatatattttgtaactaattagtaacagatttataactttaataaaattttccgtttattaactatcttacaaagttcttaatgcaagcgccaatatattttcatgaatttgttttgtcaactatacttcatagactatatcacacttttccaatcgaaagaggtacagatttggtaactaaataattcttaaacccataacactgattcaactctttccaaacaagtaatttacgcaaagaaacgagatgttgaaatcacatgttcttagataaatgggtccattaattgaccatttgatatctttaagatatgttatatactaaaaatgtttatattgtctatgatatggcctaactatattagagaaagataaatttcgtcgaaggacggttcaaacgcaaaataattcaaaaacaatttatatttattactttctcaatatacacatgtttgataataagggtaaatggcctatttcaactctgactatttgtacggtacttcttcctacctatacaattagatggtgtttatttcaactttaacctttaacaaattcaaattaccaacctaaactcttattataagtgtcaaaatgccatttgactaactttgacgttaatcaactgttaaaacccgctgacgaggtatgacggaggcctccttggcatgacacgctatcttttactaaaacgacgccggttttattagttgaaaaatcacataattactattcacaccagtacaagctctgagaccagtgagcttccagacttttcaattattctcac

SEQ ID NO: 18400 - DNA, 469 bp, Arabidopsis thaliana landsberg
gatggattccgccccggaactgcttccctattgcttgagagaatggatggttcaagattatatatccggtgtgtagcaatccaacggctgaaaaattacacaacctaatgtaagtcaaaacaaagaacatagacaaagtgctttgtaaagatgattcttgcaacatctacttagcacagagttatttagaaagtatattttttttctaaacacatgtgtacttacctcattaacaagttttgaatgatatacgatttcttctgaggatccagggaagagtctcgagatattcttcgaattgtagcttacacatcctcttgactcattgataacagacactcatatctactgtcttggccagattggctagtattatgcgacatctgaaaagcttgcgcgttgctgtcagtttgttctttgtacttcgtatcatcagctgctgtacacacctttttactttctgagatct

SEQ ID NO: 18401 - DNA, 2374 bp, Arabidopsis thaliana landsberg
aacagaaagcatctcaaacggtggaaccccaatactttggttaacgaaaggatggctcagcagctcctctgcggtggctctactctcccagtcatgcactttgcatttcctcacaaagtcccaagccatcgatgatagcgtctgtgacaagtaatcatttcttcctcctccattaacccccaacatctcgattaccataacacctaaagaccaaatatcaaccgcagacgaaataattcgacatggcccgaccgcctctggagccaaatatgcaggacatccctcgaagagagatccatccaatggattaggtccattaggctcttttgctaagccgaaatcagcgagtttgagttcacaaagctctccatgagtgtaggtcgggaagataagcatgttctctggcccgagctcacagtgaacgtaaccatctttgtgaagatccttgagtcattcaagaatcaagagagtgcagtacccgactcacgttctccggtaatctcccaccggctttgattatcatgtctccgagtgaaccatgtggtgcgatttccatgtaaattgagcagatcttgacattgaacggcatggtttcgtaatagacgatagggcttgtgggtcttacgatgttgaaattgatcgagttgaagtgatgtaagatcctctgttctttctcgagattctctgagtatttgcggagagatgttttcttagccatgagtaaaccatcggtggtttgaacgagagagatgtagccatgctcgccttggccgagacagccaagttttcgtaaggtgatcgggtctaacatccacgaactcgatctcgacgacatggaagtacaaaatttagggttgatgttttgttttgtcttttggttgagattgtgaagattacttctttaggtatctgtatatatactagataaggcccgcctattgaggcgggtgtacccgaaattttcaaatactcgaacaggtctaaacttcaaaacccaaaaaactcaaacctgaacccgaataggtatccaaacatatttcaaatataaatatatattatttatatttatacttatatatataaaatattaggattttttggatatttagttatttttgtgtatttttagatatattcaagcaaaattactcgtgttgttttgggaatttttgaaattttcaagtaatttaatagatttacatacaaaattttgatatttcaatatataaataaacccgaacccgaaccaaacccgaaccgaaatcttaaattacccgaatgggtcttaaatttctaaatccgaaaaacccgaacccaaaatacccaacccgaatttgacccgaatatccgaacgccgaaggctaatttttctatgttaatgaaatcaattatatgacatgtttataaagagaaataaattacggtgagaattaagcccatttacgttacggaaataaaacacccatttaaaaaagcccaacacgtgaagcccatttccgagtgcgtcccacatttactccaacggtcgaatcgactcaaacattcaaaatacaaaaacgctacctttatcgtcttcctctgtctctctctcacaacacataacgttcaaatcctctctctctctatctcgtctcttatctctagatctaaaaatctcttctttcctcaatctctgttatgaaaacgatgaagtcaccagcgaagatcggagagagtcggttcttaggaaacatttcgacttcttctattcgaaatctgcttcccagatccatctacgctaagcagaaatcgattcaaaatgcagatactaaaaagagtttcagatccaacgacgagaactctcctccttgtgacccaaacatacaaacaaatcatcatctcaacaacgacgacgatcttcacttgaagaaaaagtcgcctcagaaagtgtttccatctgcgactcaacagattctccctaaagaatctactcaggtggattcatataacttaagatctttctataattagggttttgatacattttgattttacataatttgttgtctttagttcctttggatttgaagttattgtttccgtctctgagttttaaattgaattacaacagtttgaagcgaagagtgtactcgtcacaagagctaactcaatggctaatgagattacagaggaagatgattcattgggtcaccagattcgtgacctaaaggtttgaattttttgtcacttattggttgcgtatttgtgtttgtgtgtaatgttgggtttatggtttataggaggaactaataagaaccaagtctgatgggtacaaacctgactggaagcagaatggttactttgtgagggagagtttgagtcaattgagaaacag

SEQ ID NO: 18402 - DNA, 781 bp, Arabidopsis thaliana landsberg
tttagatatataacaatatataaataacaccttattaaagataaaatcttaagtaggcaactaagtgtattttacatatgaaaaaaaaaaacataaccatttacttaattaactctcacaatatggtaaaattccaaaaaaaaaaaaaaagaacacaacatgattatctaccaagctaacctagaacatctataagatttatcttatatatgttcaaaattttgaaaaaaaaactaccttcttggacatgaaagctcgatcaggatcatcaacaatgggagagagagtaccatcataatcaagaaacataactatttgttttccttcagatttatgaagtatttcttcgaacatgttcaaagcagatggatgttccttctgcaaaatttgtaattctctcgtttaataattttttgaaataaaagattaaaacaaacaaaacagaggaagcaagaagacattacaatccaacaagattggctattgaaggatttagggcgagtaggagaacaagctctcatagaatcaacccatgatcttatcagtcctcctccgctgttgatctgaaaatcatgaagaactttcgtcgttggtgacgtgtctccgtcgtctcctccgacatataaaacctccgagtttgagatggcctttgtctccaacattttagtaatattttcttcgatgaatctaactgaaattataagattaaaacagagatgataccagatcagtaacacgtatataatttttgtgtgtgttttaaagatagacatatgtaagt

SEQ ID NO: 18403 - DNA, 397 bp, Arabidopsis thaliana landsberg
  unsure (1)..(397): unsure at all n locations
acttaattcgatctagttggtaaataagaaaatatcagaatattctaatatatttatatacattaatattattacttagattttattgttagaatatttggtatttttcaattaatggtatttgatttatgttgaatttttttgtttaatctctaacaaatttgaaaaatacaaaatattttgatttatattcaaaataaatatattgatcctgaatattcagttatcatttaatatttaatgttatttcctttttttatttttctagacaaatcatacccanaaatattgacgaaacanatctgaaatatattagattatttaatctcgttattcgtttttttaaaaaaaaataaaagaaggatccgaatcaaagatattcatttaattgatatat

SEQ ID NO: 18404 - DNA, 1302 bp, Arabidopsis thaliana landsberg
  unsure (1)..(1302): unsure at all n locations
agttttccaaccctatagtgaatgagataattaggcaagccacagaaacatgaatgaanatcttaattatctgtagattgtaaactgtttgaaataccttcccaaggaaacctgttacaatagtaacagcaggatcatgcatccaatcatcatataatctcttggcaacagctggataagttgcctccaggatatccccatttgtgaaatcatccgttgtaatgaaaccaatttcaaatgcatcatactgcaaagtaatggtcgataaatctacttagctatgtttgcgagccggatcattgtgcaataaagctcacaccaaggccagtttagcatgtaacagagaaagtacaccaatatgtgttccttgataaccgaaaccaaactaataaaaaagttaaatgaccaattcagagtatatagaatttgtttatcatattttctaaatctagattgaacttttctaccctaatctaccaagatatcaatttgactaaataagcaaccaaatgtgatatataatataattaagaaaattacagtagaactaaaaatatgatgatggacatacttggcgtgccttgacaccgattgtattaagataagcagcaaaaatccttgtagacaaacactctccaaaagagactaagtaatctctggttcgaagtgtcaattccttcatcatggcaatgcctttcaggagttgctccagttcctccaaataggctgcaaaatgtatccaagatataaataggcaatgcatgtacactcttgaattattaccaaactcatcacaaatcaaaaatttatgagcgttatcagaattagaaagaaatgaagctccaaatgttggaaagtctacaagttaaaatatgctcactcaaaataacagagggatcaatgttgagctctttcaccgtcctgaaacaacaaaaaaacacattcttgatcaaaaccaacagcaacaaaggaaaagatactcaaaggtaccaaattaatcatagttacaagaaaccaaaacctgatatgcaattcctttataatgctcaattcctcaatctcagatgcattagaaacaccacaactaaccgccttctctcccgccttcactagcaacaaaaccaataattccaatcaaaaatttcaaaactttgaatagaaaacagagaaaagggagagaatctcagcattacaagcaagagattgttggtagttttccccatagcagagagaacaatgactggactttcttccggaaagtcaaaatcaaatcagcaacttccttcattctctcagctgacg

SEQ ID NO: 18405 - DNA, 743 bp, Arabidopsis thaliana landsberg
gacaattgatgaacataaatggttacaaacagctttgttgtaccaacataaaagaatgttttaaactgttcatgattaataatcattttggtccatcaaaccggtttttacccaaaaaaaaaccgggtaaaatttaagcgatttaccaaacaactaaccccacacgtgcctaccataaacttcatgcctatttctcaccacacactatcttacacgtgtagattgtatatatacacattcatgtgtgtatctccttgttcctctgtttctttacctttacttgcggccaatcgtagaagaagaaacaaatcaggaaaaaaaaggtacaaaaaaaaaaactctctcctatgtgtctttaatggtttacaagtaatcaaattaattatagatatattgatctggattatgtttacaatgttacacattgttagaatttcaagaatcggcggcggaatattctcgccggaaaatggggaaagctagaggagttaacagcggcggcggagagagctctctcggttatctttttggttccggcgagtctgttcccaaaccaaacaagcccaacgctaaaaccggttttaccaccaccacgaccaccacaacaacaacggatggagctggaggtagacccaagaccacgaccacaactacaacaacccgtgataaaaacaagacagaggagaactcggctggtgtgagagggaagcctaataattactacagatcagatggacaaaact

SEQ ID NO: 18406 - DNA, 700 bp, Arabidopsis thaliana landsberg
  unsure (1)..(700): unsure at all n locations
cataacctccttccaggatttgacaattgtaggaatgaagtggaaggagaaactggtaccgttttgagaagattactacattgtccaaaacattcccaatgttcaatttatcaactgtgacgaataaggagaataaccagtagcaagtaaaacaatttgatattctgtttactctgtttatttgcagatgaaactcagtaagaatcataacaaacaatgtcttcaaatataaaaacacatcacaaaacaatacaacacttattttttgctcacttgtgcacacctcaagcatcacttcattgtttgattaagtatggatataaatcaacgaacaagaaaaagtgtagcatgagtgatcaggaccaaaattgagagaaatattaatcatcattcgctcgtaagtttttagtcaagaaagtagaagccctctcatagtatgtaagattcgataaaatttggcacatctacaaattagactctcatctatttcatgaactacgtacatacatttttctcattccaaacgacgggccacaaaanaaaaaaaaaaaaaaaaggaacccagaaaatttacattcttatttacttttaaatttttgctctgggcgtgattttatcatcggtcttgaagcgacatgatgctttgacaagatctctgcaatgagtagccgacccaacatatgagaagtcttgagaatga

SEQ ID NO: 18407 - DNA, 1294 bp, Arabidopsis thaliana landsberg
gcatttggagttttgcaagctcggtttgctattgtcaaacatcctgctcttatttgggataagataaaaatcgggaatattatgcgagcatgtataattcttcacaatatgatagtagaagacgaacgagatggatacactcagtatgatgtatccgatttcgcacatccggaatcagctagttcttcacaagtggatttcacctattctacggacatgccttcaaatcttggtaatatgacggccactcgaacccgacttcgtgatcggactaagcatgaacacttaaaagctgatttggttgaacatatatggcaaaagtttggtccgattcaagtttaattctaatcgtcattcaagtttttcatttaatatgtttgttttgtttttatgttatgtatgtttataattttaatatttttaataattattgtgttttgtaaaataaaaaatattataatattgtattttgatttttttttttttaaaacccgcttaaagattccaccattggacaacaaaaaatataagaattcaacaaaaattctaaactttcatttattcaaagtctaataataaaaaattctaaggattccttaaataaggtactccaatggggtgctcttactaaaatctgtagtttcccaaatcttacaaacgtaaaaccagatggcctatgtaatttcactcaaaggcctaggcccatttaaaccaaccaaacaaatattgaacggcttcaagtgtcacacctgaacacgtgtcaacatcacattgcgatttccatttttcgttactctactccaatttccattttgttttgttatttccatatccttctctatatatacacatagtatcaatcaatatcattatcatcacagattataccactcattgtttccgaacaaactagggttttgtttttccgttcgatttcagatattttgttgtcgataatgtttgtagtaacaaaacatcttctgcaaagacggaagaggtcgtcctcgtcgtcgtcttgctacgatgatttcttcaagaggttacaaaaccacggagcgtggtttaaaaagcatcttactacgcaactcttttctgtcacgaagaagaagaagcttcacttagtccttgacttagaccacacgctactccactctgttctggtttcagacctatccaaacgcgagaagtatctactcgaagaaactgatccaaggcaagatctatggagacgcaacgtagacggtaacgaatttatcataaagctacgaccttttcttcatgagtttctctggaa

SEQ ID NO: 18408 - DNA, 596 bp, Arabidopsis thaliana landsberg
  unsure (1)..(596): unsure at all n locations
tagtttttctcaactcgctcttgaactctcggagctaaagttgtagggcagtcttcagcttgagcccttttagaagcaaaccaatccatcaaggttgttcttatgtactcaagcatgcaaataagaggatactcgcgtgcctctcttataacgttgttccacgactcacatatgttactatccatgatattgaaacgccgaccttttgaatgtactcttgtccattctgaaaaccctacatcgaccaaaaagtaaagggttatgtaaacaactgaatccataaccattcaatatcannnnnnnnnnnnnnnnnnnnnttatgaagaaggaaacaaaattacccaaatcaactaaatatgcatcacatccgggtttaacttttgtatcttgagaaatatcctattgaactcagtgacatcaaacgcttgggcagcttcagacattagacggcaaaggcttttaggcttatacaaatgtctgacattacgccaaaggtgaacagtgcaagcagcatgattggcttgcgtgtatacctgattgaaatagtcaacaaatcagacattacttgtataatatataaaaggctgaatggaaac

SEQ ID NO: 18409 - DNA, 3223 bp, Arabidopsis thaliana landsberg
gttactattataccctaaaaccaaattttgatttataaatcaaaccaaatatgttttctttaaaccaaatccggtttacgtgcacgacgactttacagttaccatcgaagtttattttcagaattctacaaaatatcaatatcaaaatatctgattcacctctccgtgcttggtccggtgttcctacgtcaatctctcactccttagacacaaatcgtttcacaaccgccgctactgcagttccttaaaatgctgaggaaggtgataacagtggaaaattgacaaagattttagaacttggcttgttgttttagaactcagttttattgtctgctatgtttctcggggagatgacaataaaacagaattcacatatattgtttgattgggatacatttatctctttagttttgatacaaaaagcttacaagtgtttggagatctttttcataatttgtgctaaagttcaataactatttgccccatttgtttgaaattcagtacttgatgtcatctattggaaagaagatgaacacatggactttaacgtttggactataacttttggacaataagtaatggacaaccataccttttgtttgcatgaattattgattaagtagacggtttttgtaagatttgttaaggatcaagccaaattgttgattattggtttatatacgtcgaagatatggaaccatttctcaaatttattcatttatcactccacgttttgcaaattataaaaccttaataaaatccaacttattgattattggttttatataggtacatggaaccatttttcaaatctgtttatttgtcactccatttttgcgagtttgaaaatctttataaaagccatgtaattttcatttagatacttcttaagaaagaatgactaaatgctatataatgatggaactgtccatacacaaatgaataaatggtcaaagaaaaatgaacgatgtacgatgtactttgaattggcgattgtcattcatatataaacttgtgtattgaaatgatatactacccggtaagtcattaaatatggattagaccgcttggacattcattaatggacacatatgtctttgatctactgtgaatgtgttttatcgctctgtaaaattatcatttttttatagttatgatatactatatggtttagagttttgttttacggtttcaaatttagtggataaagattaggggttcatctcattttacgtttatttgaatcatcaagacttgttgcaggctttggacaccatcagcaccacaatgtattaagggatataaacactttcagattatcctctaagatttgaccataaacacttgtccatttgaccataaacatttgttcatagaaaacaaaagaaagttaccaaaacacatgacaaaaagatattttgttaacataagcagatttaagttggtcattactcttattttttaaacaaaataagctaattaaacaatcattacctttttttatagctcatttttaatgagaagagacatgtagagtaaaaaaacaaaacagagctgtgtggtaatgatattggcagccatgtaattaatgtgaagtttataatactgacctcttctcaaggatcatcaagagttaccatgaatacgaaccctctatatatggcaataaacttccagcaaacatttgcaacaacatgtgaaattcttccacctcgtccaaatatttatcgctaattcaattacgaaagtgaccaccaacaaagatatgtataaaaaaatacacagaaactcatgaacacggtcacaacctcaccaccttgtacaagacagacttcatccagcttcttgtaaagataatcaagaacatgaacaacaatctcagcagcggaaatcgtttagcttgagtcaaaaaacgtgtgagggatctcaccatgtacaacttgtaagagatatttggcacctgaacaaagacttgtacaaggaaagaaaagaagaagaataccgttaaataaaaacatgaacacagagtttggcatttgatatatcaaagaaaagaagaagaatactgttaaataaaaacatgaacatcgcagtttttcaaaaatgtacttcctccgccattacagttggccagagattgaaacccataaatttatgtgttttaattcattgttctttaaaaagcaggggaagtttctcaagtttgttttgtaatctcatctcttgaaactgttaatatccgactgccttcctttcttaataaccactcattttaaaccgcaaatgataactgttatttttaaactaatttgatcgaaactaatgatcggtttggagtgatatctgagattgaatttgagagggtatatatgtctttttttactccaaaaataaggcaaagtgcctctagtttttaaagtgtcttaagtgcattatgtttctccgaaagtgtctcatagtgtaacaaaccccaatttgaacctaagtatgattttcaattatcatgtctgcatcaaatttgaactcatggataccctaaaatacttggattttcttactcattttaaccactcttgttaatccaagtagctgactctccttattagagcagttaaacccgaatccaaacctaaactttctttcaagccctataccacttgtgagtgtttgtgaggtcttattccgattaagcttggtagaaactgttaggttcgtaaggacagagatagtgtctcatgtacttctagttcgcattttccggactagttaggactaggtgggcgcttatactttgggttgggatgtgtctaaaagaaaaaaaaagggtggattcattgataagaaaaggtaaaagactctaggtgaagtagcgtaatgaagcagaaaaagtctagtaaacgttttgggatttgtaaagaaaagaaaagggttcttgttagctaatgaagaagggcaaaagccctcggttttaaaaatttaaaacaggaacattagttgttaaagaaattaaaatccgctagatgtatcaaagtgttgagaaagcttctcctagagttaagagaaaagaaaagaatgattggaaaaagggtttagaagatttatcaatgcaaagggtacagttaagttcttcttagctagctggtgatggtacatccataagagcctcattggctatacttcggggtagactcataacttctaaagcaaaacatctgcaaacgga

SEQ ID NO: 18410 - DNA, 716 bp, Arabidopsis thaliana landsberg
ttaacttttcaaagtactttcctcccgaactctaaggaaatccgtgtggagattaaaccgatggagttttcattatcaacttaggcgcataactgtcttgaaaattaaaacgaagaaaactggtagatacaacaatgcaatcaacaaacaaccttgccaaaaaaccataggggccgaaaacaagaaatcccgacggtaaaacagaacaagtcagtagaagtagatctgagaaaactctcctgatctaacaatctcacatattggaactcttcataatcgagacaattaaacaaacgcataaacaaaactggaactacctgatacactggacggcgagttaaaaaagcaaagctagccaacgccgcctataggaggcggtgatgccagaaagagggcccgcatcacaactgtagaaggcggagatactggacaaaaaaaaaccaattcaattgggatagcaaaagccaggaaaacttgtccgcaaaagaaacacttctttcatttagatgtattagtttaaaacacacattttaaaaaaaaatatgagttctagaaaatttatcatcatatataatgcaacggtggcaatattattttatgagagtgacacaatggggaatatatacttttataaagtggtttggcttgattcgacttaattggggttgactggattctatttatttttttatcagttattattgaaaagagaaaaa

SEQ ID NO: 18411 - DNA, 1764 bp, Arabidopsis thaliana landsberg
gactctttgctttatgtttttccatcctgccaaagttctctacattgacattatgagaacgtgtttcggagggctggaatcatatttagagagacaagatacctcaccttcataaaactaatatgatgatttatgagaaaagaagagccaaaacattctcaacgtatacactactatagaacacacctcaaggtttgtcgttaatcaccaataatctttacaggtgcaagccccgtttttcatttggtggaatctctttatatctcgcgtgatcacttctctaccaactatatctgacatgatcttcaatgcgttatgacaatcaacacacacacgaaggtttttgatcacagtgaaaggtttacggggggcgctgttgagaacagcacgagcaaaagctattctctcgctatgaccaagaagtaatgtctctttactctcttggtctatatcatgcaaagccattcttgtttcagcgacatagcccacttccaccatatgcatctttaaattcctcaatagctggaacagttcatcattctcaggaagattggtatcccctgccctaaattcctgcatactacttttgactccgtgaagaattcctgaccttttctttagactctctttctcaacatctgatgccttaaccggtataaatccttcccgagattgtttgttcaaccgtgtaggatctaaaaattcaacaacctcagcacagtagtctccaagttctaaattcccatgaactcgagaaagattcatcaatgtttcccaaacatcaacatttggctccatcggcattctctccacaaattccaaagcctcatctaaaaatccgggtaacgcatacatctcaacgaggcttacatagtcttcaatggaaggggcaatgccgtagtctctggacattgactcaaagtgtaatagtccctcatcaacatcacctagcataccacaagcatagaatattcctctaaataattgaccatcaggtatatttccttcttctttaaagcgactaaacatatcaatagcgtcttccccaaaaccattctttgcaaaacatcttattataatgcaccaagtctctaaattcttctcagacattttctcaaaaacactcgctgcttcattcgccaacccacagtttgagtacatttctaacaatacatggttagaactcaaatctaaatggctaacggaagcactaatcttcccatgaacagtcttggcctcttgtaaaccctctgcttccccacaaatcttcgctaaccgtaaaagtctactcaaatccacaacataattcatacttgccaatatatctatagtatacaacgcttttttcactttaccgtgtttgcaaaatgcatcatattcctcaatcatgatgtcagtataatacttcaaataattcgcttctaaattgttaactaaagctctgatcttcgctagaacagaaaccttggcttcttctaaaacactgacttcgtaataaacatttccttccctacatagctgtgttaactttaagagtctaacaaaatccataacataacccttcttctccagtttttccatagtcgttaaggccactcttacattctcttgtatgcaatattcatcaaattccataatcatgtcatatacctcgcgatcaatagtcttacctgaatcccacgacgatcctacaccattctgataatcagagattgtcccgtaccaattgccttgatattgagattggacttagagttagcaaac

SEQ ID NO: 18412 - DNA, 1665 bp, Arabidopsis thaliana landsberg
  unsure (1)..(1665): unsure at all n locations
tgttacaccttttttactatatatgaaattactacactgttaagatatatcttgcgtgtcatacagtacctatgagtggctaagatgcaacaatatagtgaatattccttagaaatgatctaaagttgtcttcaaatattcagagtattacatttacagggtgactgtcatataacaacagttcatacacattatgtaatgtaattaacaanctttagactcataaaanctcaaaccttttacttatagattgcaaaacataaaagatttgctaaagtattgacagaaattaagataatgtaacatcccgaagttgggccaattgctccaatgattcaattcgaatcgngattttcttcttctcattcatcatcattgttttatcattctgcatgtacattaaaacaataaaaattaaataaacttttttctagatactgtttagacatgacangctcatgattactaatgtgatacgtttcacctccaaaagcttgatcttttcaaatattaaagcatttttgttctcaagaaattttattctatgttccaagtcaatcatgtactttaacttcctctgctttgaagatgcggctaactctcgatttttcaagattctgaaagagcatccacatggataaatgtcacaaagcatgataaaaaaacaaaaaaaggacaaataataatttagtcatacaagttcacttaccttctgactttcttaggatcagatgcaatctcttgaagtttggtactctttgcaatctcttgaagtttggtactctttgcaatcttattcaattcatcatcagtataatcactgctaccaaactcgagccaggaagcatcctcgtctccatcaactgaacttgaagaggaaaagttacccggagaaggaggcagctttaggaagtaatgtaacaactatccaatgaaacagtcctgtaatgtctcctcaaaggtgccatgtctttggctgctcttctcttcacacccaaaggaggcaatgaagggtttttattaaccttaatggaagagtctctactctccacaggagctgacagagaaaagctcatcgatggtaatgaattgcaatggaatgttgacgaagaagggctcaatgggggcaaggaggaggaggcaagtgaaggctgagtcatagaccgtgatccggaagaagtagtgatattgtcggatccattcattgttaaggattggagaagaccaacaatggagtataaatctgcatcatataaaacaagtcatgtttctaagtataactcatttttttacatgcaaaataacaaaatatcaaatagaaatgggacaatgataacaattaatatgatcaaagatattttgttttgcaccgtgacgatattgagattgtcatcagttattggagaaaggagaacaaaaacacaattgaaacgttgaataagcaatgaagagttgagaaaaacctctcagaaacttatgtttgattggatggagaaaggagcatattatgtatgtttggatggatagtttgctcgaccctcattttgtattggttaagacaacacttcagtctcatgtttataccccaattatgaacatttcatgatttccatcttaaatcataagtctgcacataattttgtgaaacaatacatccaattttga

SEQ ID NO: 18413 - DNA, 397 bp, Arabidopsis thaliana landsberg
taaatacactgggaattatctgaaataccaatggtatcagtaaaactttcctctaagttcagaacttttaaatctagattatctttgttggaggttaccactccctccaggtgggggagagaaaacatattgttacgcttggattttgtggttcatatggaaagataggaataaaaaagttttcaaaggaatacaatttgaacccgcaaatatattaaatcacgctatgagtgaaaaattaatgtgggaagaagctcagttggaaccgatcgactctaccactatttcgagttctttggactacccaactcaatctataagatgtcagtttgatggttcatggaaatcttcggatcgaaatatgggtttaggtcggtggtgttcttaagtacacaat

SEQ ID NO: 18414 - DNA, 2580 bp, Arabidopsis thaliana landsberg
aaaacattgctcgaacaattctcaggaatctgatctgtattttttttctattctaatagaatataccgtcgcatctgattttttgtagaatgtgccgagtcttttttgttttattttttaacacaaatgagcagagtctcatgtcatgtgtgactcttctcttcatatttactctttttaacaattgttcagtcaatttcttattgttctacactaaaaactatcattaacatgacaaaccaaaaagaatccatcattatcaagatatataggttttgatatcttcttttgttaagtaccttagttggtcttcttccccaatctagtttctggttattgtttgttttttttgtatactttttatgttcaagttatataagaaaaccctttcacaaaaaaaagtatattcagggaaccagaaatgtttatcaattaaattttttgtaaaacaatgacatgttttatccttacttaaaagaaagtaatattaaacaaaatatagtggtttcgttcgtcaagcataacaaatgaaacgacatgatcgtgtgacccaataagcccagcagccggatttgacttatctccttcttcttccttttcggtcaaatgtttgactttctgctaaaaataacaaaaatgaattttaaaattgagaaaaaagagtttcaccttcaccaatcaccatttctctctactcgccaagaagtttcctttcctttgattgcacaactaatctcaaactaaaagatcttctctttaggcatacccagatctttctctctctaaagtctccacctttcacggttttttgcttctcacctgaatccaatcaatctcgccggagtgaattcaccttcctccggttgactcgtcggacttagtccgacctttcaattcgtagattctgtttacaattcactgatcgtttgattagaaatgggttacttgttcttctaagtctctctttagctgaaagtttgttgctttacgactcttcgatttacccttacttgttcaagttcttcatcaaattcgtagttatggcgataagaatcactttcacttactccacccatgttgctcggaatctcgtcgggacccgtgttggtcccggtggttactgctttgaatccttggttcgtcctagattcttctcccacaagcgtgatttcgatagatctcctcggaatcgacctgcatcgatgtatggtagcatcgcgagggagctcatcggagaaggaagtcaaagcccgcttgtgatgggtttgatctcgatattgaagtcaacgacgggtcatgagtcgtcaacgatgaatgttctgggggtttcatctttcaaggcttcttctattattccgtttcttcaagggtcgaaatggattaagaatccaccggtgattgatgacgtggataaaggaggaacagtttgtgatgatgatgatgataaggaatcgaggaatggaggaagtggatgggttaataagcttttgagtgtttgttctgaggatgctaaggctgctttcacggcggttactgtttctatcctttttagatcagctcttgcggagccaaagtcgattccttcaacgtctatgtaccctaccttggacaagggtgatcgcgttatggcggagaaggtatgaattctgagtctgttcatgtataattgtaatcataaaacatagctgatgatggatggtgactttttctacacggttctggaattagttcttgcatgttttaggatggagatagttgtatgatactcttatgtgattgaatgtgaaggtttttctataggtgattgctagacttcaccttgagctttgtttagttgcttgatgtaggtttgtgaatgaggctgttttagtctctttatgactaaactgaccgtttgtgtgccttggtgttggtcaggtctcatactttttcaggaagccagaggtttcagatatagtaatcttcaaggctcctcctattttggtggtatatatctcaaatcactatttctgggttttcaaatgttcttagacctttttcaaaggtgcttgatactctcctttgaattgcaggaacatggttacagttgtgctgatgttttcataaaaaggatagttgctagcgaaggtgactgggttgaagtaagcccttatctctaatccacttgttgattgatcctattctccattgaagtctttggtcatctttatcggtattacttatgtagtggcttcttgatgaccagcctcctcaaaacagactcttaacctttgtttctgttgttgttatattcctgtctaacctattgatgctgtatcatataggtttgtgatggaaagctcttagtaaatgacactgttcaagcagaggattttgtcttagagccaattgactatgaaatggaaccaatggtaagcaaacttgcgcttgcttattgaatgttttctcgacctaaaaattattagaagaatgctgctaacttgatctctttctttttcctgtttatttgcagtttgtccctgaaggttatgtcttcgttctaggagacaaccgccacacaagctttgattctcataactg

SEQ ID NO: 18415 - DNA, 541 bp, Arabidopsis thaliana landsberg
tttaacaattgtttattgtcttcttggtttatattttttcagcaagttctaacacgaaagggccgagttgcccgtgggtttgccattttcatatttctgaggtataaactcatacccatataaagccacaaacatatatatatgtgtacagattctaatgaacctcttctttaatttcacagaaagtactgaagcggaaacaactgagcgcagaatccgttgtttcttctttaaacgagcaatacatgagcaggaacagacaactgaagcttgatatagttgatttagatatacaaaacacgtaagaacattcttgaatttgtagcagacatgtttggcttcgcttttatgtctattagaaactgatttgttatacatttatgtgtcgtggattagaaaccactgctcttcagacgatcaggcaatgaaggatgataacgtttgcatcacggtgactgtagttgaagcctcaaagcactcggtttaggaactggatgctattcgtctcgttttgatcccttttcttcttgactctcctgtc

SEQ ID NO: 18416 - DNA, 703 bp, Arabidopsis thaliana landsberg
atttatcacacttcttgtttatagttaacattcaataaaaatactaactatttacctaatgtacttctttacttgtggtgtcttcttgtacaagtgatgtctcaaatcttctagattctataactcaaaactcatttcataaaaccaaacacaagttagagaacttaaacacaagaacacaacataatacttaaagcataaaacacaacttaaacacttaaattatataaaacacaaactcattaattagcctaaaaacaactgaaacacaacttatcataaaaaccaaactcttttcataaagaccaaactcattagctcaacacacaaagtaataactaaagtacaaactcattagccaaaacacaaagaaataactaaagtctagactcatttcagaaaggccaaactcatgagccgaaacacaaagtaattactaaagtccaaactcatttcataaagaccaaactaattagccgatccacaaagtaataagtaaagtccaaactcatttcataaaaccatactcatttcattcaagaacacaactgaaatagttaaatccaagtattgcactaatcccagcctaagctaatcgaaagaatcatatcttttgaagagattggagatgagtatcaataaattctccgatttcgaacttcaaactcttcgatttggatcgatgacggatcgacacactatc

SEQ ID NO: 18417 - DNA, 2445 bp, Arabidopsis thaliana landsberg
  unsure (1)..(2445): unsure at all n locations
taccttccataatcgaggaagctgtgactgtagattgtgtatttatatatttccgtaggcaatcgtacgcgagtactcaggaggcacatgctcacttgacacaaatgtcacctaaacatatgcacaaatagtcatcactaacaattcgaccatataccacagttgaagtctaaaaatatgttacaaagtcaacatctagattcagatccaaatgtagtatagttctgttgttgttagtttcttaatccggacgtacatctaaagtcaacatcaagattcagatctagatgcagtatagttcggttgatgttagtttcttaatccggaattgttcgtttttcaaaccaatttttgcatcaaaaatgttcgtttcaaatttgttaaaaaaaacctaaacccaatcttgaatcatcaagcgacaaaaaacgtcttaaattacaaaatttgtgatgaaaattatatcaaaaaaaaaagtcaaatcatttttttctgccaaaattggacgggaaaatacctacatttacacagagaaaaagagaaagccagcaatatatagcgtaaatgtatgcatggtcatagtactctagcatccaacgagagagacaagactaaacctgcgcagaagcaccgcctagttcaacaatccccgttgtttccaacggatcagttccaagcgaaccaagtgcgtaattggcagtaatccaagaatatataccttcatcagatcctgaatcatttcccaatgattacatttcccaacttatccaaaatgaagaattgattcaagaaaaaaaaacaactaaccagagataacattagcccattcgtctcgaaacataaaacctgaagatctaagaactcttcttgtaacttcaagaatctgttcttgaacaggcacttcaagtaatctcatcccagcagtcgccattaacctaatgtcactcctcctgaacattctcttgggaatcctctgcttggcgaattccacaagcttcgtcactgacacgcttgctccctccggattatcagcatacgaagacaaaccaggagtcaacttcagattagcgtaatgtttctctccgaaatcgaaaaccggtttaccggactcaatccggtacccgaacacatgaactcgggtccctgaactcccaccatcgataatgacgctgtagtgaagtgaaactctccgattccttccggagcgtaaaattgaatagccaatgaataataaacccaaggcaatagttacacaagcgacgattacgaagataatcgattttgttcgtttcgacttgggtttggcggcggtggacggcgatgatcggtggttgccaggtgaagtctgaacctcgggaggatctaccatatctgaatnnnnnnnnnnnnnnnnncgagcattagaccgttgcatcaacgtttaaggaaccgcaacgaaagcggataagggatcatggagatctgatctgtgacgcaaacgaaacgtaaatccagtaactgatttttttttgttgatgaaannnnnnnnnnnnnnnnnnnnnnnnnnnnatctaatttttgtaatcggagatcgcgagtgaggtcggagacgacggccgatgaagctcgtcgctgctgctctcagtctccgttttcgtagtggagaagaaaattgggagcgcctttttacaaattacacacctattcctcacaaattcggaccgggtcgggtttgggttgtttcgggtcacattcaaaaccatttgatttccgggtccttctgaccgatacagggtgactccggttttaacgtatcaagtctttctttcatgaaccggaccggtttacagtcaacattatgtttaatccaagtaacctcatggatggtaaactactaaactttggattcagttaggtatcaaatcaaatcaaaaatcaacaaaaataatcaaatcaaaccttattacattggcttggttgaccaaacctagctgttaaaccacgaccaggatcagtacatatcatcgggaagtggattagtagtgcttcctaattaaattataattccacgtaccttccttctccttcattattgattaattttctatgttctagctcttttatatgatgtttgcttatttctgttaaagtgttactataagacatgtttaagtttaagtttaacgctaatcgtgggtggatccttttttgctaagctatggaatatggatggatccttaacaaagcattaattagcatataattcataattccatgttaaaatgtacattagttggttatatttgagattttcgtgtgctatgtgtgtttcgccgttgacggctcagtgttctcggcctaccggtgaaaggcttccatccacttgggtattcattgtttcgacctttgccgtttgacagcattatcttcctctttgaggtgtcttatatgaaattcattaaaagtgtt

SEQ ID NO: 18418 - DNA, 934 bp, Arabidopsis thaliana landsberg
  unsure (1)..(934): unsure at all n locations
aaccattcctccatgcaccttgtaaagaaaccttcgatacaattgttgattcgagtttcaagaattcatgtgttagtgcttaacatttaggtatttaaccatcaagcaaaagctcacagtaaagtcaacaatatgttaccattatgtttcaatctgtatctccagaaaccannnnnnnnnnnnnnnnnnnnnnnaaaaagagaaatgctaacaatactagcaataatggtcttcttgcgctggtttccacctgagatatataagacaaaaaataaacaaataagcaatgctaatcagtgaaaatgaagtaaaagttgtaaatgacaaagaagtttgatgttatttttgtatggcatacccatttcagaacttgcaagacgtatagaaagaagctctcctcccacagagaattgcattacatccattagctcctggttccaaattaagcaccctattccattaatataagcaaaggccaagcatgaacaattgtggaggcaactttggtagcattcttctgcactcccggaggacacaaattcgtaaaagtctggaggttttatgttggcaacaggatggaagacgtttacatgtctcccagtagagtttccttgacaatgtagttcagtacgcctcacacaaccaccagtccaatttcctcttttccattcctcactgaattgtggtacaaagcctttaaagcatttacactttggaggaatggacattacacacaatccaaaaggtccacatacaccgtaaaaatcacatgtgttagctggaacatcaatgttcaatacccagtccgtgccattatgatgagtaaccttcagtgacccctctgatgttaatactaacaatgaacgtttgaagtttctttgtaaatgagagaagtatactgacccgtttgcatcttgcttgacgctaaatggat

SEQ ID NO: 18419 - DNA, 495 bp, Arabidopsis thaliana landsberg
ggtgtcacttgattgctctatcaagatttaatttaggcatagagcaatatcacaagtgaagaattgaaatgaggaagaggtaaaaattgcaataatgtaaatggcacaagagacacaatttttatcccgttattcgatcaagcgtaatatgcttgcctactccacgttgtggcgtcccaatggacgagggttgcattctacccctcccaagtgatccaaagatcaaacttgagtaccatagttcttccttatgttccacaatatcctagttgtgaggaatctccataatttggagtctctcacgccatacacaagtgatcacaatcaaaacaagagtaatggagggaatatattacgcacacaagagacaatgcagcaataacatgcacaaatgtgaacaagagagtgcaacaacaaaacgatagagtaatgccccaggaatgcactcaaatctatctagaacacttcgaaggtgtggtcgcagagttggagtgt

SEQ ID NO: 18420 - DNA, 537 bp, Arabidopsis thaliana landsberg
tgagcattggctgactgacccccatcttgtagagttggccctcaatcagtgcgaagtcccggcttcaatgtttgaggcgcttggcctcgttgatgtcggttgggtgataatacccctataggaacagagttattggtgcccgccagtcttcggtcatgaataaggtgtgctattcggtggccttcgctgtcattggttatttggagcccttcgaggctccggacggttggtgtgccgatgacgtggtagaacacgtcggagggcaggggctcgcctctggcggcagcttggccaatgcgtcggcctcttcattcttggcccggtccacatgctgcaaagtgaatcccttgaattgtctctcgagacttcggatggccgtgaggtattgcatgagtgcggggtcctttgctgcatatactttctcgacctggccagcaactaccttggagtctgttctgatgatgcaggtggtgacccaagggcctcagcttgcggagaccgaggatgattcttcgtattctgctatgttatttgtgc

SEQ ID NO: 18421 - DNA, 852 bp, Arabidopsis thaliana landsberg
atgaattctcctacccgaattatccgaaccgaatcctatccaaaccaaaaaccgaacgaatatccgctaatccaaaataaaattatatatataaaaatattagttatatttagttataatttatactcaaaaatactaaatagcaaaaaatatccaaaataatcttgatatctgaattttttttagttatatttgttataattatacaatattttgcaaaaaaaaaacaaattttaataaaacccaacgatttttattaaaaaattctcaaaaactgatcagaaaccgatccgaatccgacacaatccaaaccaaaaccgaaccgaatagtcatataatccgaactgataataaactttctcatccgaattatccaaatccgaaataatccaaaccgaatccgatccgaaatctgaatgacaaggcctagatgttgatgggtttcgcggtacgtcaagcatctccggtgaacgaaaaggcggtgactgaggggttgattcgggattcaaggcacatgtagaagaccatgggagtttggtttctccagtgagggaaatcggggtcaagaggggcaaagggtatgatgtcagggaagaacattcgagtagggcgtgatagatggacatcgctggccatctgcttgggagatacatgtggatcgagaaagatcgaaaagctttaaagagattaaaaaaaaagttcatctaaaaagatagcacgaacacgagatcgagaacgagggaagatatggtgacttatgtcccgacgtcggcaaaggaaggcttcgccggcgtcgaagaatagaatctatggaggtcctccattattgtgtctgaaagagaataatagcga

SEQ ID NO: 18422 - DNA, 466 bp, Arabidopsis thaliana landsberg
aggtacttttcttcttatttatattcatttaggatgactgccttatgtccctgtttcgttttgtgagtaattgttactatttcttcttgataaattcaggattttgaagctttaactccaaatctactagcaagaacaatagagactgtggaaggtggtggtttggttgtattgatattgcgatcacttacatcgcttactagtctatgcactatggttatggtatgaaccacagtttaatttcttattttttgagtaagtgggagaaaagcattatctaagtaatgtgacatgacttttttttattaggatgtccatgacagattccgaactgaatcgcattctgaggctgccggccgtttcaatgaacgttttctgctttcacttgcatcttgcaaagcatgtgttgtcatggatgatgagttgaatattttgccgctttcctcgcatatcagatctattactc

SEQ ID NO: 18423 - DNA, 1191 bp, Arabidopsis thaliana landsberg
  unsure (1)..(1191): unsure at all n locations
ctccccaaacaaaactgaaactgagggccaatgagttttcttatactcactgataagaacaccttgctgttccaagacaccgcgttgggctcaatcttagacgtgacccagatctccatcattaatgtatcccacggctgatatannnnnnnnnnnnnnnnnnnnnnnnnnnnnnnnncactcaaagcatcttcagattcaacaaactgaaacggacgaggcaaacgtggtccaaatgtctctcttgtgaaatcaaaagagagtaagaaaaactcgttcgatgtttcacttgtgtacggatacttctcttcagcaacccagaaggcatttcccttgagagacacgccactattaatagtccctaattgccagtctggagtgacatgaaaaaccctccatgaattagagttaaaatcgtagattatgaactcatgaaaatggggtctcaaacaagtaatacacctcaagattttgtgggatttgctgctcttgtcgtatccgagagcataagaatagctgtcgaatttgttgaactgatgtgtgggctcgattgaccgggtatgcccccaatacgggttccaaaccacgagcctagtcttggcttcggtgatgctgatgcataacaataaaccgtcgcagtgaaagacttgagatatatcatcaacttcgtcgcctaagctaataactttagcttcacgttttatacatgatgatgatgatgatgatgatgatgattcaacgacgttgttatcaagattgactctcatcaaataaaccctaaaattcatcatcatgaccatcataatctatttttcctttgcagctaattttgcttgatcagcaaggtacttctttgcaaagctctcatatttgcataacgtgttccacgttttgcaagaagatcgaacagttctcagagtcgtcaacggaattctacagagcacctcttccgccaaatcccttggaagattggatatcttagtcattcaatgaggatcgatatagcgcaaactcgttagttctcgttctctttatggaaaactagttaggttagccttaacaaaacaaatataaaaccaaagaagtattttacttgttccctgtttatgtgtgatccaccaaacaaattgaagatgcagatacaaaaaaaaaaagaaaggattcgatgacaatagacagaaccaaacaaat

SEQ ID NO: 18424 - DNA, 540 bp, Arabidopsis thaliana landsberg
  unsure (1)..(540): unsure at all n locations
cacttgaaacattctattttcatgaatgtatcactagaatcttgtcttcaagtggactaaccgggatcatttgaccttccatccagaatttgacccatttacaagagttgtaagtatcacacaaacacatgaacaaaagcaaacattttctgttttcttctgtgatttctgtgatggagcttttcttttaaaacaatatcaaatggcagggatttgtcaaataacgacttgaccggggatgtgcctgagtttctagctgacataaaatcgctcttgatcatgtaagtctcttaagacagtatgaaacataataatgtgttttaactatttttataagtcgtctccttgtattattattattnnnttttttttttttttttttttttttttnggataaacagggggctccttggattatatatctcttttttataccttaacagaaacttaagtggaaacaattttagcggtcaacttcctcaaaagcttatagataagaaaagactgaagctgaagtaagtttttattacattgatcttc

SEQ ID NO: 18425 - DNA, 552 bp, Arabidopsis thaliana landsberg
  unsure (1)..(552): unsure at all n locations
aggtgggcaagaagtaatgatcaaatcggttgctgcagcattaccgacatatgtaatgtcttgttttcggttaccaaaagcaattacatctaaacttacaagtgctgtcgctaagttttggtggagttcaaatggggattccagaggtatgcattggatggcatgggataaactatgttctagtaaatcggatggcggattaggattccggaatgttgatgattttaattcggctttgttggcaaagcagctatggcgtttgattacagccccagattccctgtttgcaaaggttttcaaaggaaggtattttcggaaatccaatcctctggatagtataaaatcatactctccatcttatggatggcgtagtatgatctccgctagatctctggtttataaaggacttataaaagagtcggttcaggggcatcaatttcagtttggaatgatccatggatactagctcaattcccgagaccagcaaantatggtggatcaattgttgacccatctctaaaagtaaaaagccttatagacagtcggtcaaat

SEQ ID NO: 18426 - DNA, 2652 bp, Arabidopsis thaliana landsberg
ccaaactaacgaaaatccaaatcaaaatcaagaatcaaacgtaagtatgatctatcctttcatccattcattagctagtgtaattttctgagtatttcatggcatcgtcattttttttattttgtatttttttgagtttttttattgaatatatgttttgatttgttttctcgattagaaaattatttggtcagacgagatgacccgtttcttgttagaactttatcatatgtatagaggcaatctggaaaacccacgagttcaacgttatttacagtttattacactacttgatgcaatttttggtgatgtaccaaatgcataaagtactaagatttttcttacaaaatttatttatttttgaatttaatgttttatttatggttttaattattaagcatgtttaattttctaatattatcaatttatcatagtaatatattgtattttttcttttaaaattaatatattatatttattttggttattttttatttaattactatcgcacccgctgttttaccagtcataaaactcccgcaaacgcacccattatcaaacgctcaaccagtcgttcaaaacgcttgataacgcttgaaaccgcaaccgcccgtttccgcaaactcccgcaatcgcatccactccgtttaaaccagccaggcgctatattttgcttcttagtcaacagtataatttcaagttaagaaggaaaaaaaaactcttaaagggcctgaggcccgattaagttaagcccaaaactaataataagccgcataaagtgaatggtgaagaagaaggtctcattgggatttagggtttaagaaatcttctgagaaaacagagagacagaaaaatggtgatgatgaagaagatgaagggaagccaaagctttagacaaagacttcttctttcaacactttcttcaacacctatctcgattgatgagattcgtgccgacgaaacgattcctggtctccgacctcacgaggttaatcttctccgcctcttagaaattgtcaccgacgacgccgtcgttgatattaacgagaccggtaagtaacctttcacctgattttagggttcatgacttcagatttactgattttaggaatgatattgagctgaagctaaagtttcaccaatttagggcttcaaattttgtatctttcagctaggtttcgattccaatcatgtttgtgtttctgaaagcaaaacttgtagaagaagaaaatgatttttaaaaattcgaattggtttgttagttttttagtatgttgcgaatttggcagggactcgattaaagtacaagcctggaactatagtgggagggaagaatttggttcacagctgctcgctgagtcgatccattggctattatcttgagccattgcttttgttgggattgtttggaaagaagcctctttcgattaggctcaaaggtatgtaccttctactgtaaaactgctttcaaaagcatgtggatatttgatgatcgagtgagcaagtattttaactcttgcaggaattacaaatgatccaagagacgctagcgttgacacattccgttccactaccttgaatatcataaagcgttttggagtccctgcagaagatttggagctgaaaatcgaagcccgtggagtagctccgaatggaggtggagaagttctcttaacagttccaaatattaagactctaagtgtatgtagtacttgttctcttttcttcttccgcattgcaaggttcaaatggatttcttatctgttatattattgcttcaggcggttcattgggtagaagaaggaatggtgaagaagatacgtggtacaactttctctacaagagtgactagtgactttgaacattccatgagattcgcagctcgtggtatctttaacaatctcttgcctgatgttcacattttccaagatcacagagctggcgctcaggctggaaagtaagaagcttaactaaaaccaaaagcatgagatacttgattgattaaagctcacctttttaaaaaaacctacgtgattgcagatctcctggatacggaatatcattggcagcagaaacaactacaggatgtttcatctctgcagatacaacagtgtcttgtgaaagaccagacgaaactggagagctcgatgtagagaagaaagagagatcgccagcagaagacacaggagttgaagtagcttcatggcttcttcaagagattgaaaaaggtggagttgttgattcaacacaccaggtacgttttaaaatttgaaaacattaaccatagacaccaagatcgatcagactttaagtgggtgtgttgttgattctctgaggttttttacagggattgttgtttctactgtgtgcgttatctgaacaagacgtgtcaaaggttcgagttggaacattatctccatatgcagtggagacgttgaggaacattaaggagtttctgggagttaagtttgccatcaaacctgatccattgactgggactgttatactcaagtgcactggaagtggcttaattaacctctccagaaagctctcttgatttctcactcacagtcaccttttacaattttgtctgaatgaaagcgcttttctataatttgagtggatgtgtatttttgacctaatcataatggc

SEQ ID NO: 18427 - DNA, 3275 bp, Arabidopsis thaliana landsberg
atagttaactcgttagggtttctgcttgtttatgagtaattttggaatattgtttttttcatcaatttttttgtacgttattagcctatatataaaaataatttcctcatttataaaaataaataaatacttattatgtctgagttaaagagttaatatatgagaaaaagagagtttattattctttgggaagaagaaaattaaaagagagtcaatagcaatttaatttggtaagatatacttttccaaattaaattaaaattaataaatctgggtaaaataaattctactcattttttcgttttttttctacttctcgacgaaaacagaattatggattgcattacattacgtaataaaactgccaatgaacatttgatacattacatccttgatggagtcgttttcataacgaaatatcatatacggctttaaatttttagttcggcaaaatttaaaagaaaacaatatcgtgcagttggaaagatttgggaaaaacaatatcaagtgtcgttagctcaactggtaaatattctagacgaaatttagagatcgccgattcgaatgacgtttggttatatgatgttatttcggatcgaagagagttacatgttttgtctcagaactatttcatgttgtagttttgagtatgaaaggattacatgttttggtacacaacttcctaatatttttaaaaaaatatatatatatatatatatatatatagatatagtgtagctggaagacctgtcaagaatacctagtttagtataaaggttttcttattgataatgatctcaaggctgtgccttatatacatatgttaagacctagatacaaagatgtaattaccaaactataacttaaaaatatactaattacataagaggacctatattccccaatacccccctcaagttggagtatggaggtcacaaatacccaacttgagtataaaagcttcaaactccttgcgaccgagagcctttgtaaatatatctgcgagctgaagatgggttgaaacatgttgaggagcaatcacaccacgaacaatctcatcacgaataaaatgacaatccgacccaacatgtttagtgcgttcatgaaacaccgggttagcgctgagataaatggccgattggttgtcgcagaaaagaggaataggagatgaacaatcaactcctaatgtgataagaagctgccgcaaccataagatctcactaaccgtatccgccatggacctatattccgcctcagctgatgaacgtgagacagtatcttgctttcgtgtcttccacgaaatgggagaaccaccaagctgtataaaccatgctgtaagagaacgtcttgttagtggacatgtcgcatgatcagcatcacaccaagctgtaagagtaagctccgcatccgcacgtaatagtatgccttgtcccggattccctttcaaataccgaacaactctaactgccgcctgccaatgttctatccgaggagcatgcataaattgagagagagtatgaatggcatatgaaatatcaggacgtgtaactccggggatggataatacgaccaaccaagcggcgatagcgaagaggatctgtaagaaaatcacccgttgccaatgctagttgatgattctgttcaatcggatgtgtagttggtcgagcaccaagaagtcctgtctcagagataatatcaagagttagacaaattttgaccaaaaaagacccaagagaaacaaatctctgttttaattggaaggatttttcaagaaccaaaagaaacaaatttataatataatcaatcaaaacctaatccctaacttgctcctgaagaatatcacaagccaatgttattttttgggtcaaaaagtctttagttggcggtataacgcaaccatttgccaccaaaagaaaacccaacgaacacacttgaaaggcattggggatgaatctgcaaggtgttgaaaccgttggacaacgaaccccctttgaatatcgtagacgcaagtattgcgtaaactaatgttcttgtatttaccatacttaacgtaactaaaatatatgcaattattcctaattccatctttggcttcaaccgttgttccgtgatccaaaaacaatgcttcgttcccaatacaattgatttttctccactttgatgaatttggatccatcttgtaggttgtaaacatcgaatgaacatatcattaatgttgttttctttaaaattatgtcgaactaaaaaagtctgaaatatgatatatcgataaactgatcccatatctaatgatgcaatgcaacacaattctgtaaccatatcaaaggacatgcatcattgcatcatgcatgcatgaagctaaacctaataatgcaaaacactaattaggatcattcaacatctatcacgaacggaagtgtgtcacttgttttgataccatttcaatctttaaattggaatccaaaaacagaaagaaacacaatttgcaaagaaaatatccgagaggaatatttgagaatagttgttataccctaaacataaaacgtagcaaaatgtaagagaaataatccttaccaaaaacataaaactagatagctttagagcaacgatttgccacaaaaagttgggaaaaaccaacaagaatccttgaaaggcactggcgataaatctgcaaggtgttgaaaccgttggacaaccaacctcctaagaaaatcgtaaacgtaattactgttttcattgcataaactactcccattgtatctacaaagcttatgattacttaaatataagctgttttccccaaaaccatctttggctgcgatcgttgttcctagatccaaaagaagtgcttcgttccctaaagaataaatttctctccattttgatgattttggatccatcttgtaaacatcaaaggaatatatcccatatcggcgggttttgatcagcaaaacctctccggacaaagttataacaagatggccgaaacaagatagtggatataatgtgagcgcaatatcctgagatgtgaaacttgcacattcatttggagatccactagagaaatcaaaaacagtaatgtttagatttggattaagcacgtagagcgtgctttctctaaacactagatcggagcacccttcattcttctttaattgaatcactttccaggtcttgttatgatgtcctttcttatgatatgccaagaagcactcaatgctccacacaactaagtaatctcaaattcgttcatcggccctcatcaccgcattctc

SEQ ID NO: 18428 - DNA, 355 bp, Arabidopsis thaliana landsberg
aaaaaaataaatatatatatgctatggcgaaggaaataagtaggaaataaaatacaaagcaattacttctaaataacgtaataaaactcttgcgcggagcgcgggtaaccggctagttatataataaaagcttatgaaatacaaacatcttataaaaagcttataaacatctaataaaaggtttataaacttcttacaaaagcttataaacatcttataaaagcaaatacatctgataaaaggtttataaatatcttataaaagcttataaacatctgataaattcctattaaaatattttataagctttaataagatgtttataagcttttataagatatttataaaccataaa

SEQ ID NO: 18429 - DNA, 986 bp, Arabidopsis thaliana landsberg
gtttctagaaactcttaaccattacagcgctgatacccaaggatgatcagatgaaaaactaaactataacaggtttagtaatctgcatgttaacgggcaagtatgataattcggatttgtagaaatattccgaattggtaaaggaccatatttatattctggtatttcaagtaactagaaattgttttgaataaatattacgaaaaggttttgattttttatcgaaatattagtttgagaaactttcgataattctataaaacttttagataattgaggtcactctattactttaacaacacacgtcgtatatatttagtttggttttttctagtaaatatgtaaatactttaaacttttaataaataaacagttaataatttagtgtttatgttttctgtatgattacatttgttccccggttattcaataaataatgcagatatttaagaaagaaaaaaattagtttaataatgctcatgtcacgcagtggaggtacctccaacactttatatgtgtgagagcttgagaactttatgcagatgtcccaaagtctctacggttccactaacaatggtcctcacgaagatctagtttttgaaattgatgctctcaagcttgagaggaaaataatatatatatatatatatatatatatatatatatatatatatgatggtgaagaaatgcgctgtgaagatgagaatgagaaacaaagaggagaccctacaagagtaataaaaactaacggagagacccaaagagagttgagactttctcaccggcgacatggaaaggacaaagcgagaacgacaagaaaatgactcttcatgggccaccaaattgacagaagtcatgtaacaaaccaacattgtttacccagaaggtactaactcataactgacaggtctaaggccagtgaaagattccgtaagagcccttccgagcgcgatctgcgggcagcacacagaaaccctgattcgacg

SEQ ID NO: 18430 - DNA, 715 bp, Arabidopsis thaliana landsberg
aatagaaataaaataaaataaaaaaacgtgaggcccaaaaataaaataaaaaaatgaggccccacacaataagaagaaacaaaatctgataacataataacatatggcttctattgctccaaaaccctaaaatagattatcccaaaaaaaaaagatgaacaagaaaaaaaacccaaaagaaagaaactaagaaaaaagtctcacgtttaacaaaagagaaaggaggccacggttttttgtaaagaggctaggttttttaacaaaaaccctaatggtatctcgatatttatttctctacgagttaaatatggtaactcgttttagtaaatctgtcataacaagctaaaaaaaacaaaaactgtcataacagttagtattattctattaaaaaaaacatagaaaaagaaaaatataaatcggtaaccataaggatttcaaattacaaatctgtcgtagcattaaatatacttaagatcattccagcaatttattttcttctttattaaatctgccatcaaacaacagatttatggtaaaataaatttatctgtcacaacataaaacaagtctgtcataacacaaaacattatattttagaaaataaatcagttgctgtcaaaaaaaagaaaataaatcagccatcaaacgacagatattttataaaagtacaaaaatctgttataacataaaataagtctatcataacattaaaaaa

SEQ ID NO: 18431 - DNA, 852 bp, Arabidopsis thaliana landsberg
accaaaaatatattttgttacaataataaagagattgttagataaattgtaatatttcacaatctctttgattgttttttttttttttttctggttatcatcatgttgatgtgctaattgtgttatatgttacttgggagcaacctaatattttatcaaatgctttttaaagacctctatagtattcatgttttctctgacttaagctggcaaaaacatatttcaagtgaaaagttgcttttcgtgtagaaaattggattatccaaaacgctaatgtgttcaacatacttgaaaagagtggtttatgtgctgcaatcatcgaaagttttagggtcttatgtaaaacatttaatcctatatatcaatttaagaggagtttccaaccaatatagttcacctaaatccaactgtaaaattcgaaaccgaaactaatctatatatatatataccaaaaaaatgaagctaaaactaccaaaaagattggccatggaagagcaagtcttgggacaaagccacgactgtgaaaccggttgttggaaatgagtcaactcttgtttgttctatgtcctatagcttctctggagaatcaggatctctgcttttatatgagattagtagtcctaatgtgtcagttttgataatttataaatttcatttgtaagtcttttgtgttttgattgtcaggagaagtgtaagaacacagactatgttcagataactatcgagtcatacacacgtatgagtaaaatagaggatcaggccaaattatttgaagttgaagttaaatcttaaagaaagactcaatcatgcttactctgagtttacgactaaagaatcaaagattctttaaca

SEQ ID NO: 18432 - DNA, 1794 bp, Arabidopsis thaliana landsberg
atcccttccctttttcaatccatgttccgtttatacaccttaagcaaaagtacagtaaatttaggtcaagctcactaaatgttcagctcaatgatagagagaacccaatactcctaataacattttattttcaatgtcaaacaggttgtttcattattcctgctggggtcatactacctctttttcagcgcctcaccagttgttgctgtagttgcactgctgctttatgtgggctgttaccaggtaaacaaatagttgattagaattttgctaatcaaacttcactaccacaatgtcaatgcttgtcctaaaagtatcatagactttttgatataactcgtggcatctaaagttggagttcttataacaagtagttccattggagtttatgtacaaaagtgattcatggatttcattattttcgccttaaaacttttgatatgcttctagttctttttttcaacatgtttggctttctacttttcaataagagcttgaacgtattaccatcaatcttgcagctatcttttggtccaattggttggctgatgatttcagagatatttccccttaaactaagaggtcgaggtctcagtctagcagtgcttgtgaattttggtgcaaacgcacttgtgacatttgcgttttcacccctaaaggtaacctaccattcccttgaggacaaaaattctcgtttgtttaagcttggtatggccattactgtagaaatggtagcaacccttttgcaagacttttttactttagaagaaattgtcaatcatatggttagtcgtggtgaaattctagtcgaatgatatcgacacccacagttagagtagtttttcttctgatatctaactggaacttttcgtttggctcaaatggctctgttttgcaggaactgctgggagctgggatactgttttgtgggtttggtgtgatatgtgtattgtctctggtattcatattcttcattgtgccagagacaaagggtctcactcttgaggaaattgaagccaaatgtctctaaaaaagaggtctgttctttgcttagaaaccacaaagtcgtgtgcttcctcacatgattttgattcatattgttaatcagtgaggaaaataatagtgcaggttcagaaacaaataaacatatgaatctgccgcacaagacgggaaatgaatcttcagagaccactaagttatttgaagcaatgttacttcaaaggctcggttgtttctagcaaaatacatgtacgagaattcataaatacagaaatctttgtaatgattattagcgctctgatgaagttagaaaataaaaaaagaaaacatcatagaagaattcaaatttgtagaatatgtcctaaccagtgatgtttcgaaatccgaaggtttctcaaagtttgtattttttttaaacgattccacgattctgcaatgctgcattatgatatagaacattatgctgaatagaagatatttttcgggatttgtaagacttgatgtgatatagtccaatggaacattgtggtcaaatacagtcactatcctcatttattggtcacctaaatcaccgggagaatttcaaaacagtccaaacgcaaaaggttgagtttgactctgtgtaaaatgtgacgaaaggagaaaaaaaagaaatgaaaatttgaaagtgtcgacagaaaaaaaaaacgcttgaaagagaaagtatcagaaatgtgaaccatgccatgagtcataaacataagccgtgacgtaaactagaaacagctacgagacgagagagaccaccactataat

SEQ ID NO: 18433 - DNA, 2247 bp, Arabidopsis thaliana landsberg
  unsure (1)..(2247): unsure at all n locations
agctaatcataatggcaatttgcatttaaatttatgcattttttactttagatcgacccttgtctgatttaaatttatgactattatttgtttaccttaagacatatcctaaaagaatacttaatttataaggatacaacttgtatacaacagagaagcaaagaatggggcatgaagtatttttttcactctttctgtataccttttaagctcaggcttgtctggtaaaaatggcactcaattgatctcctgggatgaatgttaaaaggagaatcacaaagcagagagttcgacttcttgagtggaaggtcgataagctacgaatgtgctatcagttgagaaagagcctggattgaaacatgttgttcccccaaatttgcaaacctcttgctcactcttgtcacctaatactatctgttttgaaacaacaacaatacttagttataaggcgggtttcgtgcaggatttgatatagaaataagaagatttatgaataccgtatgaggagttgggtacagtcgaagagcgtgatcgtagttccaaatgatgggttgcaccatgagaggtagaggacatagatggctctgatgagttattgtgtagacaagctgtaacaacacgtttcaggagtttccatcatttaccaggaaaacttttaaatcatacgtaagaaaataacagagacgagagatgtgtttacatgcttaaaagggtcattcgtttcttctgaggaaggggttactaagcatgaacgacgcatccgatacagaagatcttgtcggaagaacacaatctcttggttatagaactttactctgcattttacaaagacaagattatgtgtggccaatgttcacaattcanaagaaaaagaaaaaaaaactaatgatgagcaatagagagttcacacatcgtatagaaaactcacctgcaaggattgcttgaaaatattgcattggtaataacatctcgaagctcttcggttaaatactctggtaaaccgcatcttggcaagactgtcgagagacctgtcacagataatgagtttttattagtcatgtctcctcatggaccctggctttatttattggatagtgaaggagattgtacatgcgtcatggactcatatttgctattagccgtggatgatttccaatcattcttccaagtttatcaaactgctgcctgaaaaatgaatggatgcatgtactcaacaattatataagattaaagttttgatgacaatcgaggagattctaagcacattaatgatcccttaccaaatgcttgaataagagccaaaagataagttgcatgggcgagaacaaaagtttcccatgaaaagaaacaaagagggcactatctttacattttcaaaaccatcaataacgtttccagcttcccaagaaccttcattatggacaacacattttggccaatcaagcaatgttctctaagcacaaagattgaagctaaaatacagtaaattagtactccaaatcacctcttcaccatccagccatatgtcagacaatatgacaaaggtgtcgttcaccacttgtttttccaagtctgcaagtctaatctgcggtcagacgcaaaaagactctgctgtgaatttcctaggtaaggagtcggacttgacatttacaactttctcaaccaagaagaacaaacgacgactcagggattaccatctcgtcttttgttggcgagccacatccgaaaaagtcgttttcagaatgtatcttttatccctgttctctaaaggagggaatccgcatgcaatcacctttaccaaaagtgtattttacaatgaacaacaatcgattgaaaactgtacaacctatgaatgtgccacccttgacagctctattttacctgaaagataccgttatgcatttcaccttgtgccaaaactatagtattctctgtgaaaaaccctgtggttatctgtcttgtagtaattgtcaaagaaaagtagtcatagcacaaataactcaaaatgcaattagttgctctgcctttataaatgtacgaaactataaatactttgtgtaaatgcagtttttggtaccaaagggatatttagacaaatcaatgatttaaatccttgcaaaacctctgtttcaggtagagatactagacagtaagcttaaaaacattatgctctgcatcccaattgctaaaaattgacaccatcagaataaaacctaaggcacactcaaatcaggaaagtaacagaga

SEQ ID NO: 18434 - DNA, 1418 bp, Arabidopsis thaliana landsberg
gaaactgggaacattaatcatgagtgtactacttacaagtgggcttttgtccatttctatgaagacttgttccatatcctcgtacacttgagaggacgttgctttctgtctgatgctttctttggctgtcatcaccatcttcctccgcattaactgtatagaaccaccaagtttcatctagaccgcttaacctgaatattcagtgttgattaactgagtattaattagacctgtcgtttgaaaacagctaggcttttggtatgcataggagactgcgggaggactccgttggaaggcggtagaccgagcattccacagatcaatacctgaaaaaaaaaacacagtttggagattttaacagagaattaatgttagcttgcagaggaagaaacagagtttgattgattaccatgaaacctaacaagagaatgtcgtagtgatatgcagaagggttcttgaggttaaactccttctgctgcgcgagctgcgagacaacgctgtggtcaaagaagtagaggcctgcgatcatcaatgcgggtataaacgctgcaaatatgtaaccgggagagactttacccatgtcctgtacagaaaaaagacggatcctaaagaggtttggattgtaaaccaaaatcttaaatgtacttgtgttttgtaaccttgatgacagtccaatgtgttaaagaaacagagtccggtggaagaggactaacgagtcttctcgggacaccagagggtagttttgatggcgtactgaaagacaatgctgtccaaaccacaaccatcaacggaactccgtagtctgcaacgaagcttcggcaacatcctttacaaagaatcataatattaaggccttgtagttgtttttaaacagaaattaccactaagcatgagaaaataaatcactcttacctgttccgtatggccaagaccttgcttttctgctcttcaaagcggtgtagacaagaccgactgtgaaaataaggccaagaagtccgtttgtgtagagccactcaaactgatacttttcaagttttgagtcttcaccttttggaatcctaaattcactcaccattccctaccaatatcatttgaaacatataaaagatcttttgacctatcatcagaagtgagaggtggctttgttgagccttttggtattgatacctttatggtttgttggagaaatagaacagcgatcaacataccaaacagctcaccagcgatcctcgtgaaccggttgatgatataagccatgttgaatatcgccattaggaatagtaacaaagccgtccacacacaaacccttcaataaaaaacaagcaagaccataactcttacaggaaaacatttacaagaacaaacgatttagagttttggagtaatcaccaagccacccaagctaagtagagttgttt

SEQ ID NO: 18435 - DNA, 846 bp, Arabidopsis thaliana landsberg
ctaaaaacattgaaattgccttagaagatgaattctggtaccaagcttgccatgaagaacttaatcatttcagtcgtcatgaagtatgggatttagttccaagactggttcatgtcaatgtggttggtactaaatggatttttaagaataaaactgatgaagaaggcaatgtgacacgtatcagagctcgactggttgctcagggatactctcaggttgaaggaattgattttgatgagacttttgctccggtagctcggctggaatctattcgtcttcttcttggaatattgtgcttgctgaaaatcaaactgtttcagatggatgtcaagagtgcttttctgaatggagttattcaagaagaagtgtttgtgtctcaacttaaaggccttgaagattcaaactttccagatcatgtgtacaagcttaaaaaggctctttataggttgaagcaagcacccatggcttggtatgagcgtctcactctgttcctaatagaaaaaaagtttcaaacgtggaagtgtggacaagactttgttcatccttgttgatgaaaaggacatcctcattgtgcaaatttatgtggatgatattgtgttttgaagcacacaacagaaacttgtctctgactttgtggaatccatgaccaaagagtttgagatgagcatggttggagagatgaaccacttcctgggtctacagattaaacagactgatgaaagagttcatatctctcagtctatgtatgcccacagggttgatttagagatttgggatgcagacagctaagacctcaaaactcctatgagtgctactgctaaactgtctgcggatgaaactagtcta

SEQ ID NO: 18436 - DNA, 3008 bp, Arabidopsis thaliana landsberg
tcgcgcgtgagatctactcccacgctcgtcactgggtcttgagatcctcttgaacggttcggtaaccatggaggcgaagaaccgatcgtcctcatccaccatctccactatgcaatgtttgcgcttcttgtccttatgtgttttggagataagcttgatgagaagcaaatcaaagaagtggagttcattcaaagactacagctccttagcttgaccaaatttaacatcttcaacatctggcctaagttcaccaaactgattctacgaaagaggtggcaagaatttctccagattcggagacagcagcgggacattttgcttcccctgattcgtgcccggaggaagatcattgaagagagaaagagatcggaggaagaagacaagaaagactatgtgcaatcatatgttgatactctactcgatctagagcttccagaggaaaataggaagttgaacgaggaagatattatgaacttgtgctcggagtttctcacggccgggactgacacgacggccacggcgctgcaatggatcatggccaacctagtgaaatatccagaaatccaggagagattacacgaggagatcaagagcgtggttggggaagaagcaaaggaggtggaggaagaagatgtggagaagatgccgtatctaaaggcagtggtgttagagggactccggagacaccctccaggacactttttactcccacacagtgtcacggaggacactgtgttaggaggatacaaagtaccgaagaacgggacgatcaacttcatggtgccggagatagggagggatccaaaggtgtggcaaataccaatggcgtttaagccagagaggtttatgggagaagaagaagcggtggacataaccggaagcagagggataaagatgatgccgttcggagcgggtagaaggatatgtcccgggattgggctagcgatgctgcacctcgagtattatgtggcgaatatggtgagggaattccaatggaaagaggtcgaaggtcatgaagttgacttgactgagaaggtcgagtttaccgtaatcatgaaacatccgcttaaggctattgctgttcctaggagaagtcactagttacttcttttcttcggtttaatattcaaaatgcgtgcacttggtttggtggagacgtggtgtcaactacggaactagctaatttttagttatgtacattctttttttgtgcgaaagttatgtacattctatacgttggaataaatgataaagaaattgttgaccgtatgtattcaagtgtatgttggccatagccacgttaagatacaaaagcgttttgggaatctagttcagatttgtttacttaatggtgatttttcctagagaatagtttcgagtggtctgctacaggctttcttccctagtttctcgcttgctagtattcttcaatttttttatttaaaaattgtttatttagcccagttttcaagaattattctctatgaagttgcatttgtaaacatatgaaagtgagtttttagttaatgctcgggtaaaagaaatccagtattttttttagagaaaagtacttatcccctaagttattgacatcttcgaagatttttgaaaacttctcaatcttaaagttttcacaaaaacaatacttcagttttgggtcaaaatcttcgtatgtctttcaaggaaatacattatcttgaactcatatagaaaatatagaaatgataataaagaaaagaatcataaatcttaataacatacgtaattgatgatgtcataaaaattccatgatagctgttgtttgtactctagtaatgtaagcttaaaaagaaggtaaaagatcgcacatatttgttcaacttaattttccccaaatttcaaaaataattttttactccaaaaaaactaaaaaatagatattggtagatgtgcggattatatgatatatatatattagaaacaaaataaaatattatggtaaattaaatattattataatcttttaaaatgaaatctgatatactatgaaaataatatttaaaattaagttttcatatatctttcttatgtatcatatgtcataaagaaaaaaatatataccgtatagaaattccaaaattttattatccagatccaatgacagtttttcggatatccaaatttttggtaagaaatcagaatagattttggattgaatcctacttctagataataataataatactgcctaattataaaattaatttatggttgaataacagtctctgataataaattgttacacgtttgttgacgatcataataataaagccacacccgtgtattatataaactcgaataagaaggaagaagacgtaaagaacaaaccagtgaaggaaactaaaaaaaatggagatatggttacttatcttgggctcgctcttcctctctctccttctcaatcacctcctctttcgccgccgtgactccttctcctctcttccattaccacctgaccctaactttttccctttcattggaaccctcaaatggctccggaaaggtttaggtggtctcgacaactacctccgctccgtccaccaccatctcggtctcatcatcaccctccgtatcacttcccgccccgccatcttcgtcaccgatcgttctcttgctcaccaggctctcgttttgaacggtgccgttttcgccgatcgtccaccggcggaatcgattagtaagattatttcgagtaaccaacataacatcagctcttgtttatatggagctacgtggcgtcttcttcgtcggaatctcacttctgagattctgcacccttcccgcgtgagatcttactctcatgcgcggcgttgggttcttgagattctttttgatcgatttggtaaaaacagaggagaagaaccgattgtcgttgcccatcatcttcactatgcgatgttagcgcttacatgttctcatgtgttttggagataagcttgacgagaagcaaacaaaacaagtggaatatg

SEQ ID NO: 18437 - DNA, 715 bp, Arabidopsis thaliana landsberg
cacactctgtgccaacgtttacaaagtattgctctttccatctctgcaccaccagaaaaatgaatcagagttgcttgaatattggaatacttgagagaaaatgatgattggattcgataggaaaaactgagagttataccataaatatataagggtaattgttaagatccaattgcctgccaccatcagactcaacttgtccctgcaggattaagtccagaacgttgcttaggagatattactgactatacaagcaatgttactcagagtgttacctgaagaggtgaaaaagatggaaactttgaccaatgtctcatatcatcttccctcctgtgacaaacaaactttcaaaaatttattcacgataagaaatcatcagtttcaaaccttcaagaaaataggtattgagacatacgtggcttcccattttccggtgtaaaaggtataattctttccatcaactatttccccttcccagaatgttatgacctgacactcacagaatcaagaatcgtttcccgcattagaattttaagggcaagcaaatatgaagaaaaaaatgagtaagagtgtaagggcttacaggagtgtctgccatgggaacgtttagagcttccatggtgccacaaagataaccatgttcaaggtcaataccctgtatctggacgttaactctccaagcttcctccttctgttgattagagacattttgcgt

SEQ ID NO: 18438 - DNA, 1418 bp, Arabidopsis thaliana landsberg
ctcatctgcctcaaatctcagggtgcactttttttttgaattgcattttctaacatcatcaattttttggtttctgaaaactatgcaggttttgctttatcactaataacataggacacgtttgtgtacaaaagattcagcatttgatggttttcctttgcaaagactacttggtggggtgtataaaaagggctttctattaacattgttacttaagcttgaagttagtaataagtttaagaagaagatcatgtaattttcagtgtgtgattttgtctcttttctcttgtgttttagttatcttttttacttgttacaattgttactttttttttttccggatataagtggtttggatagtgccgaaggctaaggatagagtcaaagtaaggaatcgaaaagaaaccagaaacttgcatataaagcaagtgtcattctaaagaacacaagaacaaaaaaaacaaaacgaagaaatttcttaagtaaaagagatctgactctcaacgtgattcgggaaaacatggaccgtgtaaccatgttcattactgagcacaaactcgtcgtcagtgaaccctttaagctcgaaccttctagaagtgtttctcaccggatcataaaagaaaatcttagccgatttatgaaacatggattctacataaataatctcaccagcatgagtgaaaccttttagtaggaacttattagtactcaaactcttatatatgtgaacaagaggtgcaagaaagtctttactcgaccacttgttgtgtttctccaaaatccacaatctaataccattcttctctattatttctctaccaacgcaagctaacctcccattataatctatcagcacatccttgtgaacatccgatgatggtaactcgatcatatcgaatatttcagatctgacatcaaagctcattagaacccacacacacatatccttgacataggctatatgatatacaacaccgttgatgcatctcccagaatcataatagtcagaacgatgcttattatgagttttgaccgttctccataatttttgagctgatcctaaggttaatactcgacacgtatcataagttgctgaaaactccatgcacattactttgtgtttaccttccactggatcgtatcctaaaaagattgttagatcattcgagttcccattgggttttggtaaaattaacaactgtcgcgactagggttccaaacaatcagcctagctgattcttgaaagcagatcaagccattgacagattccgaaggggggaagtaattcatttcttctgagaattccatatgataacgatcaataagctgagaataagagtgagacttgttccaagtctcaaacgtctgacgatgttgcgggatcgaggaaacataatacttttcatttgctttgaagc

SEQ ID NO: 18439 - DNA, 632 bp, Arabidopsis thaliana landsberg
  unsure (1)..(632): unsure at all n locations
gcgatgtcgaagacaacacagaaaaaattaccaaggaaattctagaaggcttgtctgaggatactggtgacagtgacagttatgatgtggacagcggtagtgaagactccgaagatcgtccctggcgaccaagccattcagtttatggtaaatcaacaatcaaagagaatcatcttgtcaacatgagaggaaggtatttccgggatttgtccattgtgagggccgacgaaggggagaagacttgtccacaccctgaagaaaatgaagtcgtagtgtaccgaagctttttgaaagctgggctacgatttcccttgagtagcttcgtcgtggaggtgttgaaaatcttcgaagtctatcttcatcaacttactcctgaggcaattataaggctgaatatcttcgtgtgggccgctagaagccaaggtctgaannnnnnnnnnnnnnnnnnnnnnnnnnnnnnnnnnttatcatatgaaacgaaaccttggggcaaagaacagtaccataataattttggctgctacagttttgtntccggtcaggggcaagctgtcccatacaacctttcggaagagatggccggcgactggatgcagaatggtctatgtgaagaatgctatcagtcgagagat

SEQ ID NO: 18440 - DNA, 1331 bp, Arabidopsis thaliana landsberg
ttgagctcgttttgaacgatcggaaagtcggaggtgtgaagcagatcgagctcgcgttctcattccttcttcgccattgagaatgagaatcgaaccgatgagagaaagagaagaatgcggaagaattcgatcgagagatgaccggagaagagaagatcgcacaccgtacaagtcaccggagaaagtttgttacagagtggctctgataccatattagagaaataatctgaatgaattaatcttctcattaatcataaaatgatacaaaagtgtttatatacataagactaaaccaaagtaaaccactaatataattacagtaaaccggataaaagaaaccggattacataatctaaaacagaatgcccacccattctctatatttaaattgcttaaataagaagagagacagtttaggttcaaaattcggtaagctatcccaaatagaagcttttatttcttacatgtgtttcatagttgtgacaatatttcaatttggtactttcgcttcggttattgcccatgattatgtcttcgcgtagtattcgagaactatatgattcacgtcttgattttacaaatacattaaggtttccaagtatcttgaattttttggtattcttgaaaagattcatatgaaataaatgttccagcaaaaaagggaaataagttgtgctaaaaccgattgaagaattatgtgatggcagaatatgcacaaaatcatactcataaatactctcttcacctaaaactctttctacataactagtaatgttaatatgggcatgtccaccccatttaggtccgtcccatttaaagcctgacccatttaaaatccaccctatttaaacccatttaacttgaaggtctattagggttgcccatttaaactcatataccaatttagacccatgtattcattctcaaaaaatcaaaatagagagctactcctgttgttcttatagcacctttgatctcattgaatgacttaagcgacattaactttttgtgtgagacttatttttgcataaaacatacatacataaataggctaacaggcccccacgtcttaaatgggtcttatttgggtttcttttatttcactatttgaactaaatgagtttaaatgggcatttattctgatttaaatgtccagttaaaacccaaattaacatcactatacataaccaaagcaattaatttacaaaatacactaaacaaaagacgtcaaagtaatgatcccattatctgttatttcatatttcgatatttggtatgatgtaatcaaaatactaactccagtttaatcaagctaattttaattagtaggg

SEQ ID NO: 18441 - DNA, 695 bp, Arabidopsis thaliana landsberg
aaagagctaacatccctggcagtaattaagagaaatgatattctcagcttttgattgtcgtcaacgatatttgtgtcgttacacaactcaaaattaaggaagatatttgttgatttaattaataacttaaatcaaatttttttaggaaaattagaattagaagctcatgtcccaaatctcaaatcccacatacagcctatgtgtaattggatttctcttctaatttccaaagtaaggtttttgactttaagtcaaaattccaaactctccaaggttggaaataaatttctcatttaaacaaactccgtttttaacatttaaatacatcactacgtagtgctcacaacaacaatttcattgggcctaagaagtgatcattccgatgaacgtcttcaccggaaaatctatcgtaacaatggtcaaaaactattttgtcaagaacaaattccaatcatcgaaccgttggactcatataggtggagtattggaaatgtgaaaaaaaaagaaaaaggtaaaaagaaaattaaaagagaaaaattctttgtaagcatggtcaaaaaatgctttaaccaaactaaatctagaataaacaaaatacccgatatccgaacaaattctaaacagtgaagccaaatccaaaaaaaatagttttagaccaaaatattcaaaagctttttataaatagttgtcaaaaa

SEQ ID NO: 18442 - DNA, 511 bp, Arabidopsis thaliana landsberg
gtcgatccggacactactggtcagaggttcgaaggctggcccctcggagtggttcgacagccgcctcaagccactcgggctccgcgcccactactgatcaggggttcgtaggctggcccccgaaggttacgacagccgcctcagagcacgcagagcgagggatgactctgggtacgtccgatacatggccgaggctcgagctacgctcccgaggtaccctaggacatttccgagaccagcaggagcgattctgtaacggaatcccattagagggaggcatcgagccctcgaaccctatcaaacgggaccgggtccggcaaatcacctgcaggtacttttggagcgtgcctctgggccactagccgacccttatcgaacgaggcacaggcgtccactcggatcacccgctagcaactcactggagacaccatgttcggcgccctccgagggcaacatggcgctttcccccctccttgcggaaaggcgagcaggggcgtatgaaaaaagccga

SEQ ID NO: 18443 - DNA, 678 bp, Arabidopsis thaliana landsberg
  unsure (1)..(678): unsure at all n locations
tttctttcactgtttcttgtaacctgtcttttatctctttttttttttcgacatcatcatactgggtttggcgttttgttatcgaaaaacttttggaatttagaaaaaatagaagactctttttaatttttcaagatataatgttcatgttcaaaaagagtggttattgctacagtgagattacattatttcatcagaatttcaaactgttattatttatttattaacacaaaaaattaatatttgttattgtttatttattaacacaaaaaattaattatttattaatatatataatctataatccgtaccacaaatagtttttttcaccaatcaaacattattatataccgcttattttgtacaaaccgcacttgtcccgtaaatatatttctcccacacgtaccgcagttgaaccgtaccgcactacaataacgtttttcctgcataacaaaaatcgcggttaccattccaacccgtagtattcatagcattggtacattttaaaggatattcattgtccacacggaaaaggtaattcatttgtccgcctaagtaaaaattgggctccaataaaatcttttaatacattaaaaatatttaccaatgaagtttaggtctagttntctttagatttcactcacctgttcgtcttcttcctccaactcaattggttta

SEQ ID NO: 18444 - DNA, 1162 bp, Arabidopsis thaliana landsberg
ggtgaccaacgtgctaaagacatattgacgcttatgactacgtatgccttctttcatcataattattagtttgatctgttatttccttctcatatacgttaatgaagcttgatttttcactgtggcaggtacccatctttacgtgttgcttatatcgatgaggttgagcaaacacatatatatagtaaggggacaagtgaaaaattttattactcagctcttgtcaaagctgctccacaaacctattctaccgattcctctgattctggtcatatgctagaccaggtatagatattacaagatcgaaactgcgaaaactcactacaacatcttaaactttggtgctcaatattcatgacccaattgcttgtgtattgagcttcctaaaatctattctttttttttgtgtccttcttctcacagtgatatacattttcaaaaaatcccactcaatcatcctctcagttattttactttatatatctttctccaggtcatttatcagattaaactaccaggacctcctataataggagaaggaaaaccggaaaatcagaacaatgctatcatttttacacgcggagaagcgttgcagacaatagacatgaaccaggtgcgtcaactaattttatttttatcagcagagcctagtgaattgtgaatctcaatatgctttatagtataatctagcaaaatttctcttcatatcaaaatctgaagatctaaaaaattcaataaacaggattattacatagaggaagctttcaaaatgaggaacttgctacaagaatttcttgaaaagaatggaggcgtgagatatcctacgatacttggactaagagagcatattttcacacgaaggtatcacgaaaaaacatttctaaatatactttcttaactatgctatacaatcgagaacccttgaggtactgtgtatatatataataagaaaagataggtattatgatatatttaattaagccctttctatgaatctattttgtttaaacacttcttctttttagatatcagttttggtcctcgcacacaaagcgatctcctatttctctcgtttcttgtggcagtgtttctcgtctagcatggtttatgtcaaatcaggagcatagctttgtactattgggcagagggtgctagctaatcc

SEQ ID NO: 18445 - DNA, 1005 bp, Arabidopsis thaliana landsberg
  unsure (1)..(1005): unsure at all n locations
tacagtattatgggtaaatacatcgaaaatatgctcagaatccaccagaaatcgacgttttccaggatttttggactctgcgtgaacaatttctctacccaacttctgtagcaaattgtgcatctctatagtttcatatggtgatgttataccaatgagggacttatcagccaacactgtaagcctaacgctaagcctatcttcgagcaagtctttgacgtaactgacttcaaaaccattgaataaacatgcacatgcgatgtaaaggaacatatcttgatctttttgatctaatctatcgtagctgactcttaatattttctcaatatctccgttcacaccattttggaacctaggcatcatctccatccactctttgttttcttttcctcgaaagacgaaccaaggacacttagacccaaaggtagattaccggcaagctcggccacttcaaatgctagtgcctaagaatcatcaggtgggtagtcttgctcaaaagcagatcggcataacatcttaagagcaagatctagagatgggaacttcacctcatataaaaggtcaatatcatgagccttaagaagttgcatatcttgagtgatcacaataattctgcttccaggtccaaaccatttagtttcccccaccaaggtcttaagaaactctggatcatccacatcatcaagaacgataagaactttcttctgatttaacatttgctccactacacctaacttccctcctatctttatatccttaccaagaatttttgacagaaatatttcttcccattcagacttcatgctatagacgtgaggtacgaaagcgtgaaagtggaattggcaaaagagttgactgtatagagcttttcctatggtactcttaccaatccctgaaggccctcaaatcccaaccattctagcttncttggattccaagcacaatattgaattcattgcctctaaatgagcttcaattccgacgaaatcgccaaaagaattcgat

SEQ ID NO: 18446 - DNA, 1010 bp, Arabidopsis thaliana landsberg
taattgatgcatctattaatatttggtaactgttctttttaaaatgattcaaaatttacatcaatataaactgatactaataaagattaagcatcaattataaaaagtgatgtaaatgtttacttaatttgctaaagtcccacattgctcccacaaaaaaaaagatgatccatagttttcttacatatgtgaccttggttttttggtggtgtaaaaaagtgtaaagcttaatagccatctttacacgaaataaaggaatactttggatagcttgggagaaattacaatattcaaaacaagaaggcggattggggttccgtgaccttgagaaattcaacgatgctctctttgccaaacaagcgtggcggatcattcgctatcctgattctctctttgctcgccttatgaaagcacgatactttaatgatgagtcaatcatagatgcaaaaccaaagaagtatcaatcttatggatggtcatcaatcataaaagggttggacgttattaaaaaacagaacccgctaccaagtaggtactggcacgtcaataaacataatgaaaactaatttagctcccactcacccacctcggtctttaaatcttgtgactccaatccaagacttatatctctgtgatctcatgtcaactattggctcctagcgctactggaataacttcatgctcactaacattgaaaatgttgatcgtcacatgctccttaaaacatacctttcgagaaatgtttcttcagacaagatcatttggccataccactattctggagagtatacagtgcgttcgggatatcgacttttgacccgtgatccgactcaaattcagctgaattcaccacctcctcatggctagattcctatgaaaacgccatttggaaattaccaatattgccaaaaattgaacatttccttttggcgtgttttatcacgagcgcttggtactatgactcgtttgaacactagaggtatgaacctataccccacttgtaacacccc

SEQ ID NO: 18447 - DNA, 430 bp, Arabidopsis thaliana landsberg
ctaaacttaggtacaagcaacaccggaacagcacatggactcatactttcacgaatatggcctctctccatcagtttattcacttgattttctagttacttggtctccacgggattggtcttataagctcctggaacaaagtcaatttggtgctcaatgcctctaatgggtggtaaaccttctgaattttcctcgggaaaaacatctggatagtcctgcaaaagaaacttaatactactcggcaaaaccggttccaaagctgttatgttcaataagttttccttaaagataaacaagagattatgtttagtactccccattggtttactctttgaaggctcttttacacatacttttatcaccattctgaatctagtttcatccatctttcattgcattcaccataatttttgtacatttttgcatcttt

SEQ ID NO: 18448 - DNA, 477 bp, Arabidopsis thaliana landsberg
  unsure (1)..(477): unsure at all n locations
atttttcgtcaatctcttaacaaattctttcgatttctccaaccctatcaactttggatacgttagctttccggcgagctgatctttcccggcggtttttcccaattcctccgacgacttcgtctcgtccaaaatatcatccaccacctgaaacaacaatccaatgcaccttgcaaactttctcacactttcaatctcttcatcagatccaccaccaattatggcgccaagaaccgcggcagtttccaacaaaaccgcggttttatgaacatggataaactccaaatgctctaatccgacctcgtttaagtccaaaccttcactgcttatatccatcgcttgtcccgcgactaaacctcttgtcccaatagacctagccaattctctcaccgcccaaaccattctctccgaggatatnttcgcggtggcatgtgctcaaggcagagacagagagcccaccagagagatggcactcct

SEQ ID NO: 18449 - DNA, 889 bp, Arabidopsis thaliana landsberg
ttcttgcagtcccgttgtacagcattttatttatactatatggtctattcatatatggccaagcaatttcttctctatgtcatttaaataaacttttccaaggatgttttgttccatattgtttggtttcagaggctcaaagacttattgactttcttgagcttaaaccttagcaaaccaagactgaagtagtttgatgcaaaacagagtccaacacatggaaatgaaacataatatatgcagagaaaagaacagagactttgataggagaaaggtgagaaaggaagagagaacacacataatatttatgctaagtctgggccgagtcacatctcggaatccactagaataagcaagttacaagagggaattccacagagaaagagtctcacacttgagatctcttctctgttacactctcaagagaaaaaccaaagattacacctttttaatggctatctctctctcttgcttgctttctacattgtatctctctcttgctcatttccctttgccacgttcacagcatagcttcatcttatatatacatgtgagaacaccttagatctagtgcttctccaaaacgctccactttgaattcacataaagacaaattgtcctttcttggcgcaaaagcatgactcaaccatagtttgtttacacttaactatagtttcattttcttcgcatataaaatccacacatatgaatatgatataagaaatggagatgaaagaagaagctccacaacattcatataaagtcagaaaatgtcagccaaaacattcttttattcacagagagatgatgtcgtttggtagaaactgttatacacaaaaataaagtttaagtcatttacagagaaagcttatatccatgttatcgacga

SEQ ID NO: 18450 - DNA, 1461 bp, Arabidopsis thaliana landsberg
ggaagataaatgtgcatcaaaactctgatttgtgtgtaagattccataatcaggtttcatctcccatgggatataaaggaatttgtgaacgtcaatgtagcaaatgaattcacatcaagtagtatttccattgatgtctcaggacgtcctttcaatatctcatctcttactacatcaaaaagattttctggaagctgcacaacaccattcaatatctgcataaccacactcatatccggtcttattgactcagattgatgtgaacacaacacacctagcttcaaaaccagctcaatctctcccctgttttgttcttgacgtatacattcctctgccgcatcgaaaatgttctcattttcccaaagctctaagatccaatccacaagaacttcttcattttctgctgcacgtctctcaatcaatcttctaccacaaacaacttcaagcataaccaacccaaaggcgaaaacatctgtgcttgtagttgctcttcctgttcttagaaactctggtgcgatataaccgaatgttcccgctactctcgatgtctgaggatcaaatccctgatcatacagcttcgccaatccgaaatccccgagcctcgcattcatgccgtggtcgagtagaacattagccggttttatatctcgatgaacgatgacttgtacccattcttgatgcaggtgtagtagagcagttgcaacgtctttgatgatcttgaaacgttgttcccaagtaagccgttcttgattttcattcgtgttgctacgggttagacacctgtcaaggcttccattaggcataaagtcataaactaagtagagattctctttatgcttacaatatcccaaaagcctgactagatttggatgtctgagacgaccaatggtcgatatctcggctagaaactcgctcatcccttgtcttgaatcatgagaagtccgttttacagcgatctctgcatcggaacccggaagcattcctttgtagacttgaccaaagcctcctttcccaagaagttgtttctctttgaaaccctttgtggcattgaaaagctccttataagaaaacctatgaggtccacattgaatctcccattcctcaagaacctccttaaccttcttatgcctcaaatagaagacgaaaccgattcccgaggcgacaaacacagcgaacaaggctagcgttaagcagaacgtcaaaatcgtccttaacctgtcagacggtttcttcggatatggaggaagggtggggactctgccgaactctaacggttggtagactgcttcaggatatgtgtacaccagcaccatataatggagagctctaatggatcccgcagatgctgtgaagccaatatgcatgtgtttcaaaacctactgcgagagatctcggtttaaaaacaaaaaaggtttgcgtggcggaacaagaaactcagcagggggtaagtgtgcataacct

SEQ ID NO: 18451 - DNA, 1754 bp, Arabidopsis thaliana landsberg
atcatatgccaaaagcaaccatggtacataaaagcatgaactttgctccatttcgtttctgaaattgtgaaacaccaaaataaagaagtgattcaagaacacaaaaagaagtatctgctttgttctctctgtttttcttcgtcactgaaacatccttatatgaacttggagactggttaggtgaattgagatatttagtgaggagttagtggagaagcacttgtgtcccaagaacaaaaagagataattaagaagaagctacagtacaaaaaacaagtcacgagagaagagagccaataattcactacaaaaaagcaagtcacaagagagccaagaataacacgtgtcaaaagagaaaaaacactaagaagaataatacaagaaacatgttacaagagaagatagcgaagtcttagctaccaaaatcaagtcacaaaggagccaagaataattaagaagcgttacttctttgtctttttatttttccttggtcatttgctttgattctaattcactgaaaagagccaagaacacagctgactccaatgatctcattttaatcaaaaagttgagcaagcagtcgttattgatataactaatagcaataaattaaaaaccacatgagccacactatgcgataaacaccaaataacttcaagtcaatgaaattagaagaggtcaatagaatttacataagtaggcaaacaaaagaaataatcgtcattgagagaaccggagatctactgagatcgacagccgagatgattatctaaaaatatatatatcatgaaaatcgagaagggtctaaaagatcaacatattttactttaaaaaatatttatatttatatttaaaggtattatttacatttaagtttactttaatttagaaaactaggtttagtctttatttatctctatatatatcgatgtatcttgtaatattaattctatgagattttattataatttttcctaaacatttttgtgttctttactcttatcaatcgtctctagtaaaacttcctcccttgcgaccatattcattcatatggacaagcttatagaaataaatagtcaagaattgatctcaatccattgatttccttatatataaagctacaagctccttttcattcaaaaaggaagaaactacaagctcctaatttgttcctcaataaattttgtagtacacttccacatcatctttttgacatccaaacacctagtgttcatatattccttgttctccatttttttcccacagtatcttcaaaaaccgtgcatatttctttgcaacatcctcctttcataagctgatacgatcttagataatttagacaatcatacttgcaaagtcttctctcatggccttaagaaaatcacaataaaattttgttgcaaggctactaagtgctggatatggaaatgaacccacaaatgaagcaaaatatgtcaacaaagatgatggttagatggtggtcgttgattttaaattcataatgcaataaataagacattatttgcaggtatatttccaaccacaaatgcagagaacaatttatcaaaacctacctttgccagcattagagagaaagagcgatcataactccataaaatgagataattgatgagattcatgtatacatgttagcacaagcacaactgtaaggaacatgaaagtaatattttagctcatatactattggcggaaaagaatatatttatctatataaaattatggttaggaatgtt

SEQ ID NO: 18452 - DNA, 321 bp, Arabidopsis thaliana landsberg
gtggataacctcccattgaggatggtctaacatcctcgtgtttcatactaaaacttactttgctatattcagctcatccaatggggttgttttttatgatccgcgcaaccatttataccgtatacgactagtactccaccaatttatttcataattgcaaatgaaaactcgagtcaaacccaagtccaaaagggcaattcgaacttggttattgtatccaaattttgaagtcaaagccatgcatcaacttggttacagactgtatccaaattttgtttgtcacggaacgcatctttcttccttgccacggtgtatctaggc

SEQ ID NO: 18453 - DNA, 459 bp, Arabidopsis thaliana landsberg
tctcctagcctaaaaaacttttggatggtcaactagtacaccggttaatgaatggagatttatttagagtctgaatggtaactgcgttttgcggtgtggtttaaatagtaacgaaaatacataaatatatatatatatatatgtaaagattttgatatttgtgatgcggttttgagtgcggtgtatgtcaccatgcatgaccttagtctctgcaaaagatggaagacacagagaacattaaggttttgcacacaagaaaagaaaggcaaagactaatcaaaaagggaacttcgtgtgatcacagatttttaatcttttgagttattggggaagatcaccaggtggtctttattttttttgggttacgtctcaatatgtcgtaattataataaaatcaaagaggggatggaggaatcgtgttacttgagctctgaaagaaaacacatctatgtgcacatg

SEQ ID NO: 18454 - DNA, 579 bp, Arabidopsis thaliana landsberg
tgtgggaacttcctcttcatttggggcttccattcgtgcctgcacatcctcgttgtacacctcctcaaatctaaggtgaggcccttgaccaagacgcttcatccaactatcaactacaacatcgtgcttatcaacatcatcctctactcccgtgatttcagccaaaagaggtacttcttcagccttctctctaattatactctcaatgacctatggaaataatagacaatgaaatataagaaaaaaatagaatcatatttgctcaaggaataataggaaatactaacctcagttgttccgagtacatggttgattcgctcaagggtaaactctttatctcggtcctcttgaaattcaccttgcacatccttggacaaccggcatgtgcaccctctttttcttctatgaatctttccctaagtgatggaatggcttcaaatgctaaaaactacacaaaacacatgaaatttaattgttagctttaattacgaaaatgtaacaaggataaaacatgtgacttacctcaagcggcacacagaatccgggaacggccatggtgactgagtgttctggacgaca

SEQ ID NO: 18455 - DNA, 1398 bp, Arabidopsis thaliana landsberg
tactggcatgctagatgtcaattgttctctgatgtaaaggccgtaggagttatctccttgtattagagtgccttcttcctccatgaattagagttttctttttccgtaggagtcacgttgtatgactagcagagctaaatacttgaaggaaaagggaagataataaattataaagtaagatttcctcaaacaaaaaagaattactttccaaaaatacattaaaaaaatgttaattttgcaaaaggttggttattattagcataaagatctcttctattatatataggccatgacacaatcctaatcataacgctaataggcaaagaaaacactcaaagtaatttgaaaagtaaaacaccaaacctatctaatgagaaattaaacaccaactgaataataacccgcattatgtgcgggataaaaccattataaataattctgtaaaattattgggatttaatatttgtttgtataaaaaaatgtaatttatgttttcattttattttattttaattttcgaattcttttgatttagacggtttgttaaggttttctataatttagattaaatatgattggatcagagactaaaatcggaaaagaatcgaaacttttagttttatacaaatcgtttcttgtatatataatgaattttaaaattttggattatgttagacatgttatctaactacttcttcataaaattataatatactcgaaatgatgcaataagtatttatttgagattgtatatacaactttatcctttatatacaacacaaaataaagaataataactaatatgactaattataacgtgtgaacgttcataaaaagtatacaaaaaaatatattgatatatatgttccaatatatacatacacatagggctcaacatatgggtaacccattcgggttggggtttaataggtattgaatttactacccaatagggtaattctaaatatttggttttggtccgagtcaaatctaaccaggttcgggtaggtttggataaaaactttcaggccctaaaaatacccaaaaaataaaacgggtatgttatatgttgatagcgggtacccaaataataaaaccttaaaaaatcaatcaaatttaattatatttgaatatattttactaaaacttaacaaacatagcaaataatttataaatagtttagttgttttggatatttctatctaaaattaattgacatatttagatttataactaaaatcttagataaatagattatattaagattaaatataattaatatttttagattaaatttatatttggatttttggatactttgtttgggtaacgggtaatccccggaccgacccgatatccacgggtaaactactcctctatccactaagggcttgattg

SEQ ID NO: 18456 - DNA, 1470 bp, Arabidopsis thaliana landsberg
gaacctggcatgatatatgagaaatctcccacaatacaagatatatgtaatatggttccacaatcattgcacgtatagaaccattcctttgggttcacttttgtttcacatgcttcacaccaatagtcaccactcacattcttgtcaccgaaagacaaagaaagaagatgatcatcgtacctatttctcattaccttttttggaaaaacagcacagtttccatccaaaatatagtcacactcatcacaacgaaagaaaatgccgccgcgctctctacatcggctacaaggcttccagtcagatgtaaagtagtaatataaaggatgttgatggcttccatgctcaattgtatccaaaattgcagcgcatcgtacatctatagtaacataagggcctgcttcgtatctgaaaccagtgaagtgttgtttacaaagatcacacgaagcctcaactttgttgcaagaatctgtgaacaatatgaatggcttgttgttgcgcatgtgacgtttcttccgtggatggtttgcacattttttgtggagtataaaactacattggttgcaactgtagaacggttctgacaagatctggaacacacatgcttcacaaactatattttcaggttgaattcggcaatgaccatcattgttgatttgtaagttatgatcatggctgaaatgttttatcgtgttagcatcaatcatctcgtatggcgcaatttcctcttcttccggcatcccttctagctctatcatgtcccacacatcttttcttgttgcgcatagtgaatgaacaacaaaactaggacatttgaggcaagtataagccccgtagaacccatctacttttttgcggcagactttgcatttccattctccatgtccaaggcgacgggtgtaagagatgcggtgatcgtggcggttgatgtttatgacccgtggtaaatcgatacactggcgatgaatcatgaaattgcattgaagacaaaagtaaggacttcggtcacctagcgtcccgcaagcattgcaagtgaaatcaatgcgtcttggaacgagatgtagttgatgttcatgggtcgtaaggctttcaacacgaaccggtggtgcgtttttcatacatgctctacatatggtgaaattacaaacatcacaatggtgaattttgggatgttgttgatcaaactcctcctcgcaaagaagacacttgttgtcggcgtaatcgggtgcttcttcagatgtgatgtgtttgagtgtgtgttgcgggtgagaagtgtgttttgcttctggaaaaaactcagcacattctccatggaagagtgtatcacattgataacatccgtaccatcgataaccgcggaaacccgaccgccgcacgctttgcactctctatgtccctccaatcgtgccatccacgaagaatgcaagtagatgctcgtgcagattagatttttcaagaataaggagtggggca

SEQ ID NO: 18457 - DNA, 1877 bp, Arabidopsis thaliana landsberg
aaaacagtatgaaactcttgtgtactatcaaggtgtcaaggattaatggatccagatggtacagccttatcaaggactcaaggtggtatagaaccttaaccatggggtatggagaaacgccaatcaaagcggtgcctacaatgaatgtctccaaatcaaggatgaagaggactaggtgttggtggcggtggacggcggtactcggagatcccctctaataatggttttgtgttttaagaatattatgagaggcagttgagtctttatttaaagatttgatatatatacatataaaattatgtattctaagtcaaaactaatatgcatcggtaagaacaattgtacaatccttgcacaactattgatcacattattcataaactgttttacatatgcatattataacgatcatattagtcttggtagcggccataaaaactatgatgacaaaactagagttataaacagtttttcttagttttttttttttttttataattccaaaacatgctccaaattaatgtgaatgaaaaataaactaaaataaccaaaaaaatattaatacaagaattttattacttcaatgaaaatatattgaaaatagtggatgattgtatttagtttatacatcggaaaacaaaaaggagatgtgaatattttgaagcaagtttcgggaatagtaaacaaaagactagttaactacgaaaaaactgtattttgttactctttttatttctagctcaaaatatgtcaaatattttagttttcaagaattgtgtaattgtactagtagtagtcatacgtgatctatttgaggatttggactacgctaatcggcttttgtccattgatcgtaaacatttatcagttgccaatttaacattttgttatgtatatttcaactctgactatttgcacggtacttctttctacctatacaataaaacggtgcctatttcaattataactcttaacaaaattcaaattaagaacttaaactcttattataagtgtcaaaacctgcattgactaactttgacgttagtcaactgttaaaatccgctgacaaggcatgacgaatgctgatttggcatgacacgttgtcttttattaaaacgacgtcgtttaattgatttaaaaacattcaaaaaatttccaacaagactcgaacatgtgacatctacgaagaaaagaaaccgctgtaaccaatacaaaaagatctttttgattattcgtaccaacatatgtatatattcgaattattccgatatattattattggaaattatgtgatttaggcaaaacaattattagggttactaataaacaaatcatattgttagattcgccgaaaaatatattgaatttcgagcataattttttttatataataataaattaattgaattgtatatttatttcttgtttatatttgcttttgatatacataaacaacttcaacttgtataacttatatatacaaacgtattaatacatgtatatattaatatatagagaaactattacgaaatatattaatcaggaatatatcttaattaatacagatcagtttttgtaatagtttgcactaatttattaattacgaaaggtaataaacaaatttctcttttaatcaggaatatatcataattaatacacatcagtttttataatagtttgtaccaatttattaattacaaaatttattaaaggtaataaacaaatttctctttgtaaattttcagcataattcccggaagttttttttgacaaacattttttggaaggtaaccaaaaaaatggaaaatgataataaaatgatttgttgggtgtgaataattgaaaagttctcgaagcttaactggtcacagagcttg

SEQ ID NO: 18458 - DNA, 2466 bp, Arabidopsis thaliana landsberg
atagagattgagagaaggagagaggaaaaagcaacaaaaaaaaaaaaaaaaaaaaccagtatttgtcttgtattatagagttcataaatcatgatggtgataatttttatgcaagattgtgtttgtcatgaaaagtggactgttgactcgtgatgctgctaagctaatagaaaggtcaattttatactgccaataacggtactactttatttaattttcctctcatttttgtcaactactaattatagttacagctatttcataatttccttaactgaatcaaatcaattaaaaataggtataagaagtttatatgtacttgttatttacgtcgtgcatggagcatacattgacatgttcatagccaacacaaaaataattattatcaaggttattgactttttcactagttcacttattattttacccgataacacgttatttaacatgatatcacgtcaacaattacgtgtgaaaacactcacttatttatgattttgtcaccacatgttacatgtatatcatcacgtcatatacacatttagcagattcatcattacatattataaaaagcaaagatttaattcaagcagataataattataagctagagtctaaagaaacaaacttcaaagccaagctgtgaataagtttttggttcttagttcttccattcatagaaaattatataaacctaaatgaaaagtggaagcttccttgctcattggttgaccaagggttcattattaatacttctacaccaagaggtttggagttcgaatcctagatactgcgatttattaacaaatttacagattaatggaggcaagtgtgcatgagatctctaacaatgtacgattatagccgtttgaaaggattatacgcacagaagatcagtgaagctctccatcaaaaatgaagctctccatcaaaagcatggagaaggaaaaggatgcgtcgtctgtcgtgtatctaataagggtcaaaaggaattttccatagtataatcgtctatgtaacagttctcataatttataataaataataaatttagacggaaaaatttttttggctacgatgccacgtttctggaaggcattgccgttaattttgtctgaattagttgataaagcaattaacattatgtttatcattggccaactacagaaagtttaatttttattttttaagaaaatgactttcttaatagtcgaaaacttgttgaagactccttgtcccattggttgaccaattggttgattcaaaactttaattgcaaaaaacttttttcttgtgtctaatatatccattaaacacatccccaaagttaaatgtcaatggggcagagtgcaaccttgtttactcttatttacataattaatagcttaagtaacatgttggacaatttcgcttgctccataataatttctttttccttgcattttatttctcgtactttttaatgttagacaaactctttggtccgatgtggaaaaccacacaagactcaatttagtaaatgtggggtttaccaaaacaaataaatagttaaacaaagtagattgggttattagtttgggttaaagaaaagcaagaatggtttttgcatgttcctttgcattctaaatataggtagtcatgtttttcttttgtcacatttattccttaggttatattataataaaggagggatttcatgtactatgcttccttctccctttcctgtacaattagttgaaaatcacacaacagtcgctcaacaacttgtgtaacaaaagcaaaatggattaccaaacattagagattgaagacccaaatgatgttaacattcccgatgctgagaactgctttgtggagccaggttgggctgccttgttctccctcctagccatctacgctatcttattttccatcgacaattttttttcttgtaaggccaacttctcaatccaatctatatccgtctcctcctcctctactgaatcggtgtggatcgtatatttcattgggaagaaacctagctttatgtgttctatctcttatgaacgtgaatatgtgtcagccaatcttagtcccctaaaaagtgccattgtaaacgtctctcactgccaacgttccaatgcttcacggatttttccgtggttttcgcggctgagactgaggatattggaccaggcaatggaagcaacattatttcaggtgtcaacaatcttaatattacacttctcacgaagcataaacaaattgccgcgaacaacaaaccaggacatttcaatgttcagggtagaaattttaccgtagtgttctcatcggatatgaagtccggaatgatgctcggtgacaagaaaaatgaatgtcactcatcttttctaaatttggaagagccttttccttgataatttgtcttagatttttcatgttattattattaactatactacattttcaaataaatacatcccaaac

SEQ ID NO: 18459 - DNA, 491 bp, Arabidopsis thaliana landsberg
tctcgtataaggaccggtttgtcatctttgattacatgtactcataaaaagtacaaccactcgaggctgtgtgggcagccactcgatctgaactcgtacgatccaaccccagggttatgaaggctggggagcaccgggaggataaggagggggaatgatttgtccggtttggacatggcggtggcctgactccttccggtataaccgttaaggttaggacgtgcaaggaaggaaagagtttcggattcggatctcattggccatgagatcgcagagccggactagtgggtaaagtgtacccctctgcgtagagtctaaacctattcgaatagtccgtgtccactggtatggacgagtctggtatggtatgacaattagtgtttctactacaaccgggaacagggaaatgggtgtgtgtttctggaaagacagtagtacacgggagcgggaactcagtggtggtaagcaagtgtcattctattgtcttggga

SEQ ID NO: 18460 - DNA, 664 bp, Arabidopsis thaliana landsberg
gaaaacaatcgtaagtgatacaaaatagttagaagtgataaaaattagcgataagagagctgtaaaactttcgatatatctacataagatactaactactatactagtaaataactattttgaccctggtaacaaattgttttaccagatttctctcacagcggaggagttggcaccacgtcacctacgggcgacaccgaacctgtgccaaagttccgtactaaccttaaattgtcggatcttttcgctctccctggtgaagatgtcgagatgactccggagatttttggtggaatgagtaatggggaaaaagaatgtctggagaagttgagaagcaatggaacgccaatggaacgtgtcaagagcaatacaggagattcaattcttcatattgctgctaaatggggtcatctggaactagtgaaggagattatctttgaatgtccatgccttctattcgagcaaaactcaagccgtcagacaccgctacatgtggctgctcatggcggtcataccaaagttgttgaggctcttgttgcatcggtaacatctgctttagctagtctgagtactgaagagagtgagagaccgaatcccacatgtcttaaggacagagatggaatactgctctgtactacgccattgaaggacgctatttggagat

SEQ ID NO: 18461 - DNA, 779 bp, Arabidopsis thaliana landsberg
tattcgcgtaaatgccattgccacacactcactcactcgtagtttcgacgctatctctagaacattccgataaactacaaagaagaagcagagcaaaagtaaagaagaagaagaaaacaaacatgtcgtggcagacttacgtcgacgatcacttaatgtgcgatgttgcaggcaaccgcctcaccgccgccgcaattctcggccaagacggaagcgtctgggctctgagcaacaattttcctcaggttagggtttatttctataccgactactcaattcttatcatcttgctgtttctggtttggttctatgttgaaatctgcaacctttggttttgtttagctactaaaccaccaaaattcagcaattttcaatgtttggttttgattttctgattcatatgttcttgaggttatagagtgcaaaagatgcattagaagaagttcgaatcacaagtttaaagctcttttaagaagaaagttttgacctttggaaatagacaagttctttgtactggttatgttgctcataagttattaagttgctttcatgagatgtttaagagagactgaatttgtttctcttatagattttggattgttgctgttttaggcgaagcctgaggaaatttatggcatcaaagacgattttactacacctggaacacttgccccaacaggaatgttccttggtgggaacaagttcttggtaattcaaggagagcctaatgccgccatttgatgaaagaaggtaactacactgtttgaatattgattgat

SEQ ID NO: 18462 - DNA, 1249 bp, Arabidopsis thaliana landsberg
ttttcaaaaatagggataaataaacaggtggtgagttagaaaacatgtgcgaatgactgttcggtccgctaggctctcaatagattcatcaaaatggaagaagatgatgacaataagttctccaaagcctctgatggacacctccatgttgccgatgaacatgctctggtaggagttgatgatgcagatctacaaggtattagctcagttgatgcagtcctcaaggatgaccattttgaacaggtttctctaggagatcaagatagttcagcaacgagcctggattctttctaccatcaagaatctggatatcctgtggttcattccccacagaggcctaaaccaaaggctacaatgccaaacgtgtctccagagttattgcatcttgttgattcagccatcatgggtaagcctgaaagcttagacaaactcaagagtattgtcagcggtgttgagagttttggttctggagaggattcggagtctattgcttttcttgtcatcgattctcttcttgcgaccatgggtggagtagagagctttgaagaggatgaagatagcaaccctcctagtgtcatgttaaactctcgtgctgccattgttgctggcgagcttattccttgcctaccttgttctggtgacagtgtcagtttcatgtccccaaggacccgcatggtgcgaggattactagcgattttacgttcttgcacaagaaacagagctatgtgttcggtggcgggtttattatgtgttctcttgcgatcagtggaggagataatatccaaggacgccactatgatgtggaatgcagcagttttttttcactgtattcaacatttagccgggcactctcttagtgttgatgatttgtatagatggcttcatgttatcaaaaagtctcttccaacagtgtggtcaaatccattgatagatgccttggagaaggcaatgaatggaaaggaatcaagaggacctgcgtgtagctttgagtttgttggtgaaagctcaggtttacttggtccaggagaaagtcgctggccttttaccaatggctatgcatttgcgacttggatttatattgaatcatttgctgacacattagatgcttcaaccgcggcagctgcaattgctgctgcttcagcggcaaaatcaggaaaaatatctaatgcagcgcctgcgaatgtacacactggtgagggtactggtcatatgcacttgatgttcagcttttttgacccctgataatcaa

SEQ ID NO: 18463 - DNA, 686 bp, Arabidopsis thaliana landsberg
gttggacgtaagctatctcctctaggtccaaaggcggtttcttctccaccacaagtgactgttggaagctttttgctgcagaagagtccaagcagagttgggaaaagtccggtgctttcgcggtctggttctaagaaagaaggaggggaagaagggatacggatcgatcatttgcagagaatgaacactaagaacgtttcagcttggaaaatgaagaaactgatgaatgttatcaaaaaaggaactctttctactttagatgaacagatacaagacacgacgactcaggaagatgataaggccacacagataagaagtgaattcgaagcaaaacttgcagcgaggaagatttttcagaatgttgctgagcctggatccaggtatatatattataatcttatgaacaactttgatttgatgtttgttaagagatcaagatagaaacagagtatttttttccgggtcttaggtacatatatatggaagactttatgcgttttctgtccgaagatgagtctgaaagagccaatggatctatttgaaggagcttctgaatgtcacaaaatcagcaaatcttgtctgaagaattgggtggtaagtgtttgttttcagttcaaatttcaaaaactttcttacgtatgacaatgatgctacgatcttaaatctttttctaagttaatgccttt

SEQ ID NO: 18464 - DNA, 463 bp, Arabidopsis thaliana landsberg
accttcttctgtatgataacactgtattcatgactcaatactaccatcccttgcattttttgaattctccctcgatcaagtctttcagaaacttgtgagaatccgggattagtgctagagcgtcaacaagaggtatccgcaactcaacttccttgatgttcttggcaaacatagctctatacttatctgccaatgctttcttgtgacggccaggaaatggaagctgttgtttgtaaggaggaggaacaaagaccttttctttgttcttgacagtaactggttttgcagcagctgctgatgttgctgggaaggtcggtcaagtagtaggtcgagtaacgtggtcgagtgacttctcaagcggctgctcgagcggttgctcgagtgtctggtcgagcggctgctcgacttgtttgtcaactcgatctttactgagactaaaatcctccccatcttgatcttcact

SEQ ID NO: 18465 - DNA, 423 bp, Arabidopsis thaliana landsberg
  unsure (1)..(423): unsure at all n locations
agctgcgtacaaaagaggctcatgagtggtttttaaagcgccaagtccttactcttgccaacgcctctgatctcaaggcagccttgtaactggaggctcagcgtaagtggcttttgctttcctctgctgaggagagtttcttccatcaaagatccagggtttcttggtttgctgagggtgatagcaatacttcctatttccatagaatggcggattccagaaagtgttttaaccccataaagacccttgttgattgcaatgggggggtgattgactcccaacaaggtattattgatcattgtatggcctattatgagaggctgccggtgagtgttgagactcccttctcggcggagcaagatgacatgaacatgctgcttacctataggagctctcaggcgcagnctactgagatgtaaaggc

SEQ ID NO: 18466 - DNA, 342 bp, Arabidopsis thaliana landsberg
  unsure (1)..(342): unsure at all n locations
gaaacctatattaaaaatatgaaatataaatatttttttgtcattagaaatttttaattctctacgaacatatgtagaaaaaatctttagggaagacaacccaatttctttttcttcttctaaactactttattaattaacttttaaattgtagatttagtttacaagtaaaattcactagaatatataaattatatatacatttatatatatatatatatatcattattgttaaaaaaaatcgcgttaggcgttaatcgggcgctcggtatgggactagctattaatcgataaatcggattaaaatcggagattaaacgggattagtncttagggattaat

SEQ ID NO: 18467 - DNA, 1042 bp, Arabidopsis thaliana landsberg
  unsure (1)..(1042): unsure at all n locations
ttttttttttttttttcgtctgattattcatgaattatcaaggtgaatcaagaagaatttagtatatactaagtggcagatttacctcaaaactaaaaaatatgggagtaaacaaaagaacgaattaataagtaaattgattagaaataaagagaatctagaaaaaaaatctgaactaggagctaagggatcgatgcacaaannnnnnnnnnnnnnnnnnnnnnnnnnccgagtcaaaatccattgtatagctcttctttgtgctgaaagacttttttgacagattttccgacgttaaataaatagtcagaaattttcgacggcttcgtaatgatattccgacggatttctgacgacatgtttcccgtcaaaacaccgtcgaaactttcctatggattctaaatggtcgacaattcgtcagtgatttccaacgaaactccgaccaaatatttcgacggatttccgaccaaaatatatccgttttgacacctctaatattcgtcagaatatgctgtacctttccgataaaattccaacaaaatacactcggttaagtagccgcccggtcaaatagccgtgcgtatagttatttataaaaaaatcatcaaatctccgacgaaaatcagtcgaaaactcgtctgacatccgtcaaaaactcgtcggaaaaattgataattctcatctttatttcttctaccctcattgacaaaatcgtccaagcaacaaaatagaaccagagagaaatggtttcttcgaatccgtttaattatttttgatcatggatggaccagcccatgcgtgatccggtgacggagttgctaacgccagagtatacagaaggtcttaaacaattcatggcatttgcgacaaaccaaccagtaaccatcaaatcaaaacaaatgtattgtccgtgttctacataactaattttaagagttattcttgtatctcaagtttggatgcacttatatggcgatgggtttatgccggcgtacaaagctttgctcatgtatggagagaatgagtcaatcactacaagaaa

SEQ ID NO: 18468 - DNA, 1407 bp, Arabidopsis thaliana landsberg
atcacaactgcaataaccgcaataatgccaaaccctagacatacggtgaaaaccgttaagcatttcttctccatccactcaagtcttttacttacttgctcaagactctgtcttatgttttccttctctttctctgctttctccatctctgcctccactctctttcgccactctttcatctcctctgcttcactcaccatcccctcttgcctttccttcataccttccaagtcaagtctcaaagccacaatcgccttttctctcacaccggcttcacggtccatctccttgaatatgttcccgtatctcaggttcagttcctctaagtatctctctagaatcgataggttcaagtccaatgaccttaacttctgcatcagtatcttcagtactgtgtcccctggcattctgctccctggctgatgatgcctcatctcttccacgggctctgacagcttattactactcttcgccattgatgcttcagtcttcgctaacatattctctggtggggcttccttctctttctctctgtgcgtgctcttatcagcaccatcatcgccttcaagtgactctatttgctgcattggcttctccttctgctcagaatctccttctcggggtttgtatgcatttttgttgtcctggacagatatcaaatcctccagcattcgttctacggcatccacaccgtagacttctattaaactcaaggtgcagcagaattctgaaccataatgactaataaagtttagctttaagtatctcacccactttggctcaagaagtgtgaagttctgctcatgcttcacgtttgaagccgtgaagtttcccatatgaacccaggtatcagtgggataaactagggtgccttgaagctcaaactctttcagattggaagagtaatgctcaaaattcgcgatcttgatggtatttaccaaagtttcttctgaaagttctacaacaacaaatttaccttcagtagaacaaggatttctgaggtacttgtcattgtccctgcttaggatgcttgcagccccctttgcttccttgttggaagacaagacctttgcgccttttgaagcagatgcataattgtactctttccctccaggctccatcctgtgaatcacaccactgacctgatctgataacgatttgtttcgagaattggacgctctgctcttgaactcatcaaggccaagcggaaccgcacgagatggttgatcaacctttgaaacgttgatctcggtaccattccctaaaactgttttgttcatctgattttgctccaagaactcattgtcactgctttctgtatcattccctgtgcctgtcttgttcaattgactttgcttcaaaaagttattatcgtctttgccttctgatatcactacccgtacctgt

SEQ ID NO: 18469 - DNA, 358 bp, Arabidopsis thaliana landsberg
ataacagcttaaaccgcaatcgctaagactacacgcagttgctttgtcaatcgtcaaatgacttctctttccctcagctctttcaaccattaaaaaaactacaaaaatatattaaataagatgttatggtcacaaataaaaaaaaaatgtatatatgtatatatatatgataacagttttagatctttggaaaaggaaaatatatatgaaattacctgagaacacaagaatgagtacaagaatgagtacaaggaaataagaacatgataacttcgccatgatcaatattacaaaacaaaagttaccagtgtgtaaaatagaggtgtaggtgttaatccagttttttcccctttttttc

SEQ ID NO: 18470 - DNA, 243 bp, Arabidopsis thaliana landsberg
gaacaagccacggagagagaaagaacaccaaaggggaaaaaaaccataataaaagaacggccccccatcatggcgtagtacacgaatgagtcaagcaggatcctgaacggtagaaaagaagatcagacccagcgacgaaagcccggcgcatacagtagaggaacccaggctgggaagcccaccgatttcaaaaccataaccacgggcgcggaatacggcgccgagcatgagggcaagcaaaag

SEQ ID NO: 18471 - DNA, 1646 bp, Arabidopsis thaliana landsberg
atagttcccattttcttcctcttctcatctctctctgtgtttcttttgtgagagtagtaatgtcaggctcaggtaaagaagtgtatcggccccataattctggccacggttcacctattctaaattcggtctactaaacccggtcaacaatcaaaatcaattggcggttcggattctattgactatggaaagttgaaccggtttttccttaagcaaagacgtgagccggttttggaaatttctttataaagaccgatccttgaagttctctgcaaagttggagaagaagcggtactcgatgcagtcgcaaacgaaccctaatccgtcacttcccgatgatttgatattgagatgcgtcgcacgggtctcaagattgtattatccggctctctccctggtctccaagagctttcgatctctcatagcttcaccggagctttacaagacccgatcactcttggaccgcacggagagttgtctctatgtgtgcttaaagttaaatccttaagatgagaaaccgaggtggtttactcttttccgtaaacatactggaaccctaaagtcaagtgggtatgttttggctacagtcccatttccacatactcctcttgagtcatcttcttcgagcattgtgtcggtttgttctagtatctacaacattggcggatatgaattgccttcctctagcgtctagattctgtattgcacgtctaacacgtggcacgagggccctaggttgcgggtgaagctaatgtcatgtactgcttgcgttcttgatgaaaagatatatgtatcaggaagatgcaaagatggcgactccatgacgttccaagtgtttgacacaaatacacaaacttgggatcctttgtctgtcccttgcagcgagacaaaacacgactttcactacaaaatcgtaaggtttgacggaaaattgcacctggtgagctacaaaggtgtggatgcttacaattccaaggaaggtagatgggacctggttacaccaagcatagaacataataagtatttatatgattgttatcgcaatatagggaatgtttggtacactattgtaaaaggagatatctcaacgtccgtatggtggtatcacagtgaggaaagagagtggagagacttgaagggtatggtaggattacctaagttccctattgatgcttgtcttagaatggttgattatggtgggaagatggcagttttgtgggacgactatttgcctgggcgccgaaagaagatgatttggtgtgcggagattgcgcttgaaagacgcggaagtttggaaatatggggaaaagttgaatggtttgctcatgtgcttacagtccctagacaatatgaattcgtcaaggttcttgctgctactctttgatgaatgcgttacgagccttgaaactatgattttgtcccttgtttcacttctaattaattgatgtcacttattgattgataagcataattctttaccataaaagaaatccgacattacaaaaactgaatatacaatatcataataagaaatatagaatacatacataaattcttaaaactaactcacatctcacaactataagggattcgttcatacctagagaattcgagtgatcattattagcatacaaatagagcctttt

SEQ ID NO: 18472 - DNA, 1128 bp, Arabidopsis thaliana landsberg
  unsure (1)..(1128): unsure at all n locations
acatgatccgactcaatcntgtctttcttgtttccctctctagtccaagttcctaccgggcaagtagaggggacccaagacttgtcttcagcttttattttaaaggtgcatgtcaccgagaagcagctgagttgatcttggctgtcaggaaatgagactacagcacatagagctattccagaaagcctcttgtcatgccaatgtgggagaagttttcgttgcaacagagatccaaccgcttcatgaccaaaccacgaaggcacctcacatccaggaaagcaagtgctgaacaaagcctctgaaccctgacaaattataaagaaaatcatcattgtggagtttcctgaaatataagaatcagagacaggtacagagagcgacaggagatagagttagaatattgagagaaacctcattgtagtgtttacgtgcatctgacaacaactgacatttcctttgagcatacgatgtgatttcctcctttgtagcttgctccaggttaccacagttggtgaaattgaaagtgcaatggttctgaacggttgacatgatacgggccagtggttttgcaacattcttcagtgagctacagccatgtgcatctaagtactggagagttggtggcaactctggaacatatgtaagcttcgtacaatacttcaaatccagccgtgttaactgagaaacttgattgatgccagctggaaggtagatgagatgatcatttctgcttaagcataaatactgtactgagggtaactgcggcatcgttttgatggatgtcccatctagaagtaaaatttttgaagagctcttgttgatttctggaaattccttgagcttagaacaacctgaaagtacaagtttttgaagagctttcagctcaccaacacaggtagggatagtctccagcaatttgcagtccttcatattcaataagacaagtcttttgaggttccccacgttgtcaggaagttgacttatcgacgtcccgtccaagtataaagcttctaaactttctggaatcaatggaaattccttgaagtttgagcagttgctgagggtgagagttttcaaagacatcaaattcgcatctcgaagagattcaagacttgtgcacccttcaag

SEQ ID NO: 18473 - DNA, 370 bp, Arabidopsis thaliana landsberg
  unsure (1)..(370): unsure at all n locations
ccattgggtagctaacctacaagttggaagaacgaaaccaagtaantttggaacttcaagaaatggttaaaagtgaccccagttttaaaattgaggattggttagaggaacctggttcagaagaagaagactactctgctgatcaaaaggaagcttattttgaagaaaagtcaaatgaataatcatcctaccatatgtcaaggaggatgcagagtatgactcaaccactgaagatgaggacttctatgttcctctcttcaaccttttttctgactaagctctgtaagagtcaacctcagtgacttaaaacaagctcactttgagggaagttacatgtttatccatgtatataactttctattttccttgt

SEQ ID NO: 18474 - DNA, 546 bp, Arabidopsis thaliana landsberg
ggccctaggtgtggcggtattgcatttggacacatggacaattttcttctttgcggtcgatcctttttctgtttttgtgtctcaggactctaatgaggcctttaaactctttaaattcaaatgtcatattctgtggtacttactagttactagttatcagttggaacttgaaaccaagcgttttggtgtcttcacatatagaattaaagacttgcctagagttagatttgcaatttgcatagtatattcaaaagtaaacatttcatatttgataaaaaaaaataaagtatagtgtctagtaggcctgttacggatccggatatccgggtttttttggagtatccggatccggatccgtaaccgccggatccgtagatataatattcggctccgcatccgtttgctacggatattcggaatccgggtatccgcaaaaaaaatcgtcggatccgttttttttctatggggatcaaatccgatttttttttacaacccagatcgaatccaccaatgtttgtcataagctttcgcaatctacaaaccacc

SEQ ID NO: 18475 - DNA, 1077 bp, Arabidopsis thaliana landsberg
tcgactctagaggatccccaaaacgatcggtgtggaatactgatcaaaactttgaatatagtgaacattaatatgcaattgaaacaaaatgagaaaggaaaaaatgttgtgacaaaagcatttggaattttgaaactcgtagtctaaaggaagagtgcgagctaggtaatcaaataatatacttatttgaaatgcctgaggatccttgttgtattgctctcgctcttcgatgttaagtatattctgtaataattaattatgaaaaaaatagatcataaaactactttcgttacaaataaatgagtgttacatgatactagtattaatgtacaacgttgttgttgtaagggataaaaagccgatatagttgcgtaaatattaaacgaatgttgcatgaaaaaaggtagaactattgtgtagtcaattgtatactacgagaccgactcctcgtcaccatccacctccagctccgacacgccgtccgtaacttctaagcgccatgagcacgagaagtatagtaagattcccctacgctaccctcgcattcctagacatactccattactttcggtcccattaggaaaccaccaacgtttgaaggtgaacattattctaggtggagtgatatgatgagatatcacctaacctcactccacaaaagcatatgggatgttgttgagtttggagtacatgtaccatccgtaggggatgaagattatgatgaggacgaggtggcccaaatcgagcacttcaactctcaagcaactactatactcctcacctctctaagtcgagaggagtataataaggtgcaagggttgaaaagcgccaaagagatttgggacgtactaaagaccgcgcacgaaggagatgaggtgaccaaaattaccaagcgggaaacgatcgagggggagctcagtcgttttatgctcaaccaaggagaagacccgcaagccatgtacaaccggctaaaaaccttggtgaatcaagtgcgcaacctcgggagctctaagtgggatgaccatgaaatggtcaaggttattctaagatcacatgtatttcttaaccctactcaag

SEQ ID NO: 18476 - DNA, 601 bp, Arabidopsis thaliana landsberg
tgcgcatgagagtgcgaagataataaagatttattatctaagtcttgaatataactttccttcacggaactccgagaacttagggtttccggagtcggtaaaggagttcatggagcaagggtgggggttttgggttctagttatcaaacatggtccaaatcaattcaaactctacccaaggcttctaaataatgtggggagttcatataaaaattttgaacatttttgggattaccatttatcttttaaaaatccagaactatttctttgagcttttttaaatgccctaaaatttcctgtttaaattaaaaatcataaaactatttttattaaatactagggaaaataaggatactaggaaaattggtttcacaattttatcatttttctaccattttctataattgttttggctctggaataaaaagaaaaggaaaaacttgtaacagtcttgggccgattctgacccaggtcggcccaacaacgggtgaaagtgcgcccgcggctcgcgtgcaactttgcaccgaagacctggccctcgaataacatagaagaaaccacgcactattttggggagcactgacagtttcagaagagccct

SEQ ID NO: 18477 - DNA, 693 bp, Arabidopsis thaliana landsberg
tgatgttttatgatgttttgcttgacgataatagtgtcacttcaaatgcaggacttggcacgaaatagtaaagttagtacacatatgttttcaagcacaatgttgtacccacacaacatcatatcttcttctttgggtttaagaaagccgtgtggtagtagtgaaggcagttgcagcagcagcaaccatgaagaggaagatggaagaagcttaatgaaagaacgacttcagcggtggaagcacttcttgtctatgacatcaccaaaagacagacttttgataatgtcttaaggtggctacgtgaactaagagaccatgcggattccaacattgtgatcatgatggctgggaacaaagctgatctaaaccacttgagatcagtagctgaggaagatggtcagattctagctaagacagaaagtctctctttcttggaaacatctgcttttgaagccaccaatgtcgagaaagcattttaaactgttttagcaaagattcatcagcaaaaaagctttggctactgaagctttgataatttttatttgtaagaattattaagttatatcaaattataattatatcaaaaatatttttaaattttttaagaaactcatttaaagattctaccattggacattaaaaactctaaggattcatcaacaatcctaaactaaaaaattatcaaaatttagt

SEQ ID NO: 18478 - DNA, 529 bp, Arabidopsis thaliana landsberg
  unsure (1)..(529): unsure at all n locations
catactgttcatgcatgtgatcttttgtaattttcgtttcttgcttcagaacttctatctttgtacagttgaaaagcattttcagtggtgcttctaagagagattagttatatcttagcaaaagacatatgatagagtagttgtacaaacccataagtaagatatcttactatccaaagagacacttagtcctccttctcttactatgaattagaatattcaacgatagtgcggagtaatttagtttaattgtggtataatagactttacaattgacttttctctgatgtagatttggttttcaaatcctattaataagacttttacttgaaatctaatttcttgaaatccttgttctgagttgtttcgannggaagtgatattgaacagatcacatttgtgacatttgtagatcatagcaaaattagggtattgtcattggttgcagtctgtttcaatctattttactagagtgtcaacgttaatattcactaacttagttgagactatgatgtctctccattccact

SEQ ID NO: 18479 - DNA, 1051 bp, Arabidopsis thaliana landsberg
  unsure (1)..(1051): unsure at all n locations
tgaatctacaagaaaaacgattgggaatagaatggtcaggagatatagctattttaccaagacctttgaccaacccttgatttccantccccgaatgtgatagctcgttggggatcttggtttttctcgtaggaggagaacatccttttctcccctgtcatgtggtttgtgcatccgctatcgatgatccaacttgagcctccgaatgcataaacctacaaaacaattttagttcttgactttaggtacccaaacggttttgggtcctttggcattagaaacaagaactttgggtacccaaacacaagtcttggagcccttgtgtttgtacccaacaaacttggcaactactttgccggatttgttagtcaaaacataagatgcatcaaaagttttaaatgaaagactatgttcatttgatgcagtaggagttttcttaggcaacttagcacgggttggttgcctagaactagatgtctcacccttatacataaaagcatggttagggccagagtgagacttcctagaatgagttctcctaattttgctctcgggataactggcagggtacaaaatgtaaccctcgttatcctgaggcatgggagccttgcccttaacaaagttagacaaatttctaggaggggcagtaagtttgacattgtctcccctttggtagccaatgccatccttgatgccagggtgtctcccattatagagcatacttctagcaaatttaaacttttcattttctaagtcatgctcggcaattttagcatctaataatgctatatgatcattttgttatttaattaaagccatgtgatcatgaatagcattaacatcaatatctctacatctagtacaaatagaaacatgctcaacattagatgtagagggtttgcaagattttaattcaacaaccttagcatgtaatatatcattcttggttctaaggtcggaaatagtagtattgcaaacatcaaaatctttagccttagcaatcaaattttcattttctactctaaggctagccagcgaaatattcaattca

SEQ ID NO: 18480 - DNA, 268 bp, Arabidopsis thaliana landsberg
tgattctatttcctgccttagagatgagaatgtcatattacatgctaagatagaagaattaaatgcttgcaaaccctctacatgtagtgttgatcatgttactatttgtactagatgtagagatgttaatattggtgctattcatgatcaccttgctttaattaaacaacaaaatgatcatatagctcaattaactagtaaaataaatgagcatgaaattggaaatgaaaaatttaaatttgctagaagcatgctctataatgggaga

SEQ ID NO: 18481 - DNA, 2108 bp, Arabidopsis thaliana landsberg
  unsure (1)..(2108): unsure at all n locations
aatttcatttttctctaaaacatttgccaacatattagtacggtttaccatgaatttcgtttctaaaagatacaggtaattaaaatttataaaacatatgtcgtggagttttgggagctcattaactaaactaaggagataagaatatacaaatttgacgaaatttaaacacaaataatggttttactacaatacttgattaatttaataaattcttattatgttttaaatatctaaaattgtatgagatgtaaatttatatacataaaaattctaataattaataaaagttacataaaaattaaaatactaaatattattattttaaaaataaccaagtatattttactctaaaattgtcagtatcatgataattaaatgattaaatactgttttttcactatatgatgtacgagagttttccatcaaagcctaatgataccggatccatatttgttatttgagaaaaacttctaaaggcaccataacaaactctgattagatgcatatctaacggtacaaaatatagtaaacagaactgataaagtttttttagatgatgatagtgatattgatgatttgaatgcgaaaggaagaactacatttatagatgtgcttgtacatagtcaatatgagagttttttgtgaatacaattttttgcctagaaaatgggactaaatgattgcgaatacaacaacaatggtgtcaagtgttagttataaccacaatagtgttacctgacctttttgtatgcaaatcaagtttttaaccgtgttgttatagagtgtagacatgtatgaaacttatgagagtttcaggataatgtgatgtggataatggtgattgaatatttctttactttgcccgataccccaatatgatcattgaaaaatggagctttgataatccatatacttaagaccaagtctgtttggtggaatctacttacgcagttacgctcatgcttgataattctcctaatttacaactactcaagctcattagtttctacttagtaagttactgcaattaaatacaaattaccaaaatgagaccaaaaatcggcacaagtaaacggtatgatttcgaaccggaaatataaatccggtttagagacgcaagtggattaattttggccgatatcgtcttcatttttcacattccgcctccgcttcattattttctgaaaccctaacctcagccgtgtttttttgtctccaccgccgtcgattttcacagccctcgaactacttcggcctcccttaactcagctggatttgaagatcactaggaattgatttattctctatcgaagagctagcgtttggagtgttgcgatgcatctgcgttttgaaggggattgaaatagcgtttgtaaatgcgatagtactcgggaaggaataataattcaagaggagatcttattgcaattcgattgctttcgatgacaatgaaacgatggtatgtttcctctatgtgtgcttatttcttatgaactgttcttaggattttttacactgaagttccaaactaagttagtaaacgctgtggtgaaagtttgagcaatgagtgattaggtctatgaattgtccttagggttttttacactgtaagctccaaactaagttagtgttatttcgtttattgagttttggggctttttgtttcacagcaaaagttgtggtcaaaccttgagcaatgaggataggatcagtcagttacctgaagctttgcttctgcagatattatctttacttccaacaaaagaagtggtnnnnnnnnnnnnnnnnnnnnnnngatggaggtttctttggaagatggtgccgagtcttgagttttttttactatttcacaaatgatcttgagaggttttcatataatgtcagcaagtgtttgttttcacatcaagctccgtttctacagagtttgcatctcaatatgaactttgggtgtgaccctcgtataatggattttgagatattgattggaattgcgtttggacgccaactgcgtaagttggtactcgaagtttactctggggattggttcacatttcctacaagtttgtataactccgaaactctagagaccttggaactctaccatt

SEQ ID NO: 18482 - DNA, 602 bp, Arabidopsis thaliana landsberg
cctacatttgatgatatacaataccatccttagccggaaaacttgtcgttatctttccaagatccatcctcaaaacaatgatattgagaataattgttgtcaattggaaatgccgcactcggttatgattttccaaattacaagaaccatgagtttcactgtgaagctcaagttgagctgacttccacgagtctgactctttttccgctaagtgtaacatttctagatgatctttatctacatttttaaagattttttttatttctttctttccaaatataccaaattatccgtggaaatgaagatgattctaattccgaaggtatgcgccaaaataaagaatctaaatttgcataaatagatgcataaagaaatttccctcagactgtaggtatctgtgaaagtgcccaaatctaacgcgcatgatggcataagaaaagcatgtggttaattttttcttctaaagcaccacatctactacatcctatctcagagtttataccgcgttattgtaaattgtttgttattggtacccatcccgctaaaatctgtcacaagaagtgacgtaacttgggcaggcactatactttctatgagtatgc

SEQ ID NO: 18483 - DNA, 530 bp, Arabidopsis thaliana landsberg
  unsure (1)..(530): unsure at all n locations
tgaagatgagaaagaaccatcaaagaagaaaattccgaagaagaggaaagtgtcttctccgaagcaaaaagtatccgacgaagaagaaactcccgcatcacactctgccactgacgtggaggaaattttgaaggtaatgactgaatccctgcctgcgaacgtaagtccattggggcctcaactgacaaagttttttcagaaggaaaaggagcccgaaaaaacgaagaaaacgactaaagcaaagagacaaagaatcatcgctgtgacagaggtcattgacaagacaccaccgagagcttcagctcagaagataccggcggctgagggaataacaaatattgaaatcacaccttcggaggtcgcggctgccgaagctacctcaattgaagatttgaacttggaaagcacaatnnnnnnnnnnnnnnnnnnnnnnctagacatggccacagaagaagctactactactgccaaagaggccatggccgcagtgtcggggaaagaaaaggaaattgctgacgaagcttcagagg

SEQ ID NO: 18484 - DNA, 1445 bp, Arabidopsis thaliana landsberg
gaccaaaaaaaataagaggaaaaattgaagaccgtttcctcgagacaagcagattctcaatcctcgagactggcagtggaaaacaacttcgctctctctcttcaaaaagaaaaacaaaaatacaaaagccaaggaaagccattattacaaaagcaataacacactgtaaaaaagccactcacgaacactcctcagtaaccagagagagaaaaagaagaacaacaagccatgtcttaactactttcttcttctccctcctcaaactaaccaaaaaccctaaaaatcataagtttcttcaccaatgatgcttcaaagaagctgcattgtacttttcttctctctttttctgttcgttccacaaaagggtttctccatactcaacacaactctacttctcgtaccacatcctgacccggaactagtcgcttatcaagttcagtggtacacttactacattgcctcttctggatctacatttactctctttttcaacttctttaatgtaatttttccatctggttataacatttaacaagctattatcatgtcttcgtgtgaatctgaggttgctctgtttttcccctgttttgttcggttctcttaaaccggacagattttaataatccggttcgtaactgttttgcaggaaagtaaatgcatctataacaagacgtcaagctctatacacgacggaccaggccggttcaaccccgtgtatcaccggtaacccaatcgatgactgttggaaatgcgacccaaactggcccaataaccgacaaggtctagcagattgtggtattgggttcggacagtacgcattgggaggcaaaggtggtcagttttacttcgtcactgattcttccgacgatgatgccgtcaaccctaaaccgggcactctcaggtacctttctgttaaccgactaaaccggatttcttgtaagaaagtcttgtattaaatcttgacaaatagacaaatatgtgttgtcttttattagttcaagacatatatatgatctttaattatcgtttttttaccgtacctagatttttttgaagttttttagttaacaacactaatactatatactatacttgaacattacatgtcattattgttattagctctaaaccctacctacatacacactttcataatttaaatcctataagaaaataagattctgtaagctataagttaatctattcgaaatttacttttctctctctcttttgtcatctcatattcacatgtcccacaccaatctattatgtacgactttttcaataccacttgtttatatttctaaataaaccctccgttttgtggaatatttcccaacaaccctgatttagtgattttttttaaattcttcaaaacctcctcaaaaccctctttaacatttagagctctataattttgataactaaatccgttttagaacata

SEQ ID NO: 18485 - DNA, 513 bp, Arabidopsis thaliana landsberg
cttataaattcttttaaaatattatcaaaactcttgtacatcttttaaaaccctttaaaaatctcttgtaaatcttttaaaacacttttgaaccctttaaaaatctttaaaaaactcttgtaagtcttttaaagccctttaaaatcccttgtaaatcttttaaaacctttttaaaatctcttgtaaatcttttaaacccttttaaaatctcttgtaaatcttttaaacccttttaaaatttcttgtaaatcttttaaaacccttttaaaatcccttgtaaatctatttcctgccaaaaacaaaaattttacgggaaaatattttcgaaaaaaaatttggcgggaatttttctctgaaaatttttagcgggattttttttccgaaattttttggcgggaaaaatgtttttgaaaaaaaaatttggcgggaaattttttttcacgaaatttttggcaagaagttttttcccgaatttttttggcgggaaaattttggcaggaaattttattttgg

SEQ ID NO: 18486 - DNA, 1781 bp, Arabidopsis thaliana landsberg
  unsure (1)..(1781): unsure at all n locations
taaaaagatatggtgttgtataacctcgaaaaaaattgattagctttccaaaagaagttggaaacactgagacatgcttatagacttatagtacagtaaaacacacacaaaagaggaatgattgtaactcctatttcaaaagtaacaacacatgatttcgatttttggaaagatgttttgactgataatcagcaattagcagaaaatgacaagggttgaagtcattactacagtagcaagagtgtttcatagaataagctttggatgcgaagtcttcaacagaggggcacgcgcagcgcctttgtgtagtacgtgagtgcccaaagagtgaaaatgtttctataggttgcataatggaccatcacgttcatcttgaacactcccattatttcctgaaaatttataaaagcaacgttaacttttttttttatctatatagtttttattttaatttgtcaataatatattattggctttgaatacagataagtaatctatagttatattcacattatatattagagttcatgggaaacatagataggactatattcacctgttgtgggaaatcgccgttatccatttgtgaattgatcaacactttggcagcacgatgaaccggcaaaggatctctcttcatttgatttcccataattagaaccataagtgcttgtcctgtattcaccacatttgtcttgtttcctatcatcggaatatatttctttcttggacaagatagatagctctctccccagccaccctccgtgttttgagtgtcgagaatgaagcgaactgctctacgaattgcctcacagttattgtaacacttcccagcagccacaagacctcttacagcaaagaaggtaccatagatgaagcacactccccaatttccgtaccatgaaccatccaccatttgcaagtcctcaatgtactttacgccttttgttataaaccgttcaacctcttcctttttataccccggaaattgtttattgaattgagccaacgctacaattgcagatccagtacattctacatacctagagacaaagatgatatcccacaatttaaaccaatatctttttgctcaaacatataatctatccaagataaaagggttgaagaatatatatagcatactcatgctcaacaaccgcgtcttcaataaactccactggactaagccactacattcaatcggacgtagttaaaatatcacatccttgaaaatatcattgataagttactaaataaatattacctctaaccaagttttcccgtccgctggttgccatgctgttatacctccattatcactctataataaaatatttgtataaacattctctatatatgaaatttcaaatactttaatgaacaaaaatatactaagttgatccatttttgttggagtgaaatgaataatttatactaaaattatttaatttttaaaattattactcataacctaattattattattattttatatgaacttaaatttaattttaattatcttattcaataaaaatcaagtaaccgattaaatactcttccgtttcattataactggcttttccctagatattctatatatattaagaaagaaaacaatntaaattttgtttttacatcatatcattttcatttgtaaatacatcaaagtaatagggataaactaaatatttaatcaaaatattaagtctggacaaaaatataaaacgacacttatgataaaacaaaatttaacttctaaacatacctaattaaaacgatga

SEQ ID NO: 18487 - DNA, 727 bp, Arabidopsis thaliana landsberg
aatcagtccagtggacttacacacggttttcctcgtgcgtggcggcatatctccataaggggggaaactttattagtatagtttttaacatgatgcatgcataattacagaatcaaccttagttgattcacaaccttctatacattgcactctactgtctggtctttaagataaactcttcataaaaacttaggtaagaagggaagagattttcttagataagtccttgaaaattctttttgaaaatgcctcataatatctgcagagatgggcttcgctccgatacgagctgtgacggaacctcccaagtcattaggcccacctacagttgtccttgtccaacggacctcagacaaccctgcaggtgcccctgaatcacttgacaagttcgatatctgtatcctttaccttgcccaagagcgtttcacccgtcacgtagacattacaacacatcggaggtacgagaatgcggaagcagttacaataacttactttattttaaagtaagaaagcgtagtattattacagatcagagtaaatataggagtgctagagtaatattattacataacctaggaggcaaaaacccctcccgataaacagtaaaagttttataggaggacacttcctcccgcggcttcaatcttgattttcttatttaggcaccaccttagaacagaagcaacaaaaaattgctgcttcttcaccgaaaacaagatgggacata

SEQ ID NO: 18488 - DNA, 1630 bp, Arabidopsis thaliana landsberg
  unsure (1)..(1630): unsure at all n locations
acatttatattatatatatatattgttcatcattatttatgttatatactttttacttgttttgtcaatagatatggttttgttaattaattttctttattaattgtcaatctcttaaatatagaggtaaaatatgcataaataccactaatagtctagtaactattggacaannnnnnnnnnnnnnnnnnnnnnnnnnnnnnnnnnnntgttagcatggcagtctcgtaaatcacacgtaaaaacaagattttttatattaaaaatgtttctcaattaatatataagagattacaaaacaagtgtagttacaagataatgtgaaaccgcactaaatttgacaaccgaatcaatacaataataatactaaggatctttcatgtgttgacacctcatttttttaagtattctcagcttaacacctcattaaaatcaacatccaatctgaatattttgattaatacaactcatttacgtcaactaatataaatttactattttttcatgtcatctcatcaacttaacaaaattaaaattagacatgggcctaacccaattaaaccactttcaaaactaaaatctatataaaaacatggacctaaacttcctaatctagaaaacttaggcctagacaaataaaccgaaacgaatgtatcgaaccgaaaccaatgcaaaaaaactcaaaccaaaccgaaccaaaaatttgaaaataaccgaatagatattaaattctataaccgaaagaaccgaaacggaatggatacaaaccaaaatattttgggtaaccaaaaatatctgaaatataattatactttaaaaaataatagttatttctagactaaataattagaaatatatagataatagcaatattcgagaatattcaaagaaaaataaccgaatgtatagtaaatttcaaaactgaaagaactggaaccgaacaaaaatttcaaaataacctagatactaaactttataaccgaaggaataaataaccgaatgaatcctaccgaaactgaacagataaccgaatgcccatgactaagaaaatttatctaagggcctgactggttgaaacgcagtggttacagttgtgattgcgagagttttcggaatcagaaggttgcggttttaagcattataatttgaacgactggtttagcggttaaaaattggtgtatttgcgagagctttatgactggttaacggatttacgtttatggtagaaaaattacgggtgtatgttttttgcagaaaaattacgggcttacgttttttgcataaaaattacgagtttacatttttttgcgggaaaattacaggtttacgtttttggcgggaaaattacgggtttactattttggcgagaaaattacaagtttactattttggcgggaaaattacaggtttactttttggggaaaaattaataggtatgttttggcgggaaaattacgactttatgataatattattatcatgatgatcgctattatgactatgatatatttatatgaggatgatgatgatggtgatagtagtatgatattatgagagggtgataatgattaaaggcctctctgatttaaacatagcgtttgcagttatgaataacaatgtctgcggaagc

SEQ ID NO: 18489 - DNA, 985 bp, Arabidopsis thaliana landsberg
attccgcaacaagcagggtgagggtggtgtggtgataaggaacaaagcccgactcgtggccaagggttattcacaagtcgaaggtttagactttggtgaaacttatgcacccgtagctaggcttgagtcaattcatatattacttgcctatgctacttaccatggctttaagctctatcaaatggacgtgaaaagtgccttcctcaatggaccaatcaaggaagaggtctatgttgagcaacctcccggcttatatagatagtgagtaccctaaccatatttataaactctcaaaggagctttatgggctcaagcaagccccaagagcatggtatgcatgcctgcgagatttcctaatcactaatggcttcaaagtcggaaaagccgatcctactctctttactaaaactattgcaaatgatttgtttgtatgccaaatttatgttgatgatatcatatttaggtctactaacaattctacttgtgaagagtttagtaggatcatgattcaaaaattcgatatgtctatgatggtggagttgaagtacttcttaggatttcaagttaagcaactccaagagggcaccttcatcagccaaacgaagtacattcaagacatactcaccaagtttgggatgaaggatgtcaagcccatcaagacacccatgggaactaatgggcatctagacctcgacacgggaggtaaatccgtagatcaaaaggtatactggtcaatgataggatctttactctacttatgtgcatctcgaccggatattatgctctccgtatgcatgtgtgcaagattccaagccgaccctaaggaagctcaccttacggccgtaaaacgaatcttgagatatttagtttatactcctaagtttgggctttggtatcctaggggatccacatttgatttaattggttattcggatggcgattgggcggcgtgtaagattaatagaaagagcacatcggggacttg

SEQ ID NO: 18490 - DNA, 739 bp, Arabidopsis thaliana landsberg
ttgaattattaaggatcgagtcgttgttgtttcgaatctattgtaaaataatataataatctagtaatcaccatttcgttgttttgcaatctccatctttcttgatcatgaaccaatataaactatgatatctttttttccctttttcaaatatatttatatcaaaaagtgtttacaagatacataaacaatccattacaaccattatacgcaaatagaggaaattgaaacaatttccatgatgaaggagtgaaattgaaaccatgcttttaattagtcttataggcaacaaattacggatttataatctgtaatttgactaataatctgtaatctgttaaaactttgatatctttatgtatgtttcacatacataattatattattttatgtctacacatctatatattcataattcttacaatactaaataggtaaaagggagaaatataatgtttgtttaaatttgtaaaaaataatgtattatttcatatctgaaagtatcaaaattacatagtactatgatatatgacaatgaattcctaaaatgtcaatcaactagtagttgataataaattagatagattaatcccaataaaataagttgtcatatctattatgaccaatataaatttattgtaaaacttagaaactacctgaaatataaatattttatagtccttaattagaataattttggaaaaaaacttttttttgaccttttttacccaacaattta

SEQ ID NO: 18491 - DNA, 1644 bp, Arabidopsis thaliana landsberg
atttttttatcaaacacatcatttatttacttctgttatcccctttttcactttgaccagcaactcccatgttttttgggcatctcttccgttcacttactttacagagcctgtatcagttgagctcttccttagcagaactaaaattagatagatgcatctgcttaggaatttgcactccttgatgtctttcgattttgtatttgggaaagtgttttaccctagggatgttccatttatatggataatcttattatatttgtagaaaaagtagacgtccaggatggaggacttgtacaaaactaccttcgtctttttgttgcgcctaacattgaatggcctttgcatttccatgactataatatctgaatgccttttgatcacatgtgtgttatatgattttgaaatttggattatactgttgatatatagtactctcatttagcttgcattggagaaactatggagtctgtgtagttaataaatggttttcatgtctgcagcttggttctgtaaatgaccgtaggggaaaaaagaatcttgtattggctggctggggcgacgattatttgctttcagaggactgtcttaatcctttttatgtttccagtaattacaactcatacagtgaccaaacacaacaaaatctggtacgctcactttgagcttcagttactcttatttacctatttatccttgtcgtcttattcacgtggttattctgagtccaaacaacttgtgagtgttgtgtagaaaaggttaaacgaggatagaattgactacgagcttcttgaagagttgatatgccacattgatgacacttgtgaggaaggagccattcttatatttttgcctgtaagctgatactgagatatttcatgtaatgagattcgctcatcctctatcgttttggcttgacattatttggttgataacagggagtggcagaaatttacatgttactcgatatgttagctgcttcctatcgttttcgtggacctgctgcagattggcttcttcctctacattcttctattgcatcttcagaacagagaaaggtgtttctgcgtccccctaaaggcttacggaaggtaatttcatgtgacatccatataatctgttacactattgctatctctagttcagatgtctactctcctagagatgagttacttttcatccattttttccagatgactagtttaatggctttgtctttaatgccttgcttttacatgttctctattgtaaatcaatctaaagttgttaggtgctctctaggttgtgtgttttgaatattgatgcattgttttttcggttataagagattcatctcatttcgtgcttctacttatttccttgcattcccactagcaaatgaatatagttgatattgacaaaaaaaatatcgaaaagtaattctgttccagaccccactttttaacaaaaggactacatcaccaatattggttttcttgaaagttgtattatgtgtatataatatacagtaaaggctgcatggatctctgcaaagctgatctgatatatctttgcatcgtctcttatgttcaggttatcgcagctacaaatattgcagagaccagtataacaattgatgatgtggtgtatgtgattgacagtggc

SEQ ID NO: 18492 - DNA, 1286 bp, Arabidopsis thaliana landsberg
  unsure (1)..(1286): unsure at all n locations
cattctttccaattcaaaaccaatatatgatggtgtggactagcatctgttcccagtttcttaactaatanagtgatgcaagttagaatgatataatacttcaagtttgttaacggtagtgaatgataataatgaaacaggaaacatacctcaatagccataccaaggcattcagtaatcaattgatttcaaaggtagataaacattttaaatgtatattagtcacaaaaattttgatatattattttaaattatatggcacctgagtacattttctagtatattatatggtttccaaattgaaaaagatttattaagctcaagggcgtgacaaccagatttgttttttgaaaaagatttattaagctcaagcagcggttggcactgtagggtacatggcacctgagttaataacgatgggagcttccactataaccgatgtatatgcttacggtgttttcttgcttgaagtagcctgtgggaggaaacctgtggaattcggggtttgtgaatgctggaagaaacgatttctgatcaaatgggtttgtgaatgctggaagaaagattctttgcttgatactaaagatccaagattggtagacgaattcgtacccgaggaagtcgagttggttatgaaactcgggctgctatgtacaaacattgtgccagaatctagaccagcaataggacaagtggttctttacttaagcgggaacttaccattgccggatttcacaccatatacacttggaatcggctcgtttaccccggtagttgtcgatgcagcctcacttaccgtctcatttacttcgaggaactggtcagcgccttcggcctcttcttcctcagccaataactcaaaggatcatggacaagcattggaatcgaagagctcattaaacgtagttgcggaatcagaagacatcgaatctcgtctctctaggctaaacagtggcaggtaatgaagttttttgagtatccattacatgggccagaataaaccatgattgttctgaatgattcagcttcctttggtgtatttcactggttcttaagtgatcgggttaataattattactggtgctgccaaaagaattcggtttagaaatcgaggctttaagggtaattaaatgtatcatcttatcctggaaggcatgtacgactcacattattggatcatgatggaacgatcaaagagaaattgtagggattaaggactttgaataggcggagaaaaacttgatcacggactgggttgtctatgcgacagttgcatttaccatttt

SEQ ID NO: 18493 - DNA, 422 bp, Arabidopsis thaliana landsberg
  unsure (1)..(422): unsure at all n locations
gcaagaagctggaaacgccaaaaaggcattatctttcttccacttcaatggacttatcttgagtagtaggtctatagcctgttcatctttgacatccttgaatgcatccttaactcgctatttgccgactttgcaggtgatcgagtggaaaatggttgacaatagcatgaaggcgatccgatatcgttctgctgccaagtatgtggaccaagaaaacaataatccaaagaaaaggaaannnnnnnnnnnnnnnnnnnnnnnnnnnnnnnnnnnnnnnnnnnnnnntgaatattattgaccatgagttctattgaaacatttttcagagctttattaatggagactaactgccatttcttacaaactcaagaaagagaaaaaggtcagttctcgttagagctgtgttatacacatgaactcgg

SEQ ID NO: 18494 - DNA, 714 bp, Arabidopsis thaliana landsberg
attatgaagaaaacaaccaattttttggtgggttcttcacattatcgtgcttattctttctaatcacaagatcaacaatgtagtatcactcttaaaatgtgattatgaagttgacaaaagttacatggtagcagaagaaaacattgttaacgaccggaagacttacactttgccacactttctttatttttcataacaaagagatacttttggagaatttcatcttttttactagtcaatattaatcaatactgttttgcctctgaaataaaaatctatgggtgtgtgtcattgtaattctctcaaaataaaaataaaaataggcaaagtcgacataaacaaaagatctttactctaatcagttttgtgagtgacacaaagctccatttttttgcccttaaatcaaattactaataataattaaaaaatcttataaaaataatatttctggcaaatcactctggttgacctcaaactcaaagtcgagtaattgccgatctaaaacacagggggtgattcagaaatccccaaaattcgactaaaaactaaaaccctagccctaattcatcctgattttgatcgccgtataaaagactcgcattttctgggcttagtatggcggttccggtgctgggtggatttccgatcttcatggtagtgagagttttgggtttcatcatcgcggctttggttttgacatggactgttcattac

SEQ ID NO: 18495 - DNA, 346 bp, Arabidopsis thaliana landsberg
attattgcagttttaaatgagttaattgtttgagagtagttatttctcttaacaagtttgatgcattccttatctaaaaattcaagatctaaaggaaataatatacttgaggaacactatctattcaaatatttctttccattacttatgttttcatagatttggaatgttatttatctaagctgtgtttaccggataaagttggttgaaatgcttcaaggatatatttgaatgatgaaaggtgttcttggtgcaaaaggtttccctatttccactttctgatcaatcttttcctttgcaggatcaaaaccaagagtcattaaaagaaattgtgtgctattttagc

SEQ ID NO: 18496 - DNA, 329 bp, Arabidopsis thaliana landsberg
cctcatcttgtctgtattgcatgtgatcttgatgaaagtttgaacaacttgaggtttgtaaggttggtgagtggaattttttagcatgagccatcgaaattgccatccgacgatgatggatattcgagagactcaagactactgaaactagatggtagatctccacttaattggttggatgagagatcaagaacccgtagcttcttcaagctacctaaacaaagaggtatttgacctacaaaatgatttcctttgagatcgagctcccgcagattcttcattttacaaaatactgcaaaaacagagagtttggaaacaaaaatataatg

SEQ ID NO: 18497 - DNA, 899 bp, Arabidopsis thaliana landsberg
tattctgttccagcgccgaagctatgcacaagagagcttcggtccagtagcagaaaaaggaaccgacttaaggaggaaaaggctatctagtccccgacagattgttcttaagtcaatagtaaacatgaagggcataaatgtaatttcacacaggctgcgtcctgtgcctataaatagatgaacaatacccccgtactgctcacgctgacttgtcttcgctcgtgcgtcacgtttgtacctttgccttctgtcaagccgaaggtacaaatgtaactcaatgttgttcttattcattcatgattatataataaaagatatattaacggtgtcatatgattattcatgttatttctcatgttccatatgcttcgtctttcattaatatatgttgtgatgatgaaggcatgcctttcatgaccttcgtccgaggatcattatatcctaagggagataatgcttcgaaggacggaggtccttaatctttaacattctctatgttgccttgttcttgattcacatcatttgagaacaagtccccaacattggcgcccacctccagtgaactcacttccacgattgcaacaatggcttcgcaagacaatcaagctctggcaccttcgactacgaagctggtgctcccaatcacaggcggctcaagttctgaaccagccaataagaagcagaagaaggaagcatagagaagggtacaacatgttggagtgcgaggacccttcatcaagtccaagtggtctcatgtaccaatcaccttctcccaggaagatcttcggctcaaggattatcctcacaatgatgcaatggttatatcttgtgtcatcaagggcttcctagtccacaatgtcctagtagacacaggcagtgtgtcatacatcatctttgcg

SEQ ID NO: 18498 - DNA, 1038 bp, Arabidopsis thaliana landsberg
tattaaattcgacaaccaataataacgttttcatagcatattaaaaattagcggcaccatacaaaaattgttttgatatttgaaatatcactctaatgtgtatagagcactctaatgtgtatatagcactctaagaccatctagcactttgatcttatcactatatcacttcatcaccaagtgacttcctccccaagtctttctttcttatatatatgttgcttcattgtaaaaactacaagtagagaaagaagtaaacgttggcaagagagactagaagacgaagagagttattataagtgtttctacttctattactttgttccccgtattctcttgtctctctctaccattctttcccaaatcatatgataacataataataatttgtttgcgttatattttatcatacgttatttgcacgatcgtcttttcgtatgattgtctaacggaccgatcgtctatttgttcaagcatcttttgaggtaacatttgaattatgttaaattcatttgatatcatttatataatattatatgcatgatatttttggagtatgaggctatgcatcttccttaatcgaatggtaggtcacgcctcttcaaaatgccataaatggcttattaattgaatgattatttatttatttatataattatgtcaaggcttcctaagctcgatgtcgtttctcttgatttatctagcaaaaattacatgacatggacatccgatgtaagaactcatcagagatcaattgggctttttaataccaaagatgcatctgaaatgacatcatataatagcaaagcagctaaagtcatggtattcctacattatcatctccacgatagtttaaaaaatgaatacatcacgagagaagagcatgtggatctatggcaatcacttaaaatcgttttgatcataaaaaaatttaattttgccaaaagctagatattaatagctaaatctctggtttttggattacaaaagtgctggtgattataattccgccatgttcggaaccacctctaagatgat

SEQ ID NO: 18499 - DNA, 560 bp, Arabidopsis thaliana landsberg
agaacttaatgcagaaaaaccgggtgaaaatgtgggcaaactacgtccctccagctagcaactccaaggcaattcatgaccagaattttaccggaaaggtaatatttgcttgcacacatttcttggtaaatatatttccttccgcacatttcaccagttcttagttcttactagtttgtactctcttcaggtagtggaagttgtgagcggggactgcttagtagttgctgatgattctatcccattcgggagcccaatggcggagcgcagagtttgtctttccagtatcaggtctcctaaaatgggtaacccacgcagagaggagaaacctgccccttatgcgcgcgaagccaaggagtttctgagacaaaagcttatcggaatggaggtatctattgcgttgtgccttcttacttaaatcatctcggtgtgccacacaggtcacgatcactgacatccattttcccggttcaggttattgttcaaatggaatactcaaggaagattagcccaggagatggtgttactacttctggagctggtgatagggtcatggattt

SEQ ID NO: 18500 - DNA, 341 bp, Arabidopsis thaliana landsberg
ctttctgttgtatggaaatagaaaaagagatgcttaccaatcaagtcactgcagctgagattaaaaaggctttgatctctatgcctaatgataaatctccgggaccagatggattcacctcagaattctataaaggagcttgggaaatcaacggagatgaatttgtattggcgattcagtctttctttgttgaaggcttcttacctaaaggcatcaactccacgatattagcacttattcctaagagaacaatgtgaaagagatgaaagactataggcctatctcatgctgcaatgtgatatataaagttatctccaagataattgcaaaccggcttaaat

SEQ ID NO: 18501 - DNA, 440 bp, Arabidopsis thaliana landsberg
agttccttgatcatttgtcgacgagagaagtacatataactttgttcagagagaggagaactgaatttgaactgatgaaacagatcctctcttccaagtcctgaagtagcaataccttttcccttctgttgttttcgtgacaaccacgccttgcttgaatcgtcccgctggcgcttcgttgggcgtgatgcaactgacggtacctctgtgaatttgacaggtatgagcctagacgcctgttggccttcgattggaaccagggaactcgaatcgtcctcatcgtcatcgcttatgtccacaagatctacaggaacccgattatgaggagtggagcggttcggtaatggagttcgtcgcagatctggtccaccaaagttggcatgcaccactaactgattgtgaggcgtactcacaagatcatccatcagatttaggctgtg

SEQ ID NO: 18502 - DNA, 988 bp, Arabidopsis thaliana landsberg
gcaaatatgagggctgaaaataggtatttttcttttaaaaatatgcattccaagaaaatctatctcagggaggtgccaatttttaatccaaacggcatgactttccaatggtaatgtcggtcttgtatgcaaaaccccgtctttggtctatcttctggtttgattccaagttgccaaaatcctgcttttaagtcaaatttcgagaagacttgtgcttgggggagcctctggaatagaaattctcactttggtagaggaaacttgtcgtttgaaggaaatgattgagcggctggtagtagataactaacctcagttttcctcgtacttgttcggctcttttgttaacatagaaggcttcgcatgcctatagggaggtggtcttctcaatgaggtcttctctttggagttggtcgactttttcgagagcaagatgataatggtctggattcattcctaaatggcttgcttttgttggatgacatcctcattcttcttgaagggtaatgatatgaaaaagtccggtttctttcataaaggtgatgaaaatttggtgaggaactctgaatgtgatgtagcacaagaagtcttgataatctcgtctttgatagaatttaatattccatggggtagagatgggagacattagtccatggtagcagttggttcttgtgcttaagtctttttggattccaaaatactctcttaaggctatgaaggacatcaactccaagtatgaaatcttttctagggagttcagacctatatactttgctttgatcatgtatcctggaaagagttggatgtagatgggcttgctgattaaggagatgtggaagatctggccatttgccgccttgaaagctactgaacaggaattccagtgagaagctgcaagtatgtctggcttgatcctagatgatgctgctccaatgtcgagaaaagcaaaaaatttgatgggcttgtcatatttgttggaaagatgggattt

SEQ ID NO: 18503 - DNA, 564 bp, Arabidopsis thaliana landsberg
ggattcactacaaagcctttacaaagattccctaaggctgtagcgcctcgttaggttttataaatgcaccacactcctccccaaggggcgaaccaaccttggcagagcgagccgcatacaccgagccccattaacagcacgacagcaaagcaaactacaccccagttcctctaattattcagctaagggcgtcgcattccaccctcatggttgcactgttttcccgggcggtcatccaacgaacaggtccttacggagaggcactccagaaaccgctcgagccccctaaagtttcaccagtccaacatcatgataataatgacaacatcgtataataagtgttcacatcatgttcattgattaaagtaaagcaatgacatgagtctaaccatagtaacccaaaaggtaatcaaatacaaggtaaatagagagctagtcaatctttatgtagctcatagtacgcgggacagtgaattatcaagtacatgggacataatgggtcagaggacacttgccttcaccagacaaatgcttagggtgtcaatctcgtggactcgaagaact

SEQ ID NO: 18504 - DNA, 542 bp, Arabidopsis thaliana landsberg
gtccacaaattaccctcccttaattcattttctatattccacccatctgcaattgcctctaataacccttctttaccaatccatcttttgtcaaacctaagactttgttttccccgttgaatcttatctgttaaagttgcaatgatcaatgaatgatcggaggccatcactgttaaatattcaatgaaagaattgcaaaatatttcataccaatccttattagctaaagcccgatccaaacggcaccagattggtttcttatcccgccatcctcgccatgataaccagtaacctaaatatggaaaatccaatagaccgcaatcttggatcattgtattgaaacggatgaaagaagacgcatgtcctaaatttccacctcttttctaatgatttccggttagctcattaaaatcgggaaaaaacccaaaaaaccctccatttatttttaatttgcccgtttaatacctaagttaatttttatgtcctttaaaaacttttattttttattttttttggtaaaatcagacatccgaattaacggc

SEQ ID NO: 18505 - DNA, 1160 bp, Arabidopsis thaliana landsberg
atccatataacatagtaatagttttgattatttttttatagtaataaatatcaaagtttttttttaaaaaatcatataacatagtaatagttttgatttttttaaaaagttatataataatactaaattaatatgacgttgtgaaatctaaccggattttggatcccgccatttaaccgtggtcattagcgattccaataatccaacatgtttttcacatcttcatgtatatttagcatttattttttattttcttttgttaaaaggttttcaacttttttttttttaaagtataaatactaaattaatatgacgttgtgaaatctaaccggattttggatcccgccatttaactgtggtcattagcgattccacaaatccaacatgatatttagcatttatttttattttcttttcttaaaagttttttaattctttttattttattttaaaggtattataaatattaaattaatatgacgttgggaaatctaaccggattttggatcccgccatttaactgtggtcattagcgattccacaaatccaacatgtttttcacatcttcatgtatatttagcatttatttttattttcttttcttaaaagttttttaattctttttattttattttaaaggtattataaatattaaattaatatgacgttgtgaaatctaaccggattttggatcccgccatttaatcgtggtcattagcgattccataaatccaacatgtttttcactttttcatgtatatttagcatttttttttcttaaaaggttttcaactcttttttttttttttttaaattttataaatactaaattaatatgacgttgtgaaatctaaccggattttggatcccgccatttaaccgtggtcattagcgattccacaaatccaacatgtttttcacttcttcatgtatatttagcatttattttttattttattttcttaataggttttcaactcttttttttttttttttgtataaatactaaattaatatgaaattgtgaaatccaaccggattttggatcccgccatttaattgtggtcattagcgattccacaaattcatatgtatttcacattttcatgtatatttaacatttattttttataatgaaagaaatcgtattaaatttttta

SEQ ID NO: 18506 - DNA, 858 bp, Arabidopsis thaliana landsberg
ttcttctaagattatcatcgctagatggaggaaattgtttttagcattggattttgtttttatcaaaaaaggaaaaaatgggttccttcaaaagcacagaaatttgatcaattgtttcaattaaacttaaatacaaattttcaaagtgaaaagcaagatatatatgaaaccacattcaaacatttctcctggttattatttccacattaccactctaaactcaattttgtagaagatttcaaataatgtaatgggtactttaaaccttttagaacaatcttattcatatgtacattaccaacttccttattgatcatagtttcttttgattgagttttatgaaattaaacaattttatattttcatgagaaccctattaagagaaactaccattggactatgattttttattttttttgaacataagttctaatctaacaaattcacataatttattcttaaaaaatggtgagagcccatccatgggctctcaccattggagatggccttaggtagcacagtttcatagttgccttgaaactagggtttcagggagtatcttcatcgaggagtctagttgtcatgcaagagtaggtgtctttgaactcttcataatcctcctcttctttagaacggtcgctgagttcatcatcccctcttgaacagtcttcaatccaattctccaaattctcgaagtgagaatagtcttcttgagtttcgtagctctcacttcaagaataagtctcggccattgaattttcttctaggcgtgccgctgcttttttttctaagtgatatccttctttgatttgatcttgttgagaacattagggatcgaaatccctagagtttttatag

SEQ ID NO: 18507 - DNA, 628 bp, Arabidopsis thaliana landsberg
cgactagttattcatcatttaagagtgtaaaaaaatgtcaaatatttgagtggtgccttttactcgattgttcaaaatagaaacatattcattaactagggtggacaatattttctgtttgtatctaataaaaataaaatcgtcgttttttttttggtcatcttacacagctcataaatgataacgaaatatgtggacaacagaaaatatcaatttatggctttctaaattattataataatttagcatgtggtgataccacgtccaaactgacatatctttgcactatatatatgttgttattcctctttcgattccctcataaaccatattaagaactagcttatagataaggatatggcctttacgaacgtttgcctatggacgctactcgccttcatgctgacttggacagtgttctacgtcacaaacagggggaagaaggcgacgcagttggcggatgcggtggttgaagagcgagaagacggtgctactgacgttatcatcgttggggctggagtaggcggctcggctctcgcatatgctcttgctaaggtatgtaaagtggcgtcacagtttaacagatttgcgtcttagtattaaaatgattctttgttgttttttggaa

SEQ ID NO: 18508 - DNA, 525 bp, Arabidopsis thaliana landsberg
aaatcgtcattctagacctacatttctagagaatattaacctatatcttacataacttatttgcccattagtaaggctctattccattgcttatggcctccatgattttggctcaataggaggagattcagaagaaaacaggatatattgtcatgagagatgagggcatatatgatgttgatgctaatacatcaattgaccagctatctgaagaactgaatatgaaaatgccagaggtaatgttattttcagcagtctcttttattcctctttattgcgtcctcaagagcattcctcagggttatcttttaactttgtaaatgtgaacatgttctttaaaagttgaaacccacaatgtttgttcatttgggaaacagggcattcagtacgagacagtctcaggctttgtgtgtgaggcctttgggtatatcccaaaaactggagaaagtgagaaggatgttcttgaaaaggaaagctgggaagaggatggtgaggaggaggaaggcacacatgagaggcaagagc

SEQ ID NO: 18509 - DNA, 694 bp, Arabidopsis thaliana landsberg
cctacagacagtcctcctctatcagctctagctgtacgttcaacaccatgcacattagacctaggatctatggtgtgcgccacacgttgaatatgcctatgaggtgaacatgaaaagcccactgaactcaaagaataaggactgcagagcgtgcctgggaatgtcctatttgatgactaggacaacagtgggaatgtccaatccacggatggcaacatctggcgcatgcatatattatgtactgaacgagactggaatgtacttattgcagatagtcccatatactgacaattcagagaatgcatacctgtattatacactggaagctcgatacgcataaaacttaacctttgacatgttctaaaacacgaaacaacggctaattatcaactgcaaatggatcacctgatgataaatgaataaagctatcaataggacacctgcaagtggaccacaaaaatcatggctgatcgaatgcccttgacttccattagccacaggatgtgcacaagatacagttttctggcatgttcgattctaaagatgaactgctgcgtaagagtgtcgacagtctgtaacccttatacgcttcatagatataagctctgtttgacgaatgatcaagcaaagcctgtaagttactagtcatggtagcagagcacaacaatgactgtctactctatggcagacactg

SEQ ID NO: 18510 - DNA, 940 bp, Arabidopsis thaliana landsberg
tgtttctcaagtatgtagattatgatccagagagactcttacgttggaggaccaaggtggcaaatgttgataagagtatatttcttctacatgcataaatgtggtctctgtttttaattattttcatgcttagtagttttttttaaaaattaaaaatattttagaaaagtgaaaatttttaacttgacaaatgattattatattcatgtatagtagtcatcatgattattatacttatgttttaatattattataattttgaaattacatatgcatatcttgacaaaaagtttttatctatatatataattttttaaacaaaaaaaaatatccacccaatacaaaaaaaaaaagattgtcttacatcatttcttctatatttttgcattagttatagatgatgtaaaaaaaattgcatcacttaaataagtgactttaaagtagagatgcatataatttgcatcgatttattactaattcatgttaatattaaaaaatatttacatcaattattatactccatgtagagtgaaaattttaaagaactaataatatcagttagaaactgcataaacgaccgtatatatgttgtctatacgttatatggtactctaccgtacgactaacgtacaaagtattttagaacaatgcctaaactgaaagaagttcatgtggagtgtgtgttgttgagaaggtggaagaagtttaagctttttccatgtgttctttgcaaagaaccttcaaactcttcacaacaacattgaccttttcttttgaactactcgaatccatcttattataagctgatttaagaatctgcatcttcaaccttggatctagaatagctctcatagctagaatgatactgtattgatcccaatacttatcaaactttaactacatcttactaactatctattccactccaaaatcaccatag

SEQ ID NO: 18511 - DNA, 780 bp, Arabidopsis thaliana landsberg
taagattaaatattatttttattatttttaaatattcttattgtaatatattaaaaaatcgagagattgacctgtggtagatcttggattaatatattttaaaataatttgtgatttataaatttatgatattgtagtatataaaaccgatttttagtgtatacctttcaataattgtataaagtatattttaaaagtcaaaatttgtataaattgatattgaaacctcatgaaattgtagtgatttactcgtagggtaccacaggctaattttattttatttttttataaactgataaatttgttgattttagttgaaaataaaaaataaattaagttatattttttttgtttattgtttcagattgtataactatattttgattgttaattccatgattttatctggggtataatatggaccaacaccccgctagcctctggtgatctaatgttgactctgaaagaaaaatccatacaaatacgcataaatggatagtaaaattaggaaataaacatcattagaacatggagtaatttatttatgaatatctatctattttttaaaagaatctatattctagattgattgtgaggcaatgtgaatgtatgcataatatttataagagatagattgtactcaaacttatttattatatttcgaatacaattaatgatctatcaaaaaatcatattactgttgttccaaaaaaagtcgttcaaatttcaaagaaaaaaataagaacattggtgtgaatcaatattttctcattttgaata

SEQ ID NO: 18512 - DNA, 724 bp, Arabidopsis thaliana landsberg
gaccaggagtggaaacggcctgtttttggcgcgacaggccatccaatccggcgcggccgattgcgtgctggcactgggcttcgagcagatgaagccgggcgctttgggctccgtgtataccgaccggccgagcgcgttcgaggacttcgacgccgccgccgacaagttgatcgatgcgcccggcattcctctggcgttgcgttactttggtggtgccggcctcagccacatgaagaagtacggcacgccgctgagtgcattcgcgaagatccgtgccaaggccagccgccatgcgaagaacaatccgctggcattgttccgcaaggaagtcaccgccgacgatgtcatgaacgatcaggtgatctggcctggcgtgatgacgcggctgatggcatgtccgcccacttgcggggctgccgccgcgatcctggtgtccgagaagttcgcgaagcaacacggcctgcgtgccgatgtccgcattcgcgcgcagtcgatgacgaccgacacgccctcgaccttcggtgccggcgacatgatgcaggttgtcgggtccgacatggccaaggcggcgggggaaaaaagggggtccccccccaaaaaaaaaaagggggggggggggggttttttttttttgggggggggggggttagttttttttttttttttaaaaaaaaaaaaaaaaaaaccattctccccccccccccccgggggcgggggggggggg

SEQ ID NO: 18513 - DNA, 2913 bp, Arabidopsis thaliana landsberg
aaggacatgtttgatcaccaaaaaacggtggtattacccaaagcttgttttgattggctgcatttgagactagagaactttaagtttgtagctgaatacttctaagctgaagttgtatggggaaaaggtcattgatgcataaatgttcggaaagacaaacaccacctttcacgcgaataatattgtcttacaaacacaatatcgtgaaaaatgatacaagaagtattctgagctcatatcctcccttcttgtagcggagaagaataatgagttgctaatgcagaaccatgtatcaagtcaaaccggttccactccattcctggaaggaaatgtgacatcccaccatgacaaaaaaaagttaccatagtggttgtggtcatggacgtggacgtggacgtggacgtggagatggacatggacatggatatgtacgtggctttgatcgaggtcgaggtcgaagtgtttcttttaagaacacaaattctcaccgaaagtaggaaaggaaggatgataacaaacatgaaaaaacccaatggaaatgtgaccaatgtatgtgaccgttgtggaggaaatggtcattggtttcacacatgtcgtataccaatgtatctttttgagctttacaaacaatcattgaaacaagatggaaagaacacagagacaaatcttgtgtacgaaaaaggcgaagatgataccactcatatggaactcgatgattttctaacccatgatggaaacattgattcttagattttaattatgttttttagcatttacgttatttaatttttattttaatgttgttttggttttatgattttatttatttccttaaacatggtcgaatttttaattatttttgataaattgcctcaaatggcactaaatgatgtttttgggacataatgagcatctaaatatttttgtgacatatgtatagcattctcatttattttcaatttttaaacaacgaataatataattaaaagaaaataaattgaaaatagatctccagctcacgcttccaacgcgatgaccattgacgagcccgacgaccatcgacgaaggctccgtgctcgagctccgaggacatttccgacaaagctttgagctccgatctgcatttccgacgaggcttcataggtttgatcttcagtcagttattaaatcgatatatttctccagaaatttccaatttcttcatcttcttcttcactaattttgttgacgaaattagacgagtactcttgttgtctcatgaatataccatccacaaacataaaaaaactagcctaatctctaaaataattgtaattctttccaagtatttgaaagtttgataaagagccaacaaatcctgtggattttggagcagagactttgagttatgaggattattacgatgaaacaagagatagatatgataaagcttttctgatgatgattacttatcagtgtgatgctttggttgacaagtttaatgtcactcctttgattattggtttggttggacctatctctttacgttacatggctctctctctggtgtttatgacgatgattgggctgataaagccattcgtgaatccgaacttcaatctgaagatggtagaaatcttttgacaatattgtgttgtttggtgtgattctatttgttactaagtttcactctttttggtgtcttgcattgcaggtgaagtaaaagatactaagaggcctaaaacacacaaagctgagccgtgtaacttagatggtaaaagagcagtgacgatatggtttagtatgcttaaaatgactatgcctttatcgagttatttggtgatatctttccttgcttgtcaccaagcgggagcaccggttccacccacatatattgtgagataggcacaagaaggaaagcttctatatttgtcttgttttctcaatattagagagcaaataggagagtgatcagctgcgtgtccggtgaaagcaatatacagatatgatcctttctagtcatgtgtttttcagttttaactctctttctattttcctgtctatggtttttgtttgtaggtacttcatccatcagtcggaacttcatctatctctactgtacatggaatagagcaggtaaaaacacatttgtatatgttttaggaggggaacatacatattcaggatgaccttcctaaaccagaggtgattacttccattcgactttttcgcggttgtaaatgtctgttcatttgtctatctatgtttgtgtttgtagaaactgatataacccgattttcaccgattttatctatgttttaggtatacaattttgagtctttatgttatttctcgagtctttttagtgtcttttcaggtattctatgcagtgggacaataatggagataaggagacattttggagcaaaagttaaggaaaagagctaaggacgattttggttcaggaatcagcgaggagtgtcgatcgacacactcttggtgtcgatcgacaccagtttcggcccagcaaaaaccctagacgcttttgagtttccagaagctcaagtttgccccagaagattttcctatttgcattatagtccctggacgtttttagggtctatatatatattgtttttagacctaagtttcatatatcaagtcttttataaagttttgcaaaaccctattgtgagaaacataagctattcatcgattattcttcagagtttcattcagatctatatacagtgaagagatcccttcttttcccttctctatttattgtgtttatgctttttatctcaaatatgttgtttgtttcatcaaatatgtctgagtaatctgcttgttaggaatagggtttaacaatagagattcatatggtttagtagatagccccctttgctaggttatctatagaattcttcatct

SEQ ID NO: 18514 - DNA, 686 bp, Arabidopsis thaliana landsberg
cctaatttacttctctctcgtggctggcgaatcttcgaattggaaattgagagattctgaaaccgtagcttctcaatcggagagtaatcagacgagtgttcatgattcgattgggttcgcagaggttgatgttgtccccgatcaagcgaaatctaatcctaatacctccgtagaagatccagagggagatatttcgggtatggagggtccagagccgatggatgttgagcagcttgacatggagctcgctgcagctggaagcaaaaggctaagtgaaccattcttcttgaaaaatatactgcttgagaaatctggtgatactagtgagttgactactttggctttgtcagtacatgctgttatgttagaatctggattcgtgctgttgaatcatggctctgacaagtttaacttttcaaaggagttacttacagtatccctgaggtatactctacctgagctgattaagtctaaggatacaaatacaatcgagtcagtttctgtgaagtttcagaatttaggccctgtggttgtagtttacggaactgtaggtggatctagtgggcgagtgcatatgaatcttgataagcgtaggtttgttcctgttatcgacttggttatggatacttctacatctgacgaagaaggctcttcgagtatctaccgggacaggttcatgtcctgga

SEQ ID NO: 18515 - DNA, 1066 bp, Arabidopsis thaliana landsberg
ctctggtgataaattaaaagagagtacatcaaaattaaaggataggtgaaggatatcgtattgaatcccatggagttcttttgagagagtctccgaatttagcgctttgattagtgaagacaaatctgaagcgaagtgaagatggcgaatcccaagctcaattgcatgttggattgccgagaggactgctgaagcttccgccattaatggcgagccaatatttcgaatcccttttgatccttttccaaattggatctcagatctcttgaaaacccaagccaaacctgtggtccttccacgctgcattcgtattgtagatcacaagctcgggatgggaagtcttggtacaggttcgggttttgatcacttgccctttagctttgttggtttgtgctttttgccattctttcactcttaagatagcaaggagcatgatttcctcaggttggatctgttgatgattgaacactttctggtttcgtgcgtgccagattgacctttctggacttaagaactctttttagaagatattcagaatattttcattgaattttcaggttaagcagcttgtcctgtggaaggttgttaaaatgtgaggtcttgggttcgccaagcgcaccaataacctacctggtgggctttggggtccaaggagagaggttagggtcgatgcgctacagcgccaacgagatgccacgttgtagagagtggccacgtgggcgggtcccacgggacgggttgttacaaagtacatccgggtttcattcgtcttcatcaaaatccggtatgtagaaatccggtggaacctaagagattcaagtaaaaaaactgatccgtgttagatagataaaagcatcaatttgtcctatgatgatctgagtttacctcctgcatctgtacgcttggagcgtgttgaatgtatcgcaaattctccaaaatctgcactttgatcgaactgatgtacgattaggtattaagattctcctgttttcatttcaaacacacaaaatgattctcaatctctctttagatttctgttaaagcaatgaggaactatttaagttac

SEQ ID NO: 18516 - DNA, 133 bp, Arabidopsis thaliana landsberg
cttttctgcgtccgattttatctttttttatcatgctgagtctatcattttaaaagatactggaattgtgttagctacttgatctaactatgtttaatatatttacagttcccggatgattgttgatgagatc

SEQ ID NO: 18517 - DNA, 552 bp, Arabidopsis thaliana landsberg
tgacgtcttggtttgttactggtttcagtttcttggacattattgacttgtagcattgctttaaagggctcaatttgctgcagaaagattcaaaattcgtttcttttcatgtaaattgaaagtcttgtggagtgattttagatgtgagattaatgagtgtgttcttgcaggtgtgtcataagcatggggtaatgcacagggacctgaaacctgagaacttcttgtttggaaacaagaaggagactgcacctcttaaggcgattgattttggtctctctgttttctttaaaccaggtcatgtggtctttctgctcagtagatagctgattgctttgtggtttgtcaataatcttaacccacaccgttattttctttgcaggcgagaggtttaacgaaatcgttggtagtccgtactacatggctcccgaggggctaaaacggaattatggtccataagttgatatttggagtgcaggtgtaattctttacatactgctctgaggtgtacaatcttttggggcacgtgccttaagtccgtccatgtttccaagc

SEQ ID NO: 18518 - DNA, 739 bp, Arabidopsis thaliana landsberg
tttaatttagtatgttattggttcatgattttctacatttttcttcacaaaataaaatcatggtttagtttggaaagtattatcaaaatagagagattgtttgagaaattttacaagattataaaaaactaataacaaaattattaaaattctttaataattgttaaaatctttcatttctttactttctacgatttgatttgatttttttttataaaaaaaaaaaactaaactgcataccattttacacccttgtatactaaaacaatgggtgagaaacaaactaataagtaaaatacactaggcaagtaggaatttacgttctgtccgatgaaattctatttatattctaaagactaaactgcataccattttacacccttgtaaattaaaacattaggtgacaaactaataattaaaatgcactaagcatttacgttctgtccgatgaaaatctatctattttaaagtccattagtcaacattgtaacaatcaacgaagacaccgtctaaaaacaaagtgatttgacttcgaatattaagaattatcattttttcttttgtgtaaacattacatagctgtaaaattgtcttttaaatcctaagttgagtgttgaatttaagtttttaatgcaaaattataactaagattccggttatttctttatattttactaaatattttataaataagatgaaaacatgtaatctactaataaagggtataataaaaaatttg

SEQ ID NO: 18519 - DNA, 623 bp, Arabidopsis thaliana landsberg
  unsure (1)..(623): unsure at all n locations
tcgctcgncactggcttctacaacaagctctttattgattttgaaacaccacngacagaannanggatgggnacttggaaactcagaaaggcagaaagancngcattgaattaggttactgggacacagtgttggagatcaaaaagaagatcgagaagtatcaacgtatccctgttcccaatcaaacccttttcttcggcaatgctcttgaagaccatcttgatatcggtcaatgcaagattctccaaaactctcatgtcgtactcttcggccttccagaccctaatgacaacaacgatcaagttcttcaaacggaggagcaacctcctataatcggagatctcatttacggtgaggatttgcctttgacaactgaagttgttttgaatattcgacctttttgcccagttcaagattctccggtgagaaacaacgatcaatctccaccgtcagacgcagcaaaagatatcatcaaaggtcatcaagattcgccggtgagaaacaacgagcaaactccaccgtcagactcggttaaagagaacactaacaatcaagattcgcctggggggaagataataccaacattacgggtgatgccatattccggcaagaataaagctgcg

SEQ ID NO: 18520 - DNA, 1712 bp, Arabidopsis thaliana landsberg
gggaagagaaggtctttgttgacggcaatgttggcggcgtccttgttggaggaagagtcggtggagctctcatcggagtcccattcctgacacacatgggcgtcgccgcccttcttcttgtagtatctcttcttttccttcctctttcccttcttgtcgtcgcccctgtcactatcactagataatggacatttagcaatgaaatgactgggcttaccacacttgtagcaaactttcttggagcggggcttgtaatccttccccctcctttgcttgaggatttggcgaaacgtctttatgatgagcgtcatttcctcgttgtcgagcttggaggcatcgatggggagcctacttgatgtagactcttctttcttttcttccatcgctttgaatgcgacgggttgcacctcgggtgtggaggtgcgccttgctcaacaatttgtttggacctttgatcatcaattcaaagctcacaaactttcctatcactttctcgggagacattagcttatatctaggatcaccatgaattaattgaacttgtgtaggattacgaaaaacaagtgatcttagaataaccttgaccatttcatggtcatcccatttggtgctcccgaggttgcgcacttggttgaccaaggttttgagccggttgtacattgcttgtggctcctctccttggttgaggatgaatcgaccgagctccccctcgatcatctcccggttggtgatcttggtcacctcatccccttcatgcgcggtctttagcacatcccaaatctccttagcgcttttagcccttgcacctttttatactcctcttgacatagagaggcgaggcgtatagtggtggcttgggagacaaagtgtcggatttgggcgacctcgtccgaatcatatgcttcatcccccacatatggtacctgcgctccaaactcaacaacgttccaaatactagtgtggagtgaggttaggtgatgcctcattttgtcactccacatgttataatcttcaccgtcaaaaaccgatggtttgcctaatggaacggaaagtaatggagtacgtttagaaatgtgagggtagtgtaggggaatcttattaaacttcttaggctcatggcgcttagaagttacggacggcgcgtcggagccggaggtggatggcgatgaagagtcggtctcgtagtagaccaccttcctcatcttctttttctttttgccactctgatgcgacttgtgtgaaggagatttcttctccttccccttgttgcgggactctcccgatggagccttcccgtggcttgtagcgggcttctcgccggtcaccatctccttcttggcgtgatctcctgacatcacttcgagcgggtaggctctaatgaagcaccgggctctgataccaattgaaagtcgcctagagggggggtgaataaggtgaatctgaaatttacaaacttaatcacaactacaagccgggttagcgttagaaatataaacgagtccgagagagagggcgcaaaacaaatcgtgagcgaataaagagcgagacacagtgatttgttttaccgaggttcggttcttgcaaacctactcccctttgaggtggtcacaaagatcgggtctctttcaaccctttccctctctcaaatggtccctcggaccgagtgagcttctcttctcaatcaaatgggaacaaacttccccgcaagcccc

SEQ ID NO: 18521 - DNA, 3511 bp, Arabidopsis thaliana landsberg
agttggaccggtgagtttggttctcaactggtatactgtgatgaaacattttcctgttatctcagtgttcattattgtagattaatgtatatggttatttgtatctttgattatgaaactcggaacatgacattcagttctgttactatcttcagagaacatgtatgactctgtatcctgaactgttttgcttgtaattaatctcccagggaagctatggataagattcaagcacgaggtcatagccgcgttcctgtctactccgataatccaaaaaatgttattggacttctcttggtaggagtcgttgacccttttccgatggtctgatttgcatgtttctctggtagcttatgcaaactctaatcaggaaattcttctgttttctaggtgaagagtctccttacagttcgccctgaaacagggactcttgtcagcgcagttggtatacgccgaattccaaggtcttgtcattattattatgcttgctatattttcatattatttccttaagcatctctgtgaaaaatgaagttcctgttgtgattaatgatttaacagggttccggctaatatgcctctgtatgatattctgaatgagtttcaaaaagggagcagtcacatggctgcagttgtgaaggttaaggggaaaagcaaaggtcatccttcaactttgcatgaagaaaatagcggtgaaagcaacgtctcaagtaacaactccgagttgactgcacctcttttactaaagcgagaaggaaaccacgacagtgtcattgtccgcatcgacaaggctaatggacaatcgttcatcagcgaggccggcagacaggggttttcacaaacttcagaggctatcaaggatggtagggtaattggtatcttcactttagaagatgtctttgaagaacttttgcaagaagagattgtggatgaaactgatgaatatgttgacgtacataaaaggttcggctaaatactctctatggcatcacatatcatatcgtcatatcatcactgagaatttccgcgtttgcaggattcgagtagcagcagcagcggctgcttcatcaatagcgagagctccttcaagccggaagttgcttgcgcaaaagggaactgtgagttaacactcttttgtttctttgttgtttatgcaagagagaaagttagaattgttgaaacttgtatttgcagggaggacaaaataagcaagggcagacgaataaagttcctggtcaggaacaagataaaatgcttggaactattaccgagccgattcgaagaaacaactgatgttgtgttcttgcttaaggaggcaaaaactctgttgcggtataaagaaagaaaacaaagaataaattataagatccaggttcttctgtatactttgatccatcacataaattatatatatatatatatatatataaaaagtcagcagaagcaatggttcaacccgatttttgaagatgctttgtttccttgtattatacaaaatacctacaatttgtaatttactccgtaacttgattcttttttcctttttgttcactcaatttttcgtagaatgcagtagtaatagttagctatatggtcacatgctgttgtggccgctattttgtaattgcacttttgaaacaatggatcaaaagtttctccatccatcgctaatctttgatacaccggtgattcggtgaccggtggcttttgacaaagtcttttagacaaggataattcatcgatggctttgtcaactttcgtgtctcatgttaacttcctttttattagacaacaaaatttttgcaatgatttgatttggtcgaactagaccaaatattagtcaaacttaatcctttttaacgggatggtaacgggatggtaagtttgattaacgttagatccaatttatcctagttaacgcaaaagttgcttaataatgtacttcatagaaataaaatttggacgtttcccaaaagaattttttttgggacaaaataaataagtgagagaaatttagactttattttttttcctttaaatcacaatatcaaaatcttacaccattaagttgtgaatgactcaatataacatataatctagttgtttgtattagtgtcgtcattgtgttacaatgcagatttcaaactcgagtcattgagttacaatgcagatttcaaactcaaaatagtaaaggttgtacaaaaaaactcgcacaacaaccgatgcattagactagtggtttaagagcaaagattggatccatgtgtttcttacaagtgcaaacgttagatccatgtggtttaagtgtagtccatgtgctccctagggaaagtgttgagctaatggttttttttttttttcgtctgaactaatggttttattgcagggatattagaccaatgtactcgattgatagaagagatgctttacgccgatgtatttgatatcagcacaagccggttccgggtcatgaggaactagggcccaaggcccaaacccctccatgttaaaaaacaaaaaacaaaaaatctcgtagatgacagcacaatcacacatttgaaatatacaattccgatattcgctaaagggtgtttgtcagatttgtataagatccattccgtacaagaagatcctgcaccaggaccaccagaaaaaaaagaaagtaaaggggtggatttgaaaaatataaaacatattggggaccaatgttaaaaaacaaaaccaaatatttgctgtatatgctaagaattcaaaattgtacaaaaccccgaccccattaggtcgatgagagagatataaaaaacaacaaaattagacgagaaaatatctaagaaaggcgtcggaaaattgcaaacagatagatatagagacgacgaagatgcatccgattaatgcggtggttgcggcgaggatgttagccggaatcagtcaatctaacgccttacaaagcgaggcgattccgtttggatcgcttgagtggatcacttacgccggaatctcttgtttcctcgtactcttcgccggaataatgtcgggtctcacactcggactaatgtcccttggtctcgttgagctcgagattctccaacagagtggttcctccgccgagaaaaaacaggccggtacgcctctttaatttttttcgactttcgatatctgtgtgttgttggctcaaaattacatacctgacttgttcaattcgtaatggctatagaatttcttaaaacttgatttctaatttcttattctgtaatttttgttaaaagcagagtgatagagtctctatttttactcttgacggagatacttgaattgtttttggatattgcagctgcaatcttaccagtggtaaagaagcagcatcaacttcttgtgactctacttctttgcaatgcagctgctatggaggttaattattgttgatttgttaccctagtttttctgatttacaacgatcaaatactgtctttgtgcacctcagaaataaagaattctgttcttggatcttttg

SEQ ID NO: 18522 - DNA, 1639 bp, Arabidopsis thaliana landsberg
tcgtcttcagacagttacaagtgcacactgacgtcatggatgatgagtgcacaatcatgcaaatggcaaatttgcttttttcgctaatgaaagtctcatcgcattatttacatacctttataaaatcattccaaacattattgttatacattccttttaagactataactctactttttcacattctgaaacacagcaaccacaagacacacttacaattacataacatatatatatatatatatatatatatatatatatatatacccaaccatcattttcgcataacaaaactcccacgtcaattatcattaggttttgagcatcggcaaaagttcttgatagcttgacatgaatttgacgaaatcatcgtatgcttctacgatgagatgatcatcgtcccaattatctctatatgtagaggattgtgcatatattctcttgaaaccgatgtaaaacatttgttctctccatttctctatccggggatattcacattgatccgcaagccaattgtcgtattcaaactgcaacaacaattcaaccaaaaatttgtttagtctcaacctttttttttttatgataacatgttttgtaatgtaatgttgtgctacgaaatatgtgtacctgagagtcatctggcatcaaatgtgtatatcttttgggaattcccgaggcttctaacttatcgtagaatgccttagtgtcttccatcatctcgtcttgcgatgggagagatactcggccggacaagaccgctgcgacccacttgctttgaagctcaaacatcggaaagggagtgatctaagaaaccaagttaaaccaatgagatctttttttttttttttttttgtgtgcacctcaaccaaacaatgagatcatatgcaataaaagcagcaaatgtattcacagaagccagatcataaacattataaagattattaacctgccatggtaagccgatgaacgaaaggctgggggcaagagctggaggaaaaacatgcttatacaacggtccaacacgattatcgtcaacagtcacctcacctttcgtgtcaagaaacgggaagtaatacttgtacctgatgaagatattaacaagataaaaacaagtcagtgaaaacgttttcaaatttcctatgttctgtgttctgatgtttaatctcttttagagatttgagccgatatgtatcttacccggtacaatgcatgatggtatccgcgtaaattgtctttccattctcgaaaaccaccgaaccgtcttcgcgggcaatttgaatctacaatgaacgttgtaacctacattcaaccgtcttatagatggagtaactgaattatcaaacaaccaacatcattcattggccggttagttagtgtaccgttgagtgaagccatagattctcgtaaccggtaagcttctcgtaagtatccggtgaagttgatctagatgatacgtggacttctttcgcgacctgcgctatatctctgcatatatcaactccactcgcagagcttccgatcactatcaccacctacaaattacacaacaaaaaggaaacgatccaagagttaaaagtgaagagaaacgtggatatatatgagatcacgtacaagattcactcttgtgatgggaattttt

SEQ ID NO: 18523 - DNA, 855 bp, Arabidopsis thaliana landsberg
tattgctatttgctacattatgattgatgtcaaaatctaaaataaaaagaagtacataaaaatggagatgcgggggatcgaaccccgtgcctctcgcatgcaaagcgagcgctctaccatttgagctacatccccaattgattatagtcatccattgtttataattgaaccataatcttggtttacgtttttgttttgtttttatgtcattaaagcctatacattttatgttgatgctggactaaccaaatgtgccaattcatgctgggaatattgtgttccctttagggtaattccaattgttgaatgccagaaatcttatgtcggttcacaagtattcatataattaatctagtaggcaaaacaagtttttttagatttttggaaacaaagatgaatatataattaaaacacaggtagctgaatttgaggcaaactaggttccatgtagaaccaacttataattcatatcgatataatatcgtacaaattaaaatcagaaaaacaaaaacaaaaaaaaacttaatccctttaagactaaaattttctgaatctatgtatagttattctaaaacctatatacaaaaatcaaaatagatatacaattaatctatattatatacaggcagccacgaatatacacgtatatttgtgttggtttgttcgctcatgtgttctgtaaaaattatcatgccagaatatgcagataatataataggataagtgcaataaagaactttgcctgaaagttaaagctaataaaaatatattttatatataaaaagaatgaacttaaaaaatagaaggtacctaattccctctacatattaaccagtcattgtggtattattccct

SEQ ID NO: 18524 - DNA, 355 bp, Arabidopsis thaliana landsberg
cattattatacaatgaattaaaaacaaactaaaggtgagaattattgaacaactttagcctttaggttactttactatattctcttgaatctaattcccttatcttgcccgtttccttggttgggtggggacttttagtatgagtgggcacttaacattagtgatgtttttgcaatattattttgtcttctaggccttatttcctggtgagtttgggacacctaaaggcacattttgtctaaataatatactgtgttaaataaacttttatatgcccatacttttaattttgtttataaattttatcattcttatcacttattactcaaagagcctactacaccatcaatttcac

SEQ ID NO: 18525 - DNA, 2102 bp, Arabidopsis thaliana landsberg
gtcaaaaatagctcttaccctttttctacacagagactactaattcagtcagcccccgaggtggaccggcaagccaacaataatttatatgaaaatattataaaataaagagagaaatatcaaagcctttaactataaaaggagaaacaaggatgcatcaaaaatatactaactcatcatctcaacactacaaacaagaaacacatactctctctcaattcatatttcctcacttttgatcagtgtgatcacgtagagtgccttgaaggagaagaaagaaacaaaaacaaaggaaaatgggatacctttttcaagaaaccttaagctctaaccctaaaactccaattgttgttgatgatgataacgagttggctttgatggccgtgagacttgccaacgccgccgcctttcctatggttctcaaagccgccctcgagcttggtgtctttgacactctctacgccgcagcctctcgcaccgactcattcctctcaccctatgaaatagcaagtaagctaccaactacacctcgtaaccctgaagcgccggttttgttggaccgcatgcttcgtctactcgctagctactccatggtcaagtgtggtaaggccttatccggaaagggcgagagggtctacagagccgagccgatttgcaggttcttcttgaaggataacattcaagatattggatcccttgcttctcaagtcatcgtcaatttcgacagcgtcttccttaatacctggtaagtttttatttcattgatgttgagttcttcaataagtcactaatatacgcaaatgaatcttaccatatcgatacgggatttttgcagggcacagttgaaagatgtggtgctagaaggaggagatgcgtttggtcgcgcacatggtggtatgaaactctttgactatatgggtacagatgagagattcagcaagctctttaaccagaccggattcacaatcgcggtcgttaagaaggcccttgaagtctatgaaggcttcaaaggtgtgaaagttttagttgatgttggaggaggagttggtaacactcttggtgttgttacttctaaatattccaatattaagggtatcaactttgatctaacctgtgccttggcacaagcaccttcttatcccggtgtggagcatgttgccggagatatgtttgtggatgtcccaaccggagatgccatgatcttgaaagtaagcttaacaacttattacttacatgttttggaagtaacttattacttatatgttttggaagtgtctacatgctattagaattttatactaattttaaatatgtttttacagcgtatacttcatgattggaccgacgaagattgtgtcaagattcttaagaattgttggaaatcactacctgaaaacggtaaagtggttgttatagaattagtcactcctgatgaggcagagaatggtgacatcaatgcgaacattgcctttgacatggacatgttaatgttcacccaatgttctggtggaaaagagcgatcaagagctgagtttgaagctttagctgcagcttctggcttcacccattgcaagttcgtttgccaagcttatcactgctggattattgaattctgtaaataaaatgtgtgatacaaatctaaatcgtcgtttctagtatttttcttttttgttgatatgtgaatatcgttgttatttcttattttcatatttgtttgaaatggtcatgcatgtctttgtcttcaagcaatctagcaataaaaataaggttttataatttctcattgtactctccgagtcacatgaaatattcattcatgtccttttgaatatatagctcacaagtcacaagtgcatattcattactccacggtcggctactttcattttgtttccttcctctttcactcacgggaaatctaactaacggctacttctctagtttaatgtttcattctttctattattgcaaaaccttgtggaatcttgttcacggaaatcttcacatgcttttaaaatttaatgttcaagtctcctccatttatatgcattttaaatagttggtaaataagaaaaggataggacatatagtacaactcaatt

SEQ ID NO: 18526 - DNA, 2510 bp, Arabidopsis thaliana landsberg
aagtttatttagaactcgtcttggatggtatgctcgtgccaactacgtatccaacccaaaatcgcatcagtttttaggcgatcatcgctcttttgggaagatttcctcccaataaattccttttaaattgacgcatgttttttttgttggactcaattgacgcttttttttacttgctagttgtatttgtgtttactttattagttttttttgttgtttttcttctttaatactagattttcgatattatgccatataccatagattttcattttaatatatgctcgctagtcagtcaatatcatgctttggttgcatgtgagggatataacacattacatgatatactcagtcgctattatgctttgggtttctttctctttaattactgaaattagggctgggtattcgggtatgctggtcaggttcgggtaaaatccgatcgggtatgtgtctttcgagtaaagaagtttagcatttaatagggtaaatctaaagtatcggtttggttttggttcaggtctaatcgggttcgtgtcggttcgggtatataatttcaaaactgctgaatactcgaaaaaattaggtatccttcgggttcagatattttatatccttatagttgaaactttattcaaatacacgaaattttatccaaatacccgaagtttttacccaagtagccaaaaattcaccaaaatatccgaaaattttaccctaataccaaaatttacccaaaaaaaccaaaattttgtctcaatatccaaaaaaattataagtatcttgcatataaatacaaatgcatttagtttttggtaattcattttggatatttggatataaatgtatttagttcaaatattaaatatacagtaagattgtatatgtataatgttcgtacccgccctgaaccggtttttgggtcggttttggttcgggtttttgggtccaggttttttcctataaaaactttttcactgttttttaagggctcaaagttcagagaaacccaagtttactcttgatacttctcattataagaaaataaacatagttgtttttggctgaaaactgagaaggattttgttgatgaactatgtggagtttaaaaagacctaacgaaacaactatgaaaaaatcagaaaattaacttactatttgattcacccaaataataaattataaatcactaaaacaagaaaccttactatttgaattttggaataacataatgatcacatgacttgtataatgagcttggatgaggatatgggaagcttcaacagttcctttgtgagttccacctttttggtgtcatccattgtaagtgcaacgtaaacttttagcacttcaagaaactccattttcagtgagaaatggcttatatgttcaagctcgttttcacttcctctgcactgcatgacacataacatctttatttggttatttgagggaattcgaatccctacaaacggatggtcctaaatgtgtaacaatctaaatcctgaagcatcaagaggaacgagactaattttaatattcatgcatcagtcatacatataaagtaagtttgcttcatatcaagagaaccataatttttaggtttggacaacgctatttggttttgctggatataataacttgctttcctcctgaatgacttgatatgtattgcaaagtcctcaagtgcaggacaagcaggaaaaaaaacattagcgaattgatgaaagtcaaaccacactgagtcaaggaagagaaccttaagtgctggaagatatgtatccgaaggaacactaaggaagcaagaacttgttcccaatgacagtttaagcagtgttgtgctggagaagactttggatgggagaacaaaaagccacatagagtttgtggctagatgaagctcagagacaccatgtttcagggaactacgtatccagtggtgcaagtcatgtttatcttcacatcttactctaagattatgtgagaacttctttatatggttacagccttgcaaagccaatgttctatccacgaaatccatgaaactcttccgtttggtgtgcaaaaagatggaggtgtcaaccacaagattatgtgttaaagtaaacatagtcctccacctcttggagagaagagaggttgacacggcttgtttcgtgggaagaaaggacaacatttggacaagaagatcatcaggaagacaatccatttaaaccatagagacataccccatcccactaacaaaacccttgtcctgctcggtctaatatatgatggttgcaaaaaaagaagatcaaataagatatttacctaaatgatttcataatttttaaaataaacaattagcagttttgtctattaaaatgttgaagtatttgaacttttcaatagttaagatctccatggacctatgaatattttcttggtgatatgcaagttttatctagatctaagctaagatttggagcagctcaacgtaattatctcataaaaggaaccacaattgttca

SEQ ID NO: 18527 - DNA, 188 bp, Arabidopsis thaliana landsberg
gacatttacaaatttaaacggccttcgtccccctatcgggtgcagggctctagcattatccttcctcttgtatgatcggaacaaccaccagcctcaaaaacactatatggagttgcgggaaagtaatacaccacggagtcattaacaacgaactttatcaagttttttgcatattaacccggtctctc

SEQ ID NO: 18528 - DNA, 380 bp, Arabidopsis thaliana landsberg
ctatagctaaaaagagaactaaaaagcttccaaggcaaatgtctatgaacccgattgtttcaccgccaaaaaaagatttccctttgcttagagcaataaacgcagcttctagttgcaacaacccttcttccacttcttccatgccttttgcttttgcttcttccgatttagcgaccacagctgccatcaaagtcggtaaccactgcattcttgaaatggaaaattagcgaaaatagtgtgatacaaatttgttctaaatcaaaattaagcttaatggttacttcttgataaaatattgattattccatgggaaggaacatcccaaatggatttttataatggatccaaggtttaaaaaccccaattgaagcaattttttg

SEQ ID NO: 18529 - DNA, 680 bp, Arabidopsis thaliana landsberg
gtgaacatatattaaaatatgattttcaaacatcatttaatgaattatgttaaatattacggtagcccgactcgagaccaattttttttattaatttataaagttcttttgtacaaactattcacaggttaattgaatttacaattgtgctcactttttcttcaagtaatttatttagatgttgtataatttttctaaatcatgttcacaattaatcaccgtaaatctattatcttagatttaactttactgaaatatgcatacaaacaataatatattttaagctgattttcaatatttaaatttgttatgttgtattgtagattttgttttcaatatgtcctaattacaacatagattgggattcctacttttttattttttattttgcaagattttgaatatatcataatattatgtttttataaataataatataaaattttgctctccttaattttttcataattttgttggttttttttgcagcaaatatctatatttagtactgatttttgtttccattactaatttacttattagcgtattttgttttttgtgttctgtgattgagattacgaagagagatattagtgattgtgtatattacaacaaatattgggtttttaaaattgttttgtttttgcaagaatttgatatatcggaatatattttttata

SEQ ID NO: 18530 - DNA, 741 bp, Arabidopsis thaliana landsberg
cttaccttcaacatctttcatcttcggagttttcttcacctaattcactaagagaggcgatttgggtatcaatgatccgggagatggtgatagtttggcgagaagtgttgaagttgtattttgtgagtttgatctggaatttgcaggagcagccaatgatatgctttaaacattctggaattgtggtctttattccttcgtaattatctttacccgcagcctgagagtgagtgaatataattgaagttgtatgtgtgagtttttaaaaggaagaaaagtagtaaagagaagtatacctcaatgcattcatttaaaacatcacgagcattttttccagctattttggtggcttccccgttgaggacaacaaaagttccgacgtctccgtttctatcacgtactctcatttcaaaacggtagctatggaatcaatgatttggttagtctgtgtaatttattatgagcatatattttgatgacggagggtcagagttcccaaacctgataagccccacgttattatactctttgcacttgttacagtacatagatgtgtctgcttgttgaagtttgttgttgcagatgctgcaggagacgtagtaccatccatgttgtggtttgtatgtccacaactgtagcaaagcaagtgaagctaacttcctacagctattaatgtttggtttttgaagtaataaaaaaattgtgggtaagatgaaatttgattagagagaggatactttg

SEQ ID NO: 18531 - DNA, 2141 bp, Arabidopsis thaliana landsberg
agttctgattatatctaagactgccaattattttttttttttgggtgtatgtgtctttcatgtgcagcttctggaattgtttggctaaagagattcattctcagatccggttcttgttcaagcatctctatgttttctaaaattggttagcagaaaacaaatttgcctcaaaattgttaagtctcacgtaggctattattctacaacattttgttcacaactcaccacaaccttgtgtgcatatgaaactaaactcaaaccaattttgaatagtgtctgtgatgggccgttttgatcccagcctattttgaatcctttgcgtttttttaagctcgatccgttatgaactcggactgacctattgctctacaccattcaaattcatatcattagtaattccaaatgtctttcttttgtattatgttgccccccgaatagttttttaagtatttgttgaacaccgaaccaataagattgaattataaatgggccctaagcccaaagtccaagcacacttaaaagtcagcgaaacgcagatagtaattaattccagatctgtgaaaaatatttaccactggcaatgagagcgcgtgccaataactcgctaaatttatttcaatttccgtggtctatagtcagccaaatcatctaattttccaaatatgcaaaaaatcagcgcgtgaggagaatttcactgttacaaacagtttgcgtcttttctctattaccccattgtttcaatttttgttttttctttcacaaaattaaagtaatgccagagtgatactacgggaaattgcagcattttctgagtttcctaactgatcaaaaaaaaaaaaaaaaaacttacatttgagagagaagaagagaaagcttgtagaaatggaaggccttatttgagaaagaagtgaataaaattgactcaagattgtaaagtctcacataggcataggctattattctctacaacattataattcagtaccacaaccttgcatatagggtggttgtgataggtcaggccgttttgagcttggaccaaactattgctctgcaacatccgagttcatacttatctcaaaccatgaggttagttagtataatgtggactaatgtatgtaggaagaagggagacaacaagagtgcaccaacacaatcaccaaaccagtagaagagagtattcgtagtgaagaagacatacaacatttaaaaccgcaaaataaacatcaaactccggatcatctgagaggtccatcaatgttaccaaaaagaaaacaagatggatcttggcctgggaatcaaaatataagcgtgtgctttccggattattctttccttttcctactttcctaagagttagctatattcacctgaaaaatctttgaatcagcttgtgcacaaaccagaagacgcctttcaaataaaaacgagctccctccaccttgctttgtattaattatagtttggttcgtgtctcacgactgccagaacagctcggaatcatcgctgtacaaggagtaatcttgtatctcgaggtttgcaacgtgccagtttacgagttgggattgcaagactttgcatagaaacaaagcgactgggaatatccaccattcgttctcgtccctgcaaaagaaatataaataagttttgatgatgcaagaaggaatctgtagtttggtttgagctcagagtgaagtttgttttcttctctcacatgctaatgttccatggctggagatacgggatctttttcccagatgatgagccatgatagtgaacatatccacacacaaatgccacaacctgcaaaaacccaccatgcacaaaggatctttaatcaagtaagaggaagttgcagaaactatagaagtcgaattttcagatgtagcttttgcataaagagagaaatacttacgacattgaccaaggatgtgacattccacaatgcataaacgcgtgtgcgactagcagagcgccttggtccgtggctaaacaaagcgctgaccccagcagggaatggaaaaatgatgctgagaggtaaaataaacatagcgagaaagacttccagcaatgatatcgagtagagttggagtagtgtgagtaacgttagagttaaatctcctaggagtagcaccgagata

SEQ ID NO: 18532 - DNA, 923 bp, Arabidopsis thaliana landsberg
gcgattttattgctgatcaaaaaaacataggtttaggtttaaactttcataataaattgatgtttttacatagaaggagcatgttttgtgtatcttgcaaaacaatcaatttttatagtatatattaagaatcttactattttaaaatgagagaatatatgtatacaaaataagaatgtttttatggataaaaaatttgaataaaatgtggagatgcggggtatcgatccccgtacctctcgcatgctaagcgagcgctctaccatctgagctacatccccagtttgatacataatgattgcagagtcaagaggatcaagaatggtagaagcattggtgaaagcaaagcttcaagatggttatgtttcatatccatgggaaaaacgaatgcaagaagctttaccaatctctggttccagcaatttcctctccatactttttcttcccaaagcttctggtaattaaaccaatgtattgacattaatgttagtcacacattcattttaaataatctctatattgatgttttttattcgaatatatattagcttatggaaggacaggttctcggtacaatgacttggaagacacgcttgctcgtgctaatgcttggataagttgttcacaagctaatggtgttcccattgtttttatgaatattcagactgaatctttgctcactaaggttagagattttatttttgtgtaacattgattttatgtgaaagacaaatgttgattgttttgtttcttatggtaaaaagatatctggacaaacagcgtcggcgacggtgaatacaacatcgctttcggatctatcgaatcttgcaaatacgagtctatatgggtttgaggattatcatgcagttcatattggtgtgctcagaccggttcggctttggtttgctcctctagaagttaag

SEQ ID NO: 18533 - DNA, 629 bp, Arabidopsis thaliana landsberg
aaatatagagatgatattgttctaaccattgttaatgtcatcacaaaataatttccgatattcacttttacaaaaataattcgactaaattcatattagccacattactgtttcggattgttcagattgacatatagagttatcatcaaattaacttcttacaaagaaattctatttttttccctccaaatgtaagaactggtacgtacaaatggatacgaatgcagcaaaatgtcattgagatatgaaagaaatggacaaagcttatttttcacttctacttcgtatattaaaggaaagaatgtgaagatcattcatctgaagaccagattgtgacagctcctatcacacgggtatggacaatctattagcttcacttcagctctatcgaaataccaatctccaaccgctatcgccaccgcctaaatcgccgtttcaaaacgtttaaaatttgattatttctcataaatttgatgttttaaacttctcaaggcaaaatgaaacatggaatgcatacctttttgtgtataacaggagaatcatcggcgaaccaagtgtcttgcctttcggtttggcaatgagcaaagcaagaattgatgaacaaaccgttctttttcgaattcgagaaa

SEQ ID NO: 18534 - DNA, 537 bp, Arabidopsis thaliana landsberg
gtacaaataaacatcatcacgaagtgagaacaatccagaaacatacctggtaggtggtaactactatctcaattgtttttttatcgaattttccagctaactgacaagttcctagagaataaatccatgaaagtctcctggaattggtttttggtccataataggccttaaaagccttaaccacagttgacctgaaccaaaaagaaaattggagctcagacaatcttcttcttttctgtttcaagacttacaaaataaacgacttaccatttcaatgggtagattgagggtcggttgttttgtaactttggccaaaaaccagtagtaagtacagtgacagtgaaatccattcccagctttttggtcttgttaactgataaaaattcacgaagttggtttggtgttcttttgccaatgtcatatccgtcagctatatgaaacaaatcgaatgtacaaaaaaaaaagcattattaaaccttcgtactactaaataagcaacccgttttcaaaggaaataaactcatgtgactaaccatg

SEQ ID NO: 18535 - DNA, 1423 bp, Arabidopsis thaliana landsberg
agtaatgctagttatgataaacttaaagaagcaaaaaaattgtgtaatttaaactttaatcataaggttttagtaggagttaatatatacatttacctggagaaaagtcacgttgttcttttggtcaggtccggtgacaaaacgagcagcctcagtcactggatttccttggcagtgaacgtcccacttatgtacatatatacaaacattaggtttcttgttaattaatgtgaaaaaggacgacatttaaatatggacttatactgttaatgaaaccatctattctttacctggtgacgaacctccagatttctaaggaaatcgtagacttggagaggagggagagggagagataaagatgaaccggcgcagacgatgagaccaggcggttgaccggcctctgtgtttgtccgcaccgaaatcctaactccgctattgttggctccagactgttgcgggagatcgagtttgtcagacattttcattatccatgcaaagttcttcaacattctttctcccaaactcatgacgctccttcttccttctattgttttcacaactacaaaagaataaaaacattttaaaactttacaaatagttaaaaagcttgaagtaccaaaagttttgaaactagcacttgtcaatatactaactaaatccgcatatataacacattttaagttacttatgcactaagtgagtcatataagtataggtgtaactaataatgacctccggggtagtcggtgggagggaagtcagtcatggagtagagagacagcctctcacacatcctctgaagagtagcggtccaacgtcgagctccatagccaaaaccaccgtataagaggtctctataaagctgatgtggccacactttatcagtcacttccacatgctctatccatgttacctgcccattttctttgttatttttgaagatttttttttcaatcacacattgctttaaaattaagacatatatcttatgtgtgtgtgtgtgtatgtaaacttataaaaatatatcaaaaagagagggaagagagaccttagaacgaccatggggcaaggcttggattagaacaccggagggacgtttggtgcaaataggagccgtagactcaaattcaacgttttggagataacaggaaacgtcagctatcaaccagagatcttctttcatttgctggcaagttcttaggattataaactctctaggtagcaccaatggtgacagtatgtgcagttgctcatatacctattttatttaccatccagtttaacatttatgtaagtgatctactgaccgtttaaaatagaactattcaaagaattataccactcttgagaaagtttgtcttggatggtccatggaatccaacacgtgaattgttttagcttcggtcacaattgttggaaaaag

SEQ ID NO: 18536 - DNA, 2291 bp, Arabidopsis thaliana landsberg
caggtggatgggttgtcctcagatttatcgctaataatcctggttagtaacatttctatatgtttagtatttacaccaattagatattaatcgatggattaataagaaaaagaaattgtttttttgcaggtatatggctgttccattgtcacatggatgcacatttaccattaggaattatgatggctttcatagttcaaaatgggccaacccgggaaacgagtttgccatctccaccgtcgaatcttccgcaatgcactcgggatcctacgatctatgactctcggacgactaatgttgatatgtcttactaaaagtagcaaagttcgtttaagaaaataaattacatttactgttgactatcaatcgtagtcattgtatccacatttttcgaaatcattgtttcttaaaattcagtatatttcttgtgtttatttacgaccatgcttccatttctctacacgttcccaatccaagactccgagtctccgacattcaaaacattactctgaacgctctcttcacctctatccatacggagataacctgccaacttggacatatatttcactggctatgatacgaaaattaataagattattatttatataattaacaatggcaaaaaaaaaatgtcaaacggatataatatctgttggttacttgtgtcgttaggtaatgaatcatacttgctataattttattgttaatttaacactattttcgaaatatatcgtagtaataattgttcacaaaaaaaaaataataataataattgttcacaaaaaaaaaatcgtaggtaatagttaacccctttttttgtttgttcgcgattcaatgtatggaagtttttttcattatattctatagtggttaatgcattaatggaacgatcggttcagagatttatgtataaggttttttttttcataacaataaaaaaaaaggataaatgggctacaaatacgcttttagacctaatgggttaaactttatcatctagcccaataatcttcaatcgaagcaactgtggcgaaaaatgtcgttatagaaaagaaaagtaattattttcttatcattagctaatccattgttttcgcctggcaagtcatacaatataattgactgattcttttgattaataaagctaatgagtaatgacaagtccatcaatatttacatgaaaaaatcaagtttttattctttacatttatttataaattaatatataaggggtgggtaaagatgtgttggagtcagtaatcaaatgcaactggcattaagtatattagttttcctgatttatattgatctcttaagtcctgagtcttactaagcacgcacaacggtacacatgacaatttcgccttttaaattaaatcgatctcgtgattcacatggcagagttacttagctgtataatgtttatgtgtgccgctgactcgagaagatttttttaaaaaaaaatatagaatatggtaatgttaattactaaatgtaagcttcaaatgttttcatgtaagaacgggaatataaggttgaattagttcgaaaacaaagaaatttggattaaatttgtagttatatatttgtttgtgatcagaaaaacaataaattagattttagaagcaatcattaggggtggacatttgattatttggttccgttcgggcataaatgattacacttttgttatataaaaagggatgatcctttatcaaaaaagggatgatcaaagtactttttcatatataacctcttttcagatggagtatattttttacaacactgaaagtgcaatcaaatttgtatataaacgaaaaacatagttgttacaatataattataaatctaacagcttcttttgcaacgaattaccttatttttggggtgtttcataaaaaaaggtgtttaactttatattatatcatctatttaaacacttatgatgagtttaattgttcaattcataagttttgtccaattaactagttttcttttttgataatctccaatttataagttgaaagagagaattacaaattttgttgaaaattctgcattaaaaatacaaaagcaaattttataaaacaaaactaaataaatttgaggtagtattaatactagttttaacatgtgacataaccctaaagaaaattacagtatataatgacttggggacatcaattaaattaaatgtttgggccaccactagtgactagtatgggacgtaaacgaacgttcacacagcaaatactaatccctgagggaagtttgctattttttttttt

SEQ ID NO: 18537 - DNA, 1002 bp, Arabidopsis thaliana landsberg
ataatgttttggatggaaaaggaatctataaggtttcattggtgtttttgaagaaaatggactgataggggagggtttattagagaattctgctaaacatgtgaaccctgcatcaattgtatctggtgatcaggtaatgtacacatctatatgtacatttctatttcaaaatataaatttccgttataatggtgtctaactttttgtggattggaggtgccactcatgttggagaattgtaatggttcgccagactctactactccatcttcaaagcgtgtttacgctagagaattgaatggctctgaaggttcttcaagttcgaaaaaggtgtgtattgtaccattagatttggaaaagtctatatcagagaatgcagaacaaagtgttgtcgtggatgcagaggtggctgattccaaagaagccattgtcccaattgatatcaagacaccaatagtggcagttgaaaaagataatgaaaaacctaagttcgaagatgttggcatggtgaagcaagaattcaagaaggagaagtcaaagaacatggtcggggttagggtcaaagttgagaagaagtagttctacttatctctgtctcttaaaaactgcggcttattgaacacttagtgtcacataagctctgttttttagttggtttcaatgttttgaagtttaggaatctttttttttctaagttcttggatttcatgttttggattatgcttcaggtttttaatcattaaatttctcttttaaagattctattaagctttcatattcgactcttattaatttatatgcattatatataattcctatctctgttctaatgaaatatctaaagagtccaaatgaagcttaccaattactcttcaactagatgtcttcgacctcctttataccttgaatgcatcatttgaatcattcctggtacagagtaaataaagatttggtattgtatattatgtttcagctttttaataattattattctcttttaaa

SEQ ID NO: 18538 - DNA, 2458 bp, Arabidopsis thaliana landsberg
  unsure (1)..(2458): unsure at all n locations
gatatgggtttgatcaggagacatagagacaccattagcaaagtagagatctctgagaagtacacgtttcacttttgtggtgggatcaaagctcatgagacgaccgtgtggtttgccttccaagatatcaaaactaaactgatggagattgtacttataagaaccatcagtgaaatacaaaacgccgttatctgcaacagtaactgcatccggtagcttaaatctaacgccgtccgcttcttccgttaacaattccgtcttcttcccgtcaccgcttatattcaacagtccctacccagacagaaaccaacctattaattgaaaattttcaaacttcgatttcaaaaaagtcacgaacccaaaccttgtaagcgtcagcgacgatgacttcgccgtggattccgaaagcgattccgagcggtctaccaccggtgttgaccaaatcttcaacgaatgagtcattaaccgactcggcgaccttgactcgtttgacccatccatcaacgcaaccagtgtagatgaaaccagagtcttcatggtaggcgatgtacttcggggctattgagaagaccgactccgataaactcagctccggtgagaaatctttcgtttattagaggcgggattgaagcagtagaggagatgagtgagtcagcgggatgatgagctgggtcaaacgtgtcgagttggtagagagtgatagagatgagtaaggggacgatgatgcagaagaagagaaaacgagaagagaggaatacaggcattgtagaaggattggttctgtggaaaaaaatggtgaatcaacaaattttgaagttgattgagagaaaaacaatcacagatcaaatcgttgaaatcttcttttccgtagtacgttatgtcacggactcttatgggctttatccatattcccagtaggcccaatatttttctagagaagctcaagccgcatgaccaatcatctaatcgtatccgtatttcggtccgtatgcgggccgttaattagctcaccgtaacatgaccgtaaccgtataaaacggttaataaccgtcaccgttaaccgtgaaaatagattagttacggttaaaaaaatatactaactgtaaccgttaattaaccgtaaccgtatcaaaagcgtcggttaaccgtatagttaaaacttttaaaatatagttgtaattgtgtataattttaaatgaataattattttactaaaacatcaccttaaatcgtttaatatgtcactactacaatcgaagttactccactactcttttgaccataaattaaattataagtagttcatattattattatttatactcttaaaattgttttttaatgttcacaacatcttctctttagaattgtttttgtttggaaaatgtaattaaattattataattatgaccattaatttgtttattcgttgatttacttaagaaaatagatagatgattcactatagatatttgaagcacataatcgcgtaaaataaatattatttgatatattactatttatttatttattttattatgaaggttaaaaaatataatattttacttcgtatattaactatatcataattatcaaataaccgtaatcgtatttaaccataaccgtatttaaccgtaaccgttttaaccgtacatgtaacggttaaagttaagattaacaaaaatttataaccgtaaccggtggttaataaaccgtaaacgtaataaccgtaaccgtagtcatgcctcaaggggacgtcttctaatcattaatatataaagaacatgcgcactaaactttgttaagttttatgacacattggaatggcttgtatggatgattggttttgtattcattgtttcaggctactatgtactccttaagagacattatcatacatttattctaagggacgatacgtttacatttttgtgaaagtgcaatactctaaagtggaaatnttagtgcttgtataaactttgatgtttcaaagtttcttgttctgtgcaggatatttcaggagatcaagtcggaggatatgtgattgcgagagacttccacaatagagatatttcccaatcttgtcacatgtggctatgtgagagagttttggatcatggtagtacgcgatgggatttccatccaaatccacctgtaaaacgcctgcattctccataaacataagatccacgccgtacttagccaccattgctgtgagtttcctcaagaaagggtatttcaacgagatattccacaatgtcgtgactccctgtttgcacaaccacaacacaaagatgatcctttattagcatgtaatgagttaataacatgacctcaaagaaaagaaaagaaattcaatttgtaacgttaccgaaggcaatgcaatccagtaatgtccatctccatcgtaacgaatgttatctggataacctggtaagctttgagtgaatacctccac

SEQ ID NO: 18539 - DNA, 1593 bp, Arabidopsis thaliana landsberg
tgtttcatcgcgggtaattgtgttgtagacattatcatatccttagtcaagctgaaagattcagatccttgaatatttgaatttgttgtaggcattgagtttccccaagatgaatcttctttcctttgaaacacttgcattgtcttcaaatctttacttcaataaactaaatgtccaaaccaacaagtccagtcataaatcatatgatattattcatgatccacataatcaacaaatacaagagagaaatgataccaaaagattataaaagcaatcctaaaacacagattccaggttcaatgacacagtaagattgtttcatgatctaaagggttccaaaagattcaaactttgaacatggctagaacttacacaacatgcaaacaaaaactaaaatcgacagattaaatttctgagtttgaacagataaaaaaactcatcaaatctcattgaacttaatgatccaagaaaacagagaaaccaaccaaaagatttttttctctcataactcaaaaattattatttttaattatatcatcataagtagaaactgagcaaccaaatcataacatcactaccaaataaattaagcgaacaagaagagagagagagagagagagagagacctttggtgctttggatttggtaagaagagatggagagaaaaagaagttaagtaataagcttgagattatgatgatgatgatgatgatgaatgatgatgatgatgcatgtctccttcctcagaacatggttgtttctttctcttcactatctttctctctcttcctctgtctctgcaaattgggtattggctatggcttaaaagactaatcttgactccttttctctttttttttttttaattatggttttcttctctcaacaaatgcatatttattcacacacaatttattaaatattttaaaatattattttgtttccatttctgaatttatttgcagagtttgacatttctatttggggtattttttcttatctttggttatattggttatgtttcaaaaattaagtatatcgaatcaaatcgtgtcacgtagtgcttttataattttcaaatcaggtttagttttattacaaagcaaaatagaaatatgtaggcaacaataaataatagaaaaatctagtaaaagatagatataaatttagaagtgtgacgcgtgtataatcagacaaggctagaaatatatctaaatatataaatgatagtattaaaatgttaggaaggaaaatagaagacaagaaaaaccaaagtaaacatgtttatggtaaatatttcatctatttcaaagatgtttaacatctttatttttaggttcatatcagcgccgttttatcaatttttatgcgattctattcagcatatatattacaaggttcaaagattctaaataatatatagagggtatctgaagtatcatattccttaattgcttcataacaaaaatgtgcagaattctaaaacattatctgttatatagttaaagataggtattatctaaacgtacttgttatgttctgaccattttgtttctgctttgattaagaggtgcttttttttttatttgaaag

SEQ ID NO: 18540 - DNA, 1416 bp, Arabidopsis thaliana landsberg
aactagtcttctcctcctccatcctttttgcaagccaattatcttacgtacgtcttgcaaaactgtcttttgacttgaaagttgtgcaggttttattgagaagttgttgagggaagatcgtccttgtaattaaagccaatgatcaagaagcagccaagaagagactctatttccaattccatccttcaattcttgtatacatctccctcactagttttcccaacagatcataagctcggatctattcaagcttctgaagcaaaggcatggaaagtcatatgatactttcttgaagagcaagttacttccagtagttgaagacattgcagaagataatcttggggtggactctgaaacatcactcaagattagtgaggagattgatatcattatcagttctgctgctaccacaacctttgacgacaggttcctatgtttcttttgctctgttgttttgttctgtttttttttatttttgtgcgagttgatggacaacgataataaagcctatggaatttcaccggtccttggaggatttattcagatgcatgtcaaagagggaacaacttgcgagaaagggagtcagatattacattgagtatcaaaggaaagaagaagctaaagtattttgtggccatggccaaattgtatgagccttacgcgttctttcaagctccgtaaaacatacagatagctatcagattactgactccttattatcaggtttgatgacactaatacaaggagaatgataaaggagatgtctatggaataaagagacatgacttctcatcagtggaagataaggtttaagtgtttttcagtaattctagtacatgtgaatatgtgattgtgttcacaatgtgataatctgtgtcctaccagtcaaatatacttcagtatgtgttacattgtcaaaaatatgaatattttgtgtatattacaaatggtaaaacccaaacaatcaaacccgaggtctcacatttagattcagttttttttttctgatacaagtaagtgatgtcacattgtgatctatccttatgtacaaaaccgtcgtctaaagaatctggcaaattttgtatatagtaaaatattagtggaccagaaatcaaacatattcaaaagaaacaatcgagcatttagtgtttttaacctcagaagactattttgtcattctagtaacggctcacgcagcagaggcttcgataatgatccagcagcttcgagctccataaagaacgttacagcgacaccaacaaacgagcacaatgctggaacaagacctaaaccgtatcttgtaactgaaaggtaaacactttgttggttgttgtttagttggcctctaggtgaagtagctgtaaaccaaaaacagtttcagcacaaaaccgctaatctcacggtgaaaaatgaatg

SEQ ID NO: 18541 - DNA, 1717 bp, Arabidopsis thaliana landsberg
taaagaattagtctcgattcaaactccgtctgttgttgtggattcatggaactgtgaccttttcaaagacgtcttattcgtcatctgaccttttctcgtacgacaggaatcagcctcgcaaaacctcaacttgaaactgaaatctgatacttagttatttatgggttcagaaactatgacttttgtccaactttaaactcgaattggggacggaatttaccttgtaacagagatccggttggtggtgggtattcctcactgtgagatctatccaaaaacaccaattacgcgatctggtactttcagatctgacgggaaaacgctcaccaatatccctatttgaacagatatctcctacctatctttccaatgagccggtaataaccggtgacgacggcgactcgacgttatggttcgcaacgatcgactcctttctcctgacttattctcgattgaagacacagttacacacactatctacagctccgaactcaacaatggtgaattgtggtggctaagaatcacgatttgcttctgtttctcaaaacttagaacgatggtggtgatgatgaagacgtaaatggctgcggcttggttgacgaggaagacaatacgtacatatatatacacataattatcgtctaggttttatttgaggaggttgggcttttaatgggcctaaaaggggtttgggtctcacaattctcccccacttcaattggattcgtcctcgaattcaatattcctggttgagcaatgtcgtccttaaaaggttttgggtaatcttcatgcattactccttcttatttccacgatatctcttgaattaaatctctttcctaacaaacttgaatcgactttactttctttccactttaacttctctacttgaatcatcgaaatgatatgccctctatgaaaacaaaactttacagaacaactttaaacgcaagtctcgctccttaggcgctttttatcttttagaaaaatctcattcccgtttaccaaatactaaaaacttttttactttcaaaacactttgttaaaatctatcttttaagaaaactcttcgacttagccttccgggacatcaccggcttgactttaacctctgctctaataccatttgtcacacccgtctccctcaacattgagacggcgtgctttcaccttacttataactttcctctattccattttcttaattcaaatacaaaattgccttaaaaataatcttaaatcattggaaactcttaatcgtataagaaaataacaatagtagaaaataaacctgaggttcccaaaatacaccatgaagagagacggacttgagcgactactcacgattctcaatgtgacatgggaaaaaggagaaaaaggggtgagtaaagaattactcaatgagagattcctttccgcccactcgaaatacgatacacgattctacctttaaactacaatcaacactcacatagaaacaaatacaacactcatatagtttgcatcactatgcaaaactataacacacatctcattcttgcttaagcaagatctccacatcataaccaggttcgatcatctccctgatctttgaacctatctagttccactggactcgtcggtcttttattgagctacaaagaacccgtcaattcaatgtagaccattttccactgttccacttttcctctgttctactgttccacttttcatcatc

SEQ ID NO: 18542 - DNA, 885 bp, Arabidopsis thaliana landsberg
  unsure (1)..(885): unsure at all n locations
tgttgagaatgttattagaaaacatatttttaatactaaaagtaattgtttattgcattggaaaatttgcaaaactacccttttttactaccttttgcaacaatacccttttgtgttgtccatttttaaaaatatctcttctcttgaacagaatgatcaaattaccttcatctaataggaacatgtaattggaaactgaaatttttacgcaaaaaaaaaaattccgccaaactttttttccgcgaaaaaaacccatagcagatgtgttgttttttgaaaatttttggcgggaatttttttccgaaatttttttggcgagaaatttattttggaatattttaggcgaaaaatattaatatttcattttgttaacctaatacaattttcaaatagagataaaatggtcattagaaatttaaagagggtagaaatgacaatgactaaaaaaaaggtagagttgaaaagggcatcatgaaaaaggcattagaaataaattttctattgcatgaataaataattagataaataaaaattatatttaaattaaacaatacgaaaaaatttgaaatgatcatctagtggctaataataattatccaaacaaaataatattccttctgtatttttagttggtgtttaaaagttttacacacaaattaaagaattatttagggagcttattggtttttgcattttttctactaatgataaaacaatcaacatattatatttcgtcaacactaattaattttaacatggtctaaaacatcaactaaaaaatacaaggggatatttaatgttcatattccctatatattgntttttaattaaatgtatttgtttttctgaatattttataaatcattctagaaatacaatgggatt

SEQ ID NO: 18543 - DNA, 650 bp, Arabidopsis thaliana landsberg
ccccatgaggacatctttatcgatgtcatcggtcctcggatcgtaatctagcctatggacctcctgtgccatgacagtgtactcacttaggcggatgtagacagcggggttgctatatgccttgggcctgtcatccaggttgtaggtgacgccggacgtcgccttgcccttgtgggccatagcataagccgagaagatggagcaaggctggccaccatgtgacgctgactacaaaaaaattaacgatatagttagaaatcatatctaatccagtgttatatacctaaataaaaaagaagacgtactcatgcttctgcatatttgtcgagattgtggttgccttggtggtggaatagaccttgcatcatcagacgttgttcctggctagcattgtgcgcctcgtcccactcaggcgagcaccacctatccaccatatgctcccagcactaaggatgcacggcgcaccaacaaggaatcatctacaaagtaaaacaagtacacttcatatcaaaagataaaaattaaggaaaaactttgtcacgaatattaaagtgttgtatttactataaatactggtcctagtcacgacatggtcgggcgtctgcttggtacctctcctaaggatggagcatggtagtgcgatggctgga

SEQ ID NO: 18544 - DNA, 1211 bp, Arabidopsis thaliana landsberg
  unsure (1)..(1211): unsure at all n locations
ttcaggtttcggggtaagagtttcaaggctatttaatttttatgctaaaactcttttagagttgagtctttgaatacataaatttccccaatcaatattctttctgagttctttttttttgtttttgtttggacaagtatgatgtttttccatgggctatggaaagtgtcctggaatatataaagcagacctatggcaatcctcctgtctacattcttgagaatggtatgatcactgtctttctctatatattctgatctatgtctcttgttttttggataagacttctcatttcttttgccattgcaaacgaataggtacaccgatgaagccagatttggagctgcaacagaaggacacacgtaggattgagtacttacaagcttacattggtgctgcactcaaagccgttaggtaagtaaagtgtttcttactgcatcttctcttctctactcttgtctgtgtnataaataaacaaaagacattactacgtgtaggaatggatcagacacgagaggttacttcgtatggtcatttatggatttatacgagatagtaaagggatacgagtttagttttggattatactctgcgaatttcagtgattttcatcgtaagagaactcccaaactctctgctcattgttactctgcttttctcagtggcaacatcacttttcttggttctcaaggcatcatgcaattgcagagcaacttttcttcttcagcttcttcgtagtagtaatgttgcatttacttaattctcacgaatatgttctagcgaaaaacatcaggcctctgttttactgtgtttgaactgcttgcccttttaaagtctatacgaattttatttttcctaaaaacggcatgcttttcttaggcccatgtaatagtgggattttttttacactgtgacattaataatgagttccgtatttcgtttcagcacaccactcgctcatataaaattatttgtaattcggtttaatttcagcataccactcgctctttttattttattgtctcataaaaaatatcaaatatttggaaaacaacacataaataaataaaaatattaaagagaaacaaattaccataactatgaatcgccaaagttatgaaaagagaccaatttctttaaatattaatttttacctttttaaggtaacttcagtttggttaattggaaaacaaaaatttaggggggggggg

SEQ ID NO: 18545 - DNA, 698 bp, Arabidopsis thaliana landsberg
ctctatgatggatcgattatatgacttataatagcttatatgcaaactcattagttgtatcgaatcctttgcttaattaataaagtttctgattgtttgtttactctattcgtctcatatattgaatcacataatcatatgaacggattacactaggaatgaacctcataaacggttagggccgagtcacttagtggcttgggtcgagagatctcgcccggacttaggcagtcctgatcggggcctttcaaaacttatatgtgattgattagtttgaagattgttctaataaagtgtgtttattggagttgtggtcttgttctagtcaaagtacttaaggctcttttacttcaattcgtatcagagcgggtaaccaatctgagattagtatatttaaacaggttagatcctagttatggaaccaacggatgttagtactggtacaggcaaagtattcttactggataataagcggtatggatagtggaaagttcgtatgacacaactcattagaggtcaaggtgaagatgcatggactgtagtagaggaaggatgggaacctccatttgatcttagtgaagatgggttcaaaatcaccaaaccaaaggcgaattggactggagaagagaagaatctgtgaaagtttaatgcaagggctatgagcgctatcttcaatggtgttgatgaagatgagttta

SEQ ID NO: 18546 - DNA, 1386 bp, Arabidopsis thaliana landsberg
gccaagtcttttaatcacaaaccaggatgttctaaaagaacaaaaatgttgctgcaaagatatgaaatcacgaacaacaatgtctgaagaaagcttagggcttagtagtgatagctcaacctgcaatagacgctgcaagttgagatgcaatttcgggaaccttctatcatccaacatctttttcttcatagcaaatccacctattgtcaataatgatgatacatataaagccaaaaaaacaaccatacaaaaccttctgaaataaagctgcaaatgttcatagacttgaaaagaaataatcaaatggtgcacaaaacaatggcaaatgcatgtttaaatccgagtcatttaaggttttagtgacaaatatagagcttttgaagaagagagtgctagctgacctctatccatttctagctccaccccatccaattcgatctcaagttcagtaacaacatcttgaagtcgatcaacatgtgtgtcaataatatgcacaacaagattcgaaacagaagttggcacagggttatcagcttcctcagaatggttcattttcaacaagaactcaagaacatgctcctcaatcacactaggaacttccgagagaagcgattgacccataggcgagaaacctaacctaggaactcgtcctaaagaaacagtgatcacagagttctcagttatcctcgcagcaatcttaaacgtattactactagaagcaggaccaggagaattaactctaaagacaagcgctccatcaacatgcccacaaaagggtccattactagcaagagcaagaatgtcctgaagcttcaatggtgggcataaagcatcaatcaaatgctgagcagattgagaaagcttctgatttcctttaggtaattcaacatgataccaacaaaactctttccctgttccttcagcaagatcccattctttgttatagtatttaccatcaccatcaaatatataagctctttgtctaaccattcctgagaactgatgagaactaaacctatgagaagcgtctctactaggaacactacttgtgaaagactcaagatctgtttcatcaccaattcgatcttgctgctgcatcattgagacgacaaaaaatcttgaatctttctcacaatttgaaatcaacccacaaagaaaaatacaaactttatcatcaaactcgccaaatcagttcctgaaacgaattgggtaaatgcaaaatctcatgatcaatcaacaacaacgttagagagacagaaaatcagatcgggagataaacaaacttacatgagatctaagtgaagctagctcatcggaagaagctgagaatttgaatctcatgaaagagactctcgacgcgtaaaagaaagaaacagtgagatttgg

SEQ ID NO: 18547 - DNA, 620 bp, Arabidopsis thaliana landsberg
acactttgggtttaacatcaatacgatcactccaagtgtgtttaaagaggttgaccacttatccaccttttgaacaagactgagttctcctctggtttatattccaatgtgtgcccacctccctataataaaccaaacccacaaaccaattaataaactggtgtaaacaagctttgcatttttgtttgacatataaatgtggataaaagaacatactttcacagtggcaagtgtcatcttattggcataagtcttggtgtatctgcaaataacaaaagtttgatttcgtcggatgagaagcttatatacaacaaaaaaagaagatgtaaaagaaatggttatatatatatatatacccggcgacttggtcgagtatcatccaaggtctccatttttcagtaatggaatagttgagagatcttatccatgcttgagttccaaggaaagggattgtcatatcgtgatcaccgctattcaacagaaacaccataccagaaaaaaaagcttacaaaaaaacaaatcaatgaaagcaaaaagcttgtaaagaagtttattattgtgtacctaatgactagagatcgatatcctctgatgctgttattgatatggaatggtatgct

SEQ ID NO: 18548 - DNA, 1878 bp, Arabidopsis thaliana landsberg
atacgtgacaagtgacataagaaaataaatatgcatatacattattttattttttgttgtaaactatttaaaatatgttgttaaatattaattattgacataaataatgatgtttgtgtacctcgaagacaataaattttggaaaaccaattgcaaatactaaaaaccatggacattttgtaagatccagaaacagaaagaaagcttacattttcatccatctcattccttgttgcaagttatggtttgataacttgtctccgctcttggttcataaacatttttattttggtcatagaattcagattatcaagaacaaaaaaaaaatgtcctaaaagtagcttacactatttagactttctccatggaccatgtttattacatttaagttatataatgacaactatatctgcctcatttagctcatagcataaacaattatggggcttcttacattatgagtgccatcggaccaaattagatttgccgacacaggttgttttgttccgatactatcgcttgaaacagtgaccatgaaagactgcttctcattcatcgacttcatagacaaaacacgcggcgacactttgaaggagagtttagagccaggaaacttgactacctttgcattgtacgtagatttttgcataccaacgttagtgacagttctctggaaagttatgttgaacggttttgttcccgacactttagccgacattgttgggtagttgaggtttcttggtaatgtcttggaaatttctttcgtgcaagtgctgttgtctccggagatgattcttaagtgatcactcgtgtagtttaaaccacagagaaagttgatgtggtctgctttggtcaattcataaacgagtccaggattaatagcatctatcgggtccacatggccagatccatatgcaaactcagttgatacaaagccagaaccagaagcattcattggccaagctacaaaattaggagatcatcaatgggtctcttgcggcacaagtgagtttgtttctcttggtaatttcaatctaagtttttcttaccagttgtcatgatggctgattggatcatggaaggagaccattgaggatgaaaagtcttgacataggcggccacgcctgcaacgtgtggacaagccattgaagttccagacagaacagagtattttacacgtctagtgtcaaactcgctttcagtcggtgaactgtcaggtgaataggcagcaaggatctccactcctggtgctgttatatccggctgcaatatgaatccacgattttctctcagagctaaaatcaaaagagactaataacaagcactaagataccttcagaatatctgaaacgatggagcttggaccccgagaagagaaagaggcaacaagaggagctctctgattagagatctcctcacttttgagaacagtggcttttggatttctgcatatacaaacagagaaaaaacaataaagatggataatttgaagtatgcagcatataaaacataaagaaaatcattactttgtggaattcatgtaagagacgagagacttgtagtcatcattggataagaaagagacagggaaagagcgaataaaagcgcggtctggttcagggttctttacaatcgatccaacagctcccaatttttgagcttctattaaacctttcgtagaatcacacagcacaatcttccctttcacaagttttccatccagacactttggctcgcataacctgcaaaatagctcaaagtagaaatggaaaacagttgccgcaataagcctagtactgtttcttggaaaaggagttacatagcaaaatccacactacatgtactcaaagcagcagattttccgtgaaccagaggata

SEQ ID NO: 18549 - DNA, 1153 bp, Arabidopsis thaliana landsberg
ctcatactgctccgaaaatcaaacatttcttatggtatatttgttctgaggctttagcatcgggatttaatcttcgtcgcagacacatcaacaaccattctatatgtcgcagatgctgtcaggatgaggaaacgtcacagcatttattttttgattgtttttatgctcaacaggtttggcgcgcatcgggcattccccatcatattctaacaagcgttggtgcatcggtagagacaaagttggagatcattctatcaagaattttggctaaaaatcaaccgcaactatctcaacttgcactttggattatgtggagactttggaggagtagaaaccagattgtttttcagcaacagaatttatcttggcaaagtacactaaagcgagcaaaggatgacgtacaagaatgggagaatgcgcaagaatatatccaaagtctgaatcattacacagaaagagaaggctgcaacggtcgggaatcgacacaacagaaatgggaacaaccaccaatgggatggattaaatgcaactatgatggctctttcaattaccgcacacaacaaacaaactcaggatggctaatcagagacgacaaaggattctataaaggagcagcacaagcagttggaggaacaatgaataatgctttggaaagtgaactccaagctttggtcatggccatgcagcatacttggagtcaagggtaccgtaaagtcatctttgaaggtgatagcaaacaggtggaagaactactgaacagaaaacaaatgcattttggagcttttaattggattcgtgaagcttggtcatggcgaaaacgttttgaagaagttattttcagttggacgccgagaacgaacaaccaaccggctgatatgcttgcaaaatctcatctgccacaagacacttcctttatttatcattactttgtaccaaattttatcacaaacgccctacactgtaatcactattaatcatatcaattgaaagaagctgttaaaaaaaaaaaaaaacttcattatatttaccgttttatgattatagaatatttacaaacaaagaattatatattatagtcactcatattatactattactacttgaattcaataaaaaaaagttggataaagatcttttcacataaacaacccct

SEQ ID NO: 18550 - DNA, 444 bp, Arabidopsis thaliana landsberg
ccgataccctgagatctttagtcaagtaagagaatttttcattgagagacatcttaaatcatatgctttaaattttcatatgttatgaaggttcatttattatttcgactttcaagacaattggtaatacatgtatttgcattttcaccaaaaaaaaatattttaagttaaaaaaaaaacatacatttttcacgaaaaaacccggactataaactatagtgcattgaaaactcttcaaaactaaattatcttttttaaagacatcacaatttgtaaacatcaaaattaatatttttaattactttcgagttttctattaataattatagataaattttataggcctgggagttcggtttactcgggttaaacggttcggtttgtttggttttccgggttcttcggatatcaaaaataatgccgaattgaacctgttcaaaaatt

SEQ ID NO: 18551 - DNA, 972 bp, Arabidopsis thaliana landsberg
caggtcgactctagaggatccccatctaccatgttgcgggctattttgaaggataatttgaggttgtgggaggaatgtttgccacatattgattttgcttataacagatcgattcattccacaaccaagcttagtccatttatggtagtatatggttttaatcctcgtgccccaattgatttgctacctttaccaccttctgaaatagtgaacttggatgctacacaacgttatgaatttattcttaagttacatgaaacaactaagttgcaaattcaaaagatgaatgaaaagtatcgtattgctgctaataaaggtaggaaggaaatgaaattggaacctggtgacttggtgtgggttcatttgagaaaggataggtttcctgatttgagaaagtctaaacttatgccacgagctgcaggtccttataaagttcttgcaaaaattaatgataatgcatatacactggagttgccgccagattttggggttagttccacctttaacatttcagattgaagccatatatgggtgacgaagatgagatcgagtcgaggacgactccaattcaagaggaggaggatgatgaggacatcacttctatacatacaatgaatggaccgataacacgatcgcgtgcacgacagctaaatctccaggtacgttctaccctagtcaattgtgtttcagagcttacgcttagggccatggatgttttgatgattaggaaccttggagaggaccagcaaggacttgggaaaggccaaggtgttgaggaggagaagcaagggcgtccacaacaggaaggagatcaagtccgagtcggctgcgactccatctcgggttccaggaccagtctgcactaaaatggacgcccaagatgcatccggactccgattgtgatggactagatatggttggaaagataacgagattatctaaccaacccaactggtttgaccctaaaattca

SEQ ID NO: 18552 - DNA, 477 bp, Arabidopsis thaliana landsberg
caatgagctcctgctcaacaacttctacctgctgaacacctaaatcctcggccactagctcatctactcgacataatacaaacaaacatggtacaagggagaaattaacatcacaccaaacatgaatacagaatacataataataatctacgcattgtaacgagatcgtaggaacaagaatcactaaattcggagttacggattttgtgttatgattttccgaagtctttatgtgtttagtacgaaattaattaagtgattaaatttaatatgggtttcatgctaaaatagaggtactaaatggtaaaaaatattaatacaaaattataagaactggaataggtcaaaaaggagttaaaataaattttctatgaatcaaacaagtttctgcaattattttttacattaaaaaccctattcgaaatgtatttatctgattttccatttcattgggttgcatgcacatattacataaac

SEQ ID NO: 18553 - DNA, 716 bp, Arabidopsis thaliana landsberg
tccgtatctaataagtgaagagtaatttatccacacagagagtttttttttaaaaaataattatttattttctttaagtgtaacgactaataaaataagttataattaaattaagaattaaattctctctatcttttgcactttttcttctttgtctatctctctctctctatctctaacctttgcttctccgtccttttctctacttcagttttctcttcctaacaagcaaaacccaaaacagatcgaaccatttttttcctttagaaattaaacaacaaaaatcatttttttgtttgttttcggtttcacctaaccaaattgattctcttacctttttatatcacattgcatctgggtttccattagaaacaacaacaaacgaaaaaagaggcttctttcgtttcagagaggggttcaaaaatggcgacgaacattgggatgatggatagtgcttactttgttggaaggaatgagattctgagttggatcaatgaccgccttcatctcaatctctctcgtatcgaagaggtacttttataaaaaaattgctggattttgtaatctgcatgtttgtttccatggatagatttctccattgtgtgcattgtcatggaactgatttataaaggacgtgcctttcgctttaaaagggttttgtttttataatgtcgggggcttaagaggattgattctgaggaatgtgttgttgatct

SEQ ID NO: 18554 - DNA, 1842 bp, Arabidopsis thaliana landsberg
  unsure (1)..(1842): unsure at all n locations
tctcgggcagcttcaattcataaaatgttccaaggaaccaaccgtctatcagagagaggtacaagaacatctactgatcgtagccgtatacgttgatgatctctttgtcacaggaaccagcttagaggttattaataacttcaaagcagagatgtcttctagattcgatatgagtgatctagggaagttatcatactaccttggaatcgaagtaattcaacataatgaaggaataatgctcaaccaaacacggtatgctcttaagattctagaagaagctggaatgcaagattgcaacatggttcacacccccatggagaacggtttacaattgtcaaagtcagaacatgagaaaaacgttgatgccacaacctttagaaagaatgtcggatgctttcgatacctactacatacaagacccgacttatcatattctgttggatgcttcagtagatatatgcaaagccccagagaatcacacgctgcaacaatgaagcaatgtctgaggtacttgaaaggaactactacacttggacttatcttcaaacggtgtacgagtataccaaggttagtgggttatagtgacagtagtcacaatgttgatcaagatgatggtaagagtacagcaggacatatcgtttacctcagagagagtcctatatcgtggtgttcacagaagcaggagactgtagctttatgttcgtgtgaagctgagttcatgggaggaaccgaggcagctaaacaagccatttggcttcaagacgtgctaagtgaaatcacggaaactgcgtgtgaaaaggttatcatacgacttgataacaagtcagccattgtactcacaaagaacccgttgtttcacggtagaaataagcacatttagcgactatatcactttatacgagagtgtgtagagaacggacaagttgaagttgagcatgttcccgacaatgaacaaaaggcggacatactaacaaaaccacttggaagaatcaagtttaaagagatgagaagtctcattggagtacaagatgtgagtgaagatcatttcaagattaaaggggagaatgttggattaaagttgaaggagaagtaacttgaagagcaagttactaatgaagaaaaaaggaaattaagctttattattttaggagatgctaagttgtggcataatttatgagtttatgagagattgagagtttaggttttaagagattttcctaagctaataaagagagtaattctttatatttgagttcttaatctttcttaaattctagagcagtttgggttttggttttgttttaggcaaattttgttttgttttgatttcgatagtttcgattttattttggttttaaaataataataaaattatttaatatgattatatctgttttaacttttaatacatgtatttaattaaaatataacttttagtgattttagatcactttggggtggttcagatttgttaaacaaaaagtcaaacacatattatagttgtttagacaggacacaggaacaaaaattgggcaattaatgggccgtaatagacccttttgagaatgattaagagacggtggcacacttatgagtttgagttttgtcaaaaacacaaaatcttcttcttcgtcacaaaaacctcccgaccaaatcttcgttcgctgcaaactcatggctgtaagttttaaatcttccttcgctaatccacgatttccttattttcttttggaacccattttagaatttacttgttaagtagggtttgctnaatctctgaaattcatgctatcttcttgttaatatgtccaattagaagtaattaatggagtgttttcgatt

SEQ ID NO: 18555 - DNA, 834 bp, Arabidopsis thaliana landsberg
  unsure (1)..(834): unsure at all n locations
gaatagcacccataatcattgtcaatctttatgcgacaaatatgacaagaccaacattcttggggtcaaaagaaggagtaaacgagatacgatggggatggcgagatatccttatgacacgtggtaagctgaaacacttttgatggatgacaaagtcacaagggggacatgtgtagaaaggacagcttgaatgtgtcaaggcacagacgctgcaaggaaacggagtctgtgttggaaacagagcaagagtatgttcatgccacttgggatggtgcatagacaagtctggtggtttctgcacacaagcaaaattaacagcaaaatcgcaagcggagcaataataaaatatcttcttgagagatttttcgcagcaatagcatttcctccggctactaaacagtttcaaggagacgaggagaagagaatgtttaggatgaaaagggtgtttgatctcaactggagccttgatataacctttatggttctcgccattgcaaccttggcagagaaaatgggaagcgagttctcctcctgtgaaccggaatttcacccagtttgaagggnnnnnnnnnnnnnnnnnnnnncacatgtatatgttccccacatgaaactttccatctttcaaacttacatctaagcgagggcataaggaaataagattctcccactttgtatacatggagaagacaagagtgactatctcaaggatgagtgatataagctttggctccggctccaaacgcagtgttttattaacgagcgacgtgaagtccgaatccaggtccaactccaactctgatgaatccgaatatttttgagaaaggagtgatatga

SEQ ID NO: 18556 - DNA, 1263 bp, Arabidopsis thaliana landsberg
  unsure (1)..(1263): unsure at all n locations
ttcatcctttctatgatgatatccttcacatattggttagggtctagtataagcgcaagattgtcaacaagaggtttcgtgacttcaagatttttcaactctttttccaggagagctttgtacttttgtatcatgaccttcttgaatcgactaggaaatgggagtgggggcttctaaggtgggggaacgaaaatgttatctttggttttagcagcacctggttcttcaacaagaggagatgctgtaggagctagttgtcgagtaggttggtcgagtataggctcttctattgctttttcaccataatcttcattctaacagaaatcctccccatctcgctccacactgtcctcactgttttggttcggactttcttttgtgggtaattctttaccggttctaagcgtgatagcatgagcatactcctttgaattttgcattgattttctggaaggtcctgtaaatttgggtgccgatgtcgacccaatttggccttctatgtatcttatcttagatgtcaatgcttcaaccttgatattgatatcattgtaactgcagtcaaccttgttatgaatttctgtcatctttttggacaaatccattgctcatgctgcttgtccttgcaaaatctattgtagcatgttcttcaaattagaatctggagttgttgaaactggttgttgtagctgctgtgcaaaccctggtgctggaagttgcttttgatagctgccccgatactgctgcttaggaacatactcctgaccctggttgtatggaacaaagggtttgggttgattctgctgttgtgaagggtagacttggtcccttgggtttgcaatattggtacttctataagatagattaggatagttctgcttgaagttgttgaaacctttattgtaacttccttggttttgcacatagctgacttcttctgactgcagagtctccccgtcctggacttggaacgtctcatcatcaccgagaaaatgaacgtnnnnnnnnnnnnnnnnnnnnnnnnnnnnnnnnnnnnnnnnnnnngctttcatatccctgcggtgcttctcattagaataagagctggtgcggatgattctatcgtaatcttcattgtagttatcttcccattgagccaagttctctaccagctcccatccctcttcaacgtccttggtgaggaagttcccagggtgaggaagttcccattggaagcggtatcaagaagcatcctgatcttgggaaggacgcctctgtcaaaaagct

SEQ ID NO: 18557 - DNA, 740 bp, Arabidopsis thaliana landsberg
  unsure (1)..(740): unsure at all n locations
ccttgttagcctaattttaggtttatagttttattttcttaaaaaaattttttgttaaaaaaggcttttgcacaacttctctttttatgtaacaaagtattacagctatataaaaaattacactttatttttacatgtcttcattgctatcttcatctgtttgttttcttcgtttacggctgtgacttggtcaaagaaaacaataagagaacttatatcttttcaacatttgcaatcacaggctccatcgaaaaaaggaaagaaaaagattttgctaacagttaaagttaccaatgataattccttaattttgcatgcttttttcgctgttttcttcccatctataaggcgtaattatgatacgatattagtctataatatagatctgatctttaacaaaaaaaaaagagtatttaagttgtaattgtttttgtaaaagtagctagtgattttgtatctcttaaaaccaatttttctaaacaaattattttcgattttttcacgtaatattagtagattagcatcgattatctagattttacataaacgacggcacaatcccgaaagtgagtagaanaatccaaaattttttccccccccccccccccccccccccctcttttttttgtgtgggggggggggcccccccccccccccccctttttttttttttnnannnnaggggggggggggggggggggggggggactttctttttttttttttttttttttcctttc

SEQ ID NO: 18558 - DNA, 1237 bp, Arabidopsis thaliana landsberg
actcccatcgattcgacaaaatgctagttgataccgtttctttagtcggaacaaacgacagtatcttaacgggtactggatcaggtaacccaatgattctgtccatctctttacaaaaatcaagaaaatgtcaccgaccctgaaatagaaacacaatcattatctcaagccaaccaaacaagaaaaaaaaaacacagccacacaccgaggaaaaagagataaaccctagaaagctctggattgttaggttgtgatgagactatttccagtgaaattcagtaaatgctcaatttttccgcctctgaaccggaatcagaagataaatcaaaagcgcctgaagaactgcggaagcatttctgaaaactctacaattctgaaatcgaaaaagggagaaagaagaagaagaagaaaggtatcagagcttcgttgtgacacactgacacagtgacactacacttgactgggttttggaagtgtttgatacccaagggggcctgggattgggcctagctcttcttgtttaaggatacttattttaacactatcatcttcaacatctgacacttaaaaaaatcctacaatttgtcagttgaaaattgtacaaatacaacatcaattatcaaatatcaactgccacttccatttacacagaaaaaggatggtcacagttttattttatccgtggcctaaaaacaaaaaggacaaaaatttatgaactgcaaaaaaagcaagattttgaacagatgagagacctgtgaagtctaattaagctctgctctgcttttacttctcttcatctttgccttaactcttgactttgccatcagtgtctctactgtatttatgaagttcccaactgccatcactaccagaagaatcccacaaaccatcacctgaaagcgacaacattcctcttactctacttcctatttttttagtctttattctctattgaatcaggatttgtcggcctataccgggaatagacccgttgaaaacaatgccacgagagtgagaaaaatatacctgccattcattaacaactccagttactgtttttcttagcaacagcagtccaacgtatgcttcaaacacctgagttttagcaaagttacaaacagaaaacctcaacattaccagcatgaaccgtgcaaagtttctttttgattgttgtggaaagagcaaagaggttgtactgtacaggccatctagagaattttgaatgggaaatattgac

SEQ ID NO: 18559 - DNA, 880 bp, Arabidopsis thaliana landsberg
ggggtgctaagtttggtaatatttctcaatgtgcagagaagttttgtggcagaagcaagtgctaagagaaaggtactagagagttattctttttatcagatatcataaacagagactgatataattggttggttatgtttttgatgatcaataataggttcatatagtgtatttgggtgagaagcaacatgatgatcctgagtttgtcacggaatctcatcatcggatgttatggtcacttcttggaaggtatttacgattagttttctctttctcaagtttaataatgtctcaaaatgttactcagatttcttgccttttgttccatgttaaacagtaaagaggatgctcataattcaatggtccatagttaccgacatggcttctcaggttttgcggctaaacttaccaagtcccaagccaagaagatagctggtactcattcttcttctcacattttcttacatgaaatcttgattgtctcaacgagaccatctgattttttttcttttcattgataatgttgtttggccacagatttgcctgatgttgttcatgttgtaccggatagtttctataagctggcaacaactcgaacttgggattatctaggcctttctgctgctaatccaacgagtctcctacatggaactaatatgggtgaacaaattatcatcggtgttatagacacaggtatgaatgtttatttgtacatccattctctgcttatagtggtagacttcttaagtcttgtgtttcttttgattctttttctttgtgcatctatggctaaaatgttgtctgtggatgtaggagtatggcctacatctgaagtatttaatgccaatgctttggggcctgtgccaatgtcactagatag

SEQ ID NO: 18560 - DNA, 617 bp, Arabidopsis thaliana landsberg
tgaagtttctagatttaggttttgattagtggattagtgattattgaatttgattttcccctgatctgtttcgatttcgaattagggtttgtttgatgctattgaattcgtacaaagttgcaatctttgaatgatatgttttgacaggattatctctcaagtcacaagagctaacagctctgtttttggcggtgagactgtattgtagttttgtgatggagtttgatattcacacgttacttgactcggctacattggtgactacactttttgttatctatatgatccgttttaagctcaaagctagttatatggacgacaaagacaattttgctatctactacgtcgtaagttgttctttctttctttccttttttggttctttttcgagaatctcaacttgtgtttttgaagaatgtgaatcatatatttgaaaagggttataaagtagcaacctttaattccattagtttccatatgtgatcatttttgttagatttcctttgctaatcactttgagtttcattgttgaaatgtttagttgtgaagagttttaaatatggttgcaggttattccatgtgttgttctatcagtactcattcacccattaacacat

SEQ ID NO: 18561 - DNA, 1604 bp, Arabidopsis thaliana landsberg
tttcagcaaagtcatttagtgacggcgaaacatttttttgaaatcaacgatatcacctgctttagtgaatcgcttttatctatcagttacaattttgtatctcgacagggcaattttgctgctgattcgttagcaaagcctgcacttgtggcagcaaaagctttctccattaatggaatgtaaccgtaactttttcccctttatctaatctaagtttgttaaaaaaaaaggtataagacgatgaagttgtttagatttttcctattttggcttttattttttttggaaaatattaataataacacaagatccgttttatttattggggttgcaatgttttattttttagttttcgtttttatgctatcatataatgttgcaccgtaaaaagcaaaatataaaatttgactcaaattatctctttctttaaaataaaagtattattattaaaaaattacaagatattgttttatgtcaagaaacatagttatatggtaggataatatatttttcataaagaatttttttcttatttcaagagacatagtacaattatatatttttctggattggtctaaaaacatagaaaataaatgagatgtgttataaattataataaccatttattagcttgattttgttttttaatttttgatccggaattgaattactcgaacctttctataattatcttcattcctacaacaaagctaaacaaaactaacatttaataaatcagtttaagaaattgtcaatcgtatatatggttataacaaatcaatatttgacaatcaagttgtttcctactataatgctaacgatttcgattattatttttttagttgtttagttctatataattataattaagttaaaaatattttgttttctcacaaagaaaaataacaaaatgatgtttttaattttacgggatatgttatatggtagcacgggttttggtcgatattaatacaagatatataacacgggtgaaatcagataattaacaatcaaaatacaattaaaaaaacaaacaaacaatattaataaaataactacaacttaaatttagttataaaaaactaacatgcagtctaccgcggtgctcttatgtaagagccaaaacaatatacgaagagacgcatacgtgtcaccgtgagtggatgatatgatacgtttcttcagaggcacgcaagtaacgggtttgtcttgtgcattgtgagaccaaaggtctctcccatgtctaaatcctctgaaccgacaccgtttggaagcttccactcaaaggtatagagaagagaagcaagcatgagatgcactgttttcaaagccaaaggcagtcccggacaaattctacgcccagccccaaacggtgtaagctcataatctgtaccttttacatcaatctctttccccaaaaacctctcttgctcaaaatgggtcggattttcccatacaagtgggtctcgtcctatggcccacacgttcacaagaacctgagagtctttaagcacagtgaatccaagaatctcaacgttggtttcagcttttctttggaggagaaatggagcagcagggtgtagtcggaaagtttcttttcgacc

SEQ ID NO: 18562 - DNA, 713 bp, Arabidopsis thaliana landsberg
aggttataaaacctaaaacaagacatgattctgtttcttcactttggattgtataacacatattttaagatttcatttattgtttcggttcacaggggatgcgagagaatcagaacgtggattctcgaatgcatgatccaagacgccatgatacagagttgagactcgaacgagagaagatggtaaacagagaacttgaaaagcagaggatagaacctctaatcggtccactagtgaggcgatacatgcaagcaaagagagataaagaagttgaacagagagagagagctagcattgagagccagaggatagtggctcaagagaatctgcgacaacagagattgcaggttaaaaaaactgaaacaagacatgattctgtttctttactttggatgatacaacacatagagaagataacttatactatgttttcttactgtgacagtgtgacttgtcatttgatttattgtttcggttcacaggggatgcgagagaatcacaacgtggatgctcatgatcaagagaaaactcaggaactcggtttcaaaggaaaagagggagatggagtttaagaagaaacggagtttcgagaccaccaaagagaactctcaagatgatttcttttaccgcaagaaactgatgtgtttttcctttgaacgcaaataataagttcattttgataaactgatcgtttcggaatcaattgtgttatt

SEQ ID NO: 18563 - DNA, 550 bp, Arabidopsis thaliana landsberg
gtttagggtgtacggtttagggtttaaggtttagcgttagaattttatgtttagggtttagggattagattttagtgttcgggatttagggtgtagggtttatgtttagtgtttagaagcaaatatattataatactttaagaaacaagaaaatcttggtttgcgtttcggatttagggtgtagggttcctcgagccgattccggacgactttcttttggcttttcacgcgttgtcggctcggaagtgcgattggctgaagcatttttctctggagcgaattgaacgtgcgctttgtcttcttcacggcgtttcttgtcctactagctcggagtcttctgatcatcgtactcaattctttgtagacatgcaatcgacgaagcttactcttcggaggtttacgccaaaaagaaagaggataaggagaggcgattggcggaggagaaacgccttgttgaggcgggattgatctcgccgcgagccgctcctgaggcatccagagatgggaatgttattcccgatgctgtcgcgtcggttgatgcgacacccgc

SEQ ID NO: 18564 - DNA, 1282 bp, Arabidopsis thaliana landsberg
  unsure (1)..(1282): unsure at all n locations
ctctgtgtttccctttcagcaacaacaatggatgacatttttggacttatccaaaatgcaaccaacatgaaggcaacacctttcagttttggggcaggacacgtccaaccaaatttagctgtgaatcccggtctcgtatacgatttaggcatcaaggattacctcaacttcttatgctcacttggatacaatgcatcacaaatctctgtcttctcgggcaacaactttacttgttcaagccctaaaatcagtcttgttaacctcaactatccttccatcacagttccaaacttaacatcaagcaaagtcaccgtttcaaagactgttaaaaacgttggacgaccttcgatgtataccgtcaaggtgaataacccacatggtgtttatgtcgcggtgaagccaacgagcttgaattttaccaaagttggagagctaaagacgtttaaagtgatccttgtgaaaagtaagggaaatgtggctaagggctatgtgtttggagaattggtttggtcagacaagaagcatcgtgtgagaagtcccattgtggtgaagctctaactttgaatttgagtgccaatgatgatatttgatttatgaagtttagttgcctatgtttgaatttaaggtttacaaagaatggtgtaatgttgtgctgatatatcatataaaataatacctagactagcacccgtgctacaacacaggtttctggtttttataagtgagaccctatgactcatcactaatataacgttaccgcttggtataaagggcaatggagacattacagttgtgaaaaagtggtggaaccaactctttaaacctaagttaatggtcttccaacagtagaccagcttgtctaatgcctttgtgtttttaagcgtaagttcctcgaatgaaacaacgtgctctggctctaaaccctaaccaggccaagctcaataaatttgaggtccataagctggaaacaaatgcctttttctcatgtttttagaaataaaataaaaatttgaccctaattttaataaattccattctaaaaagacaaaaaaaaaagaaaaaaaaagaatggatccaatgttgtagcacctacacaagtctagagctgggactgatccaaacatgacttgttccaaacgtcaccatattttgatgtccaacatttaaccagattaaaggcttgcaaatccatgtagtcgccaagataccgacgctgcacaacagattaaaaaaaacatggttcttggatggtaganaaaataatcaatgatagtaaaaacat

SEQ ID NO: 18565 - DNA, 761 bp, Arabidopsis thaliana landsberg
ttataaatagggaaactgttttaaggtaagctatgtattcttattttttccgactatatgttaatataaatgttgacattttttaatactttttatgcaataaggggaaagacagttcaacttaaaaaagcaacaataaactgaagccaaaaatcattaaaatgctcatcaaaatgctcgatgaagtcaacccatatttagaaaacttgagaatagctagggacaaaatttaaactaatacaagtgagacttcctatatgcgtattgttagtgatcgtataggtaaggatggaaagaattattacaaccaacaacatctgaagtggctgcagtgattcctggggattttgtgaaaggaatgtcatctcgtgacataatcattaaagacaaaacaactggcagactacaaaggattagtgaaattcatccctcttattcgctactacaatatcctttcattctctactatggtgaagattgtttcagaactaagatacataaaggatacactgggaaaagcaataccagcaagattaagtccactagtatgggacaatggttttcttttcgggttcaggaaaaggagaatgaaagccatactcttcaattgtgtaggagattgtttcaacagttcttggttgatggttattcaacaattgaagctaataggttgtcttatattaaattcaatcaatcaaaaattcgttgtgagaaattcagtaacatcaaaaaagcggctgccgctggaaacaaaaaatgaa

SEQ ID NO: 18566 - DNA, 451 bp, Arabidopsis thaliana landsberg
ggctctttcaacgagcccatttgactccggatgcctgactgatgcaaaatggatcttcgtaccaatttgctcacaaaaatctctgaaagcttcggattcgaactgtgttccattatccacagtgatggcctttggtaccccgaaacgacaaacaatattctgccagaaaaacttttgaatggtggccgaagttattgtggctgaaggctttgcctcaatccatttggaaaaatattccacagccactacaacatatcttaagttcccttgggccggtggtaatggacccaacaagtcaaggccccacctttgcaatggccagatgggttgtatgagttgtgtcaaggacgaaggttgtttttgatctcttgcacatttctgacaaccttcgcacttttgaactaattccgctgcatccgaagctgccttcggccaataaaacccttgacgg

SEQ ID NO: 18567 - DNA, 2611 bp, Arabidopsis thaliana landsberg
  unsure (1)..(2611): unsure at all n locations
ctacgaactcaggagatactacaactagatctaaaaagcataaacttgaactatgaggtggcttgatccctgaaaagggtaagtaggcagctcgtctctggtggagttcagctaccccccccctcccataaaaaacgggggagtgggtccgtatatccatactcccacttttatttgtcttgtaagttctttacctatttcggcataaataaaagttctactttttataattttatattacaacgagcgacggctcggagtatcttttacgccgccttggctacaacgcgctatataaattttcgagttagaacttgccggaaatactttacgcaaaacctcattctatcttcagaaaacccggttaaatcttaacactggtaccccagctcgttgctaaacgctcgtccaagggtgagtagaatcgggtcacaactgaaatgattttcacaaaaaaacttaagctcagttcattcatagtggctctatccaatgaactgttcggagttagcaaacaactacaacccggttagattacaaaaaatcaaactaataaaatttattgtggtctaagaagcaaaaccaagttcttaaagaaaagtggataaagccatccatgcatatgttctacagaaatacggataaagacgtctaggcacaaagtcttaagatgaagccgtcctaccatggatatctactcatgctgttcagtcgggagagtcccagcagcgggcaagtacgacccgatctgatcggtgactcccacctcattcgcaagagtctcgaccgatctatgacctttggggcttagaggagccggttcgggcgcaggggctttgagcacttccttcagcttagatgtgagacgaacaaggttcacctcggcattggcgaaatccttgggcgagtcctcgacttgttttttctcgatcgccaaagatccaccgtcttccagcgccttgatcaattgtgcattagcccacgcttgggacaaatacatgaattggttgttagcatcctcgaagagcgacatcttctcctcagccatcttgagcctggcggtgaaggcctccgaagtttctcgcctcgccgtttgcgtagcccgagccacttcgctttccataagtcctctcgcctcggcaaacagtcgtctgcaacgaacaacctcggagtccatcttaaggttgcgcttggccatcttgatggcattctccttgttgacaaaggcctctctcttgatggcaacctcggagataaccgcaactctcgcttgctcggcctctttcgcccttgcctcatcttcagccaacttattaaccacctccagattgtttcgcatggccaaatcataagactggaccatccgattcatcgaaccaacggcctaaaacatagaggcaggcatccacattcattacagctcggaaaacacaccaaataaccaaaatgaataacacgcttacccttaggcggaaggcgtactttctagattccagcagagtgcctagaggcggaagtaggtgacttgcacacttcccaaggagattcgctgaagcagccttatccttgaaaataggaggcttctccttccttttcgttgctttcttcttcttcttcctgctcttgttctcttcggagtcgtcaacctgcggacgctttcccgaggccttgtcgccagccggaagcgcgacgattgctttcctagccgcttcaaccggcggatctgtcaaaaccacgtgggtgtcacccgcttcaacgggctacgatgtggtaggaaaagcagcctcgggggcaacttccagatcccttgtcacgtcgggactaacattcgcactttcagcaccgattttctctaccgcgacgcgcttctcctcggtcgcacgcttctcctcggcagcaagcctcttcctctcataaaccacccttatggtaggtttgctagtctgcatgtcgacaaaaaattgggttcggtgatctgaagactctgagctgaaggggcaaggaacaccgtgaaacaatcgaagcgctnnnnnnnnnnnnnnnnnnnntaaatgctttgtccagtggcactttcgggcggatagctcttgataacacgagacgagatcttcgggacacggcttgaggaatcgaattgggagatctacgacaaagtaaagaatataagcgaaaatcgtaacaatcagctcgggcatgaataaataagccgtaatatctatactacccaaaaatccccatttcgtcagaactttcccgaggagatcatcgataacggcatcctctaaagccatgaagaaaaagtagtcggtgtaggcatcattttgctcggaaaaccctcgataattttcctgtttttagcaagggagatgtaatatcgatccgctacggacttcgggactcgttggatctctaaataattcctcagatgggcaagcgtgacctcggtttcggtctcatagcaatgcaccagtatccaaatgagatgcctcaaagatcgagccgttatctgagagagagctatctgatacaaggtcacgtnctccaggnctagacaaggntcgancaccagggaagcaaagataaagaatccctcgtatagagtgaagccact

SEQ ID NO: 18568 - DNA, 897 bp, Arabidopsis thaliana landsberg
  unsure (1)..(897): unsure at all n locations
taatatattcaaagaaaaattaacgtttatacnactagtacatcgtgttttcgatagagagattagaaaaacatactaaatcttgatacagaatgaaaatgaatcaagaacgagctcgaagccaaacttggaaagccacatcatatcgcctatcccccatgcatatgattgttgtgatttggttcttaacttgtttatgtatccaactgattaattgagccgaagagtttggtgattaattatgcagaattttctcctattttcatgtctaattatagaggcctattttgacatatagatcttgacctccggcgacataattcctcatacctatgagctctccggtccaaattacataacccgacccaccatttcggatatccttattagcaaacctggtacaattacaatccttagaacacctctccttacattcattcaacccaattgtctggtccacaattggtgtgcttgtctccggcatcctcatcctcttcattagaagaaaaaatccatctccgtggcatacagccgtgacttcctcacacatccctcgaatatatctcccaaatctcaaccagtcacattctttggaacaaagcctttgatacaattacatgttggtgacgttttcatgtcgtaataattgtcacgaccacatatttggtacaaatcgcatttctcggttggtaaaacgccaaataagttccattatgatgatatcgtatcccatctggatatatgtaataatccttcaggagtcagtgtaaatctcatagtgcatgctatggnnnnnnnnnnnnnnnnnnnnnnnnacttcctctctattctctatgaagttgttaacaacgtcaaagtagcttcagttttgcatcngtcgtatgtagagctgtcaaa

SEQ ID NO: 18569 - DNA, 1617 bp, Arabidopsis thaliana landsberg
catagtgctaccacgtagtacaatccaaatatatcgatcaaggtgatctgtgtttttcaagtaacatatgtaagcagtagaagtagaatagttatttcccagcagttcaagagcgtcgtaccggcttctatgagtacagtaggtggatttcgcaagggagaaatcgatgagaagccatttttcatattcactctgttttctgaaacagacagtccaacctcttcttcttctgatgaagcaaccattgattttggaggcgacgacctctcagttaaacctcatttcctttgtccttctttacgtctcaagaaggcaaaaaaagccgaggattattctgttgaagaaaactttatcccgttcaatacttccccacacttccccagtataaaaagcgctaatcaccaagtccggggtttgcttgattctgacagccatgataagatttgtaagctccctgttgtcccactcttttggtgtaacaataaagaaccttactctgtacaatttttttgcggtgcatgccgagtttcaaagcttggcacagactattatatatgtctcacatgtgatgaaattttccacaaagaatgtgtggagtctccacttgagatcaaacatccttcgtatcctcttcaatctctccaattttacactcctcctagagacactttgaaatttttggtgggttgcatatgttgtaacatatctctcgaaaccatgctttatcattttccacccaaactgagtttgcatccgatttgtgcgatgaaaccaatacccattgtcatagaccaccaaaaaaggcatccccaccctctcactttttttcccaaacaaacttatctaccttgcgatgtttgtggcctcattaaagaacatattcccacttatgtctgtgttagatgtgtctacgcagtccatcaagattgtatctatttcccaaacgtcattaaaatatctcgccaccaccaccgtgtctcttttatctcctctattattccaaccagaaaatggtcttgcggagtttgtcgtcaaaagggcggtgaccattgcggcgtgtactcttgcaataattgtgacggttattttgttcattcaaaatgtgcaatacatccaaaagtgtgggatggaaaagaactcgaaggagtaccagaagaagatgatttgatagacgatggtgagccgttcgagaggatatctgatggaattatacaccatccttttcatagtcaccacttgcgacatgagatgagcataacttatgatgaaagtaagtattgtcaagggtgtgctcttccaatctatgaaggtcagttttattcatgcatggaatgtgacttcatcctccatgacagttgtgcaaatgctccacggatgaaacggtatcctttatatccacatccaataacacttaaatttgccaccgtgagaaataatagtttcacaagtcaatttcgttgtgctgtatgtgatcgtcatggtaatggtttcttctatgagcatcacggcgaagataaaatgttccggctagatttacggtgtgccttgattacaaaaccgttggtatatcaaggccacatgcatcccttattcctactgtgggacgacacagagagt

SEQ ID NO: 18570 - DNA, 303 bp, Arabidopsis thaliana landsberg
actgctgcaggactgagagagttctttcttagggtttttgactttaagtttaattgtgttttgagttgggtggggtgctctaaaactaaaaaaattgactaagtgtttggcggaataaggtttttgggttcccgctcattaaaactctatcttagcgtttatcaagtgctgtaatataataaccaaaattacatgacatttacaattgcaattgagtgaaccgtgctataacggtatgctatcaatgaagactttttttgtagtgcatattatattaggtggtaagtgtgcaccaccaatttt

SEQ ID NO: 18571 - DNA, 3993 bp, Arabidopsis thaliana landsberg
tgcttttaacttggctctgtatagtagcagcagccttatgcctccttcgtaactcagcaaactcttttcttatcttctctccacgaacaactgaagaaaaagaggtgggacgagccatatctcaggtaagctcaaagtatctccattacaatgagattaagatgcaaaaccagggtaatgacttgagacaaaagtgttatacatgattggagaatagaaattccccttttaagttccttcaggagacagcgtgcttggtatcctctaaaagaactttgaacacgtaaaatgccgtggagagtacggttccttgtgtcctcaagaaccccaatctgcaatgcacatgagactcttattcctgccccttataaaataaaagtctttgacaccagccgacaagctattatacctggccagttctgaaaaacaactttgtgtagccaacttgatacatctctggcaagatattaaactgatggagaattgcaaccgaaacacttagaggatcttttgctgcaatgttctccagcagaaggaaaccatacctaaagtatgacaaaagaaaaacagcatgaccattcaacattattgcaactaaaaagtatgggaagcctattataagaggacatgcaatacaatgaaagtgcaccaactggagatggagttgttaccttcgggcaaatttatgatgaaacattctcgtgggaaatccagaccgggatattcgaacgacctctaggacaccacaacatcttagctgctgtaagacaagtccttgctcatacaacccggcagactgaacattgtttggctttatgcagcgaataaaatgtggggtagtgttccctagacgttgcatcaattggaaaagttgaccctgaaaaaaatatcccggcatcgtcactaatcaaatattataagatgacgtttccttctaaagtaagcagaagccttttggacaagaaatggacaacatatgttgatgagatgaaagctgtgatgagtaaaccctcaacaaattttaagagcagaaatagaagcaagctgtgtttaaggaaatcacccaaccttaaatttagtagctacactcaaacgctgggaatcagcaccacctgctttgtataaaggacccacaacgggtttttcagattggatcagcatgctagaagcaaatgcttgaggaaggaggcaagaacaagaggacaaaagttgaatagaatccgaatgcaacaagtctctattcttctctagaaatccagtcgtctcatatgtaacctgattcggagaagcaagtgaaaaaaagcaagctgtcaagaagcattcagaccgagactaggttcctgtttttgaataacgcaaaactgtgtttgtagtcacagagagttcaagagctgttacctctcctgcataatgcacaactgtgaaaagcttccctttatctcctctgaaacatgaattagactgtagatgctgttttagcttgtttgcaagtgtcaaatctgtgccatttgggtatgtagattcctcatccaaaagggagagcagccccaatggtttctgcacagacaacagacgtaagtgccttaaaataaatgtttgactaaagtaagcatttaaccaattaactacggttttatagtgtgtaatagttaaactctatatcttctaattaggttatccatatcgcttcctagtctattgttttctgattatataccttttcaaaaagactcagacaattttggttgtcctcaaaatcaacccttgtccagtcaatgccatcctggatatattcctgaaacagtagaaagaacattaataacttggatgacagaaagttgagcttttaggttgtagttctatgtgaatgcacgacctagtatatttaatacatgtgcccgtatagttcatttataaaggagcaactttacctcttgctccagcttgaatagatgacggttaaagtgttgctgcaatctctcatttgcataatttatacagaactgctcgaagctatttttctgcagaggaatgaaagtcgtatagcaaatcaataagacacataaatcaagaaatggaaacacaaaagcccccagatatagagttataccccccggcactgtttggtatcattgcaaactgaggtctaatgatagctggtagcaattgtaatctttttcaggagaaagctcagagagccagagaacaggaacatacatcaaatgattcaaagccgtagatatcaagaatactgatagatctgccagttcgcctctttcccacagcaagagatttgttgatctgttcaaccagccagtcaaacaggcacgaatagattgattttgctaaagcatctcttgcatcaatggcctggaagcaaataagaaaaactttcaccacaaaaataaatgaacaaggcttgattccaaataagtaagagggggcatagatcatgattacagtgttaaaaccaaccctactcagaataaaagtacacacaaagaatcaagtgaaaaaaaaaatctttctaaaaggcctacctgcgatagtgttagcttctgtacaatagtatcattattaactctcatattacgctttgatagagctagcttaagctcattgatgttgcacccaatcaatttagcaacagttgacaaacctggaaaacaaaaaaacaaaacagcagttatatagccttgcattgcgcaccctgccaaatgagctacagagattaagcagaaaatttgctccaagtgaatgaaacaaaaactatagaggtgacattttcgaacaaaatacagaaaaacgtgataaatttaaaggagcaggtatatcactattaaggactgaagagccatactttcatctggttcaggttcaacgtgattttcgttgtcaataatggtaaaagaaacattccctagccataatactgcagcaagcattgcaaatacattttcttgatcttctttactaacatgcacaatatctaaagcttcctgaaacggcaacgtaaaaggtcgaaataaatgtctcgaagttgcagagaaagaaaaagagaaaaggtttgacttaatgagggagttaccttaacggcgtgaaaacgttcagcgtcatcaactccgttaattgaatagcaattgctttgtttcaaatagttatactgttttgcacttgtcaaatttaacttctctgatttaacaatgagcgaaacaaaacgtcagataaacaatattgttccaccagttagtcagtaaccatatatatgaatatgtaaatttctatcacactaatcattttcacttgcaatagatccaacataagatctttaaaagagaactgttgatcagatatccaaataatacctctaagtgtaggtgaagccccagcacaaagttgatagaatatatgatatgacctttctccttccgtacattgaaccactcttgactatgaaagtgtgacaacagaacatgaaaggatgtcaatattaaaaatcatttttcaacatgaaagaaactgaagcagcaaaaatattgaggaatttaccttttctagtaaaactgcaaaatttaagacaacaagaaaaaagctgtcagattttgtaaaggaaaattgaaaaaaatgtgtgaagcagcactaaggtttatgcttacatgtttgaatttgagcacccgaaatcttccctgtttcactaaaatgaatttctatcaacttaccctgtcaaatttaacatcagagaaagattaagagataaataaagacccagaagttttaaagacacagagtaaaagaaataagagtaaacaaggagtttggacgcttacaaaacgactagaattatcgtttctcaatgtttttgcatttccaaatgcttccaagatgggattagtctttagtatctcatactcgatcccacttccacctccaagagcagccaagtattgcatcgctatctttgctgtctcagtctttcctgctccactctctccg

SEQ ID NO: 18572 - DNA, 755 bp, Arabidopsis thaliana landsberg
atcagcgactttggtattcgctgcaagacgacgtccattgttctgtagcttatcatcatcgtcttcttcgaaaccaaacacgagaaagcttgttctatactccaaacctggttgttgtctctgcgatggtcttaaagagaagcttcacgctgccttctctctttcatctggttctgattcactcaacgacgttactcttcaggtctcactaatctaatctcataattatgattcaaagctttttaaaattgtattagagacttgttggaatggaggattttggttggattaagtagatgcaattgaacatgaaccctcaaaattggagttgaattttgtggcattgttgtgattatgttattgttaggtttaggcctgggcgtttgggtattcgggtcgggttttttgggttcgggtatttcggatttagaaatctaagacctgtttgggtattttaagatttcgggtcaggtttggatcgggtattttaaatcactatgaaacctaaaattgtattagagccttgttgattacgatttcgttgtcttgtcttgtaacggacatgaccaatctactcattgtcaattggtttttgaaaagaatttaaatttgtacttagtttgtgggattaatgtgagttcattgggaattgttaggtaagagatataactacgaatcccgagtgggaacgagcgtatcagtatgagataccagtgttggctaaagagaattctgatgggaaagaggtttgtgtt

SEQ ID NO: 18573 - DNA, 402 bp, Arabidopsis thaliana landsberg
tgtgcgcccctcactgagggtgagcgcacagatgccgacgcctcatgctggcgccgggatgaccgtggcctcgacatggtcggggtggagtgtgccatgccgagcagtcggtcgacgtcgtcctgccattgcttcatggcccctggtgaggctgtggagcttggatggtgtcgcagcaactccctggctgctgacaatgctcccagagtcgctctcgacggagtccgggatgtctgtgcatctgtatgctgccgtgcggcatgcacagtagcagcgcccggcatagggcggttgggaaccagtggtgtggaagaagcagcttcctcctccacctcgaaatccatcaaagtctcggcgcggtgctcaacgattcgcacctacatgctgagcgaggaaacaagc

SEQ ID NO: 18574 - DNA, 560 bp, Arabidopsis thaliana landsberg
tcgtcgagaccccctagatcgacgtggaaacattcgcgacttgggccacagtcctcgttgtcaaggctgtggccatcatcagagcaatcggagaggcagtaatcacatgcggtcatgaagtcccgcatggcactggggtcaccgagcccagagaaatcccaaccagagtcgggctcgtcatcttccttggaacccgggggcccgtaggtcgagacggccgtcagtcggtcccaggttgaccatatatggtaccccggaaggtttggatatgcctttatgaaagcgtccaccgaagcgggattgctcggtgggtcaaagctgaatctaagaggcacaggatgggaaacggatggtacctcttgatcgatggatggtgacgaagtcgcgtcagggacggactgcaccgttatctcaggtacgaggctaacgcccagcaagcccttcgcgagcgtgctggcgtcgtccgtctgcttggggttggcgtgttgcggggaaacgacgcttgtcttcgtctcagacgcgaggtcaacgcccgacgtgtccacagctggggcgccggt

SEQ ID NO: 18575 - DNA, 890 bp, Arabidopsis thaliana landsberg
agaaaaaaatatatatttttctctactaaatttcagaattgaaatctattttttggaaaagatatatagcaaacatatataaatggataaaaactaaactaaaggttagtaaatcatctcacctatgagtcaacattaaaattgtcttttccctacccttacatgttactttcttaatttctatatatatgatgctatattcttaattacattatcaaaagtagctagttttgcaattcacccttaaaaaaattagataaccaagaaaaaaaaaaaaagtgtgagcaaacaaaaaaaaccctaaatcgcgcacaaacaaaacgaaagcccagcgtaaaggcctctttaatataaatgggctttctaagcttatatatatttacgggctttatgtgtgtacagagaagaaaaaaacagacagaagcagaagggataaacaaacaaccaggcatttgtccacctttcattttaagcattaaccatcttatcttttcgccttggaacttccccataattacaccacagactagtcttgattatcggttatttttcttattacacgagggtaaattagggaaaaacacttctggagcctttatcctcatgtccaaccaaaatctttacacaattcctagttcttaagaaaaaagtggaaattttcctttaaatttagtttaaaactcatacaaatccttctactcgaccactggtactctccgtaagctacttgctgaattcgattattgattttgggcgtagaagaagatgaaggcatcgatgaagtttcgtgaagagcaaaagcctctttttagggctaaagttcctttaagcatcttaggtttaccctttcaatctggaatcgtcgccggagaatccaaggagctcagtct

SEQ ID NO: 18576 - DNA, 1743 bp, Arabidopsis thaliana landsberg
cgctcggcgatgggtcaataaaataaatacgtcttaaatgggcctagcccactacatgttttacgcagttcaacattttaaatccgcttaacttgcttctgagtaatttaataagtatataagcctcatagcttatacccttctttagttgttttagtacattataatgaaaaaaaaatatatatataccttttagagttgtgaagcatttcatggtaaacacagtttagaaaataatagttaagaaagtcttgcttcttttgctgaccacttttcaaagccaaaccttagaaacatcaaacaagcatagagacatgacgatgctccaagatatagcttctaaaagaatttgtgtagagcttaatgccatcaaaatgatattggttcaaggatagatcattttgcctttgggtgttggacatgatgttgcaaaaggttgcgagtcttgtgacttatcttcacaccatgatcggtacggtctaatatatttggatgaccgcccacgacaaataattatgtattttcatatctattttattaagaaattgttttttttaataacaaaaattcacgtttaaaccaattgtaaaagcggagaagctatcgaaaaacaaaggttctagctctttttcatcactatatttactagttcttttttcttcgaattctagcttagttaataacattcttagtcgtactacttgatttgttacataacttacagtcatatattatgtgtttctaataagattttgctatcatttcatgtttttgagttttctatgaaaacactccatattcaaggctaaaaaataattgattgttttccatatgaaatgatttagtttattctttggtatcatctttcaaagaactcatcttttcaagaacttgtctctatagtattttcaatgatagaaaggcacaaaaaaaaaaagaacgaagaaaagaaaaaaactaaaaataagaaagacagaaaactacatagaggcatggtttagttatttttgtgcacctccagcctatgataagggtaacaatagcaagtacggagtagataaaaacagccacggtgttcaaattttttgggttgtgaaaaatttaggacccgttccagtgttttaaaatgtttgtctcaggttggattctggtattatgtcctgccttaaacataatcattgaaatatttatgttagtacaaatagaataatatacataaaccacggtgttcaaaaaacaagaaaacaccaacacacacaaaccacaccacgtttctctaaaggaaagtttgaaattaaatggatccaaacagaacagaagaatgtatcttgactcctaaaagagatttgttgtggagggggatgtattatcggggaatgtatctttactcctaaacagaaaataccacagatatattgtgaagaatatttctcacacaagttacggtacttagtttgcacagtccctaatcatgtgggatctgatatttgataaatataataaaaattaaatccaaaaaggaaatgaccaattatgaatatagaatgatctcccaagggatctagtagaggagattatgtttaagattccattgaaattcataaaaacagtgagattaacttgcaaaagttgaaacgacttatccaaaagtgagagcttttcgaagatgcacatttggtaaatcaacaagaaaagggaagtctatgattagcgtgatgatgcctcataatctttatctaatga

SEQ ID NO: 18577 - DNA, 671 bp, Arabidopsis thaliana landsberg
aaaactttttaaaatttttacaaaatttgtctaaactctctataaattaataattataaattataaaacttctataaattaatataatttatcaatcccgacgttattaatttatagagattttactgtatcatgttaatacataattttggcacatacttaccatattggtgaacgtcatggatttatagtcttcccatgttaagccggcctcctcagacttattttcaaatatcattgcatgctctctctgaagctcttgcatgactttaggattttcacttatgaacttcacggtagccccaagaatccgtggcgttgtttcattagcaatcacaaagaaggtatatatgtactcaatcacattctccatgctcattgtttccttttctccttctttttctccaaatataatcttagagaactctccaaactcctctccggcttctctcttcttcaacacttcctcctttagcaacgtcttcatcctttttctcgcctaccacgaaaacatcaccatcacgacatccattcgtttgcatgaaagcttattcatatatagtgctagtatagtaagattactgaatacttaccttcatcatattatagacacctatcccaagtaagttgaaaggtaaccgaaaccagccactcggaaaatatctccacat

SEQ ID NO: 18578 - DNA, 1094 bp, Arabidopsis thaliana landsberg
acttagccaatctgggggcatcgttgcttaatacaaaaacacataaggaaatgtggaagctctctctttgtgataacaacagctagtcgttctctttcatatgttaactagtcgcaaagatagttcatggatgagaactctccaatgggtataaatcttagcagtgatgtcaaggatacgttggatgaaggagcatatggagatagcaaatttgggttgctggactgtgatcttgaatgcacggctcagaaaatcttgaggaaaagaccggtcaagcgctcgtggtattactaccatcagggactagtgaccaacattacaacttctttactcgatctcatcctttgtttatgtgtcggtcattgagtctctctcccatccaactttcaaaactatatgacccaaaaagtcgtcccttgtaacatttaaatttagtgaacaatcaaatcaaataatatatatattaataagatccattaaatttgggttttcttacgtgaaataaagatgaaccacgaattttacctaccaacaatattaaaacccgacaatacatggtatttctgtatttaatccacaaggtccacaaccattccatattcatattctctctttaattaacgtttgctttctcttccatggccaactcccacgtggcagttctcgcttttccattcggcagtcatggtcaggctatcctcgccgtcacccgtcgtctcgccaccgcagctccttccaccgtcttctccttcttgaacacctcacaatccaacttctcgttgctctcctccgatcttcctccgaacattcgggtccatgacgtgtccgacggtgttcccgagggatacgtgctctcgaggaatccacaggaggcggtcgagctgtttcttgaagcggcgccggagatttttaggagagaactcgcggtggcggagactgaggttggtaggaaagtgacatgcatgctcacggatgcgttcatctggttcgcgggggatatggcggcggagatgaaagtgtcgtgggttgctttctggacctccggccgtcgctcactgctcatctatacacagatctcatcagagaaaccatcg

SEQ ID NO: 18579 - DNA, 759 bp, Arabidopsis thaliana landsberg
gagttttgccgaatgattgaagatagagcataatcgatcatacaaatataataaatcaaggttttggttaaaagtgaatgttgtaaccaatcacgttcgtcaaatccacctaaatcggagcttcacgtcacacatatttgcttcacgtaaacatcaagaatacctaaaaatatacgaaatcatttatttacataaacgcaaacccaacaacactaaccacgagatcagaactagtagtagcaaacgcatctccagcgaccgcagggacagtagtaagtagatcgctttgacgtttcaagacaagagagacatctcacggcgaagagcagagccaatggaaccgcggctaggaggagccaactcagcacatcttcgcctgaggagacagcaacttcgaatttaacgacggaggaaagggctaagaggacgagggccaccgtgatcatgactattaccggcaacggagacgtcgatactctacaccgtccgcagcagcagccgtggtaatgcatcgccctctcactgttttctttggtttgtttaatggtttacttattgatttgtcaaatgctagctttttattcctcggaagatagtgaaacaaagaaagataaagcgagagataatggcttgttaggtacactataaatgatattattatggtcgatgatgataccactcactgtttttagaaaaaaacataagtactagctagtggggtaacgaaggaatttatgtggtaatttacatatgtgtttt

SEQ ID NO: 18580 - DNA, 971 bp, Arabidopsis thaliana landsberg
tgtttgcatctagtctaatttcatcatctcatcaatacaacatcatttttatccatagtgttcacatcttgacttaggttgtaggtcggagctcaagtctccactctccggggatataacggcgatccgaatcgatttactcagctgaggatttctaaccacacgacatatgtttctcgtaaaccttgatgtctactattcccacggatcctccactgcatgaacaggtccgcgccacccgagagtacaccaccccttttaggcgatccgttgccaggagggtacgtgccactctcgccatctctccacgctcagtgcgcgattgtcttttcatgtatggaatagccgggttcaagcttaccctgtcccattctcagggcatgtggctagataagatagtccttgatcaacaggcctacatacgcatccaatccttaattgacccgggcggacgatcacctgttcctagcccaagtctcgatttaaatatttccatccttaggattgtttctgttccttaggatgaaagagcatcacagggaactttgcagtaagatcccatcattgctccaaatgaaaatattcttgcaggtagaagccatcctttctcgagctaggctaaggataacctctatccacaagatctaagcaaggctaagcatttttgtaaatcatattttgatacttcacagaagtatctataaaggtatggatatcaaggaaagcaatgcatcaaagggtttcaagcaattcctataaacctaatgcacatttcactagacttaaagtgtgcaaaaattatttaaaaacacaaggaaggggttgcatgcaccggggcttgccttcgttcgtaggtgagtctggctcggatccacaaatatcaaagtagaagtagtttcctgcctgagactccgagggtggtgaggtcttctcttcagtgacttccacttcttcttcgcgttctaacataa

SEQ ID NO: 18581 - DNA, 933 bp, Arabidopsis thaliana landsberg
agatgataaaacaaccatagagtcgctgcaacttgattatagagcaattcaagctgcaacaaatgatttttcagagaataataaaattggtcgaggaggttttggtgacgtttacaaggtataatattatatacttctacataatttatcgattgttttgttttctttttgctacaacacatttggataatgagattgataaaaatggatagggtacattttcaaatggaaccgaagttgcagtgaagagactgtcgaaaacatcagaacaaggtgacacagaattcaagaacgaggttgtagttgttgcaaatcttcggcacaaaaatcttgttaggattctcggattttctatagaacgagaagaaaggatattggtctacgagtatgtagaaaataaaagccttgataacttcctatttggttagttgcatttgatgaattatttcaagtattcgttaaccagtcctgaaacatggttagagctaactactattcatggatgttcacagatcctgcaaagaaaggtcagttgtactggacacagcgataccatatcattggtgggattgctagagggatcctatatcttcatcaagattcacggctcacaatcatacaccgtgacctcaaagcgagtaacattctcctggatgctgatatgaatcctaaaattgctgattttggaatggcaaggatctttggaatggatcaaacccagcagaacacaagcagaatagttggtacctagtaagtcttccacttgactactctctcacatgttgaacattttattttgataacatattaaagtttttgatgtggatatccagcggttacatgtctcctgaatacccgatgcccggccagttctcaatgaaatctgaaatctataaattcggagtgttagttcttgagattataagcggtagg

SEQ ID NO: 18582 - DNA, 748 bp, Arabidopsis thaliana landsberg
tacaattcaactgttttagtctattttccaatatttaagtacaatgatttaaatttataatttttaactccatatacatgattataaacgctcatatgttatttgatataaattaaatgaatattttgtctaatttttgtttatgatttaatatttttatttttaatagatttttgtatattgtgtatttaaaatatcatatttataatattgtatgttggaaatgcttaaaccacctaaaattgcatatgtttcgattagacgttatatgttttaactattgtgtgagtgtttgcttcgtgcgtaacgctttcttaaacacaaacaagtcaatattttatactacacaaacccattaatagatattagtcctaaacttaataaagcatatataactattcaagtccacaaaatcttttaccaaaagaaacttttaaaatataaactttcttacatgtctagcacgtgtccgaacatttccaaaaagatactcaatctgttttgaaatagttgtcgtttaacgtttttacacataaattaagaaaacaattaaatttatagttgtcgtttaatgtttttgcgcataaattaagaaaataattagattttatattttaccttttaagagacattgttgctaatatttctaaagaatatctaattgtttgagtccaaaaaaaattacccaaaaaaaacctttgaccattaaaaacttgcttacatgtctattacgtgtcttaaaagcttt

SEQ ID NO: 18583 - DNA, 712 bp, Arabidopsis thaliana landsberg
atgagcaagttctcttccttcaaccctggaaaggctcatcagtctaatgaatttgtcgttggaaccaggaaatggtaaatatatattgattccaacgacttctttaaaaagacacaacaatatactaatgaaaatgcatcacaatatataggagacttgaagttcatccaagagggtatatggatgaaaaagacaaatcattttctgtgtatctatcagcagaagggtttgtcaacaatgcaccaatgacaaaaacttacgccaagttcaagctgcgggtattggatcaagttagctggaatcatgttgaggaatcaggtatatatataggatccatctttattaggaggaatttgttttggaaatttagtcttgtgatggtaaaatactagtagtaatcttttatttttgtaggtttgagctggtttgatgcagaaccttctgaccaaagtggctttgcggatttcatgcctctggggaaactaaatgaaccttatttggtaaaggataagctttatgttggagttgagtttgaagtcgtttctaccacttattactgttagcttctaggctgtactaagtcttattgtgagctaaaaataacaagaaatgttataatgtattgaataaaatgttggagaatgtacctactgagacttggaggtggaactacattgacctagtcttagccaaagtcagatttctctttttt

SEQ ID NO: 18584 - DNA, 1263 bp, Arabidopsis thaliana landsberg
  unsure (1)..(1263): unsure at all n locations
acccagcttaacgggctagagagtcactgggacgaagaaaagcctgtgatgtttacacgcgtcacttaaacaatcagagggtttcagagatttctcgaacgttccacagaagtctccacaactctgagaagaaacatcatgaatccggcttttttaagaccaaaactcatttaattttcaacaaatgactatcagaagaagaaacagagcacatttcattctctcataacaaatatatacatattaatcagaatcacgaaaagcgaagaagcgaaagagagaagaagatcggatgggagtggattactacaaaggcctccaagtcgatcgcagcgcaagcgacgatgatctcaagaaagcttatcgtaaacttgccatgaaatggcatcccgacaaaaatcccaacaacaaaaaggatgccgaagctatgttcaaacaaatatccgaagcttacgaggtacatatagatatatgtctgaattccaacaaaagattcatctttatgaatcttgttgctagagggcttttgagaaattcaacttattgtcttaagtagattctgttatagtctttagttatttcgtgctgttgcatatggtagctgcgtcctctgtattttcataaaatatcttcgaagttgtggattgattgttaggattacttgtctctattgggtacacgtatttgtgattttgcgtctttgttcctgtttactgattctctggatgcttacaggtactaagtgatcctcagaagaaagctgtggatgatcaatatggtgaggaaggtttgaaagggaacgtgccacctccggatgcaggtggagctacttacttctctaccggggatggtccaacgtccttcaggttcaacccgagaaatgcggatgatatatttgctgagttctttggcttctctaacccatttggcggcggaagaggtggtacaagattctctagcagcatgtttggtgataatatgtttgcttctttcagcgaaggaggaggcggtggtggtggctctatgcatcacggtggagctaggaagnnnnnnnnnnnnnnnnnnnnnnnnnnnnnnngccttgaagatctctacaaaggaaccaccaaaaagatgaggattactagggagattgctgatgtcagtgggtaagtgatcatcaaacctaatggaaccctatacgttagcttggctattcaattaggaaaccgttggcttgggtgtttctttgtaattcatagtgaaagcagatgttgacctagt

SEQ ID NO: 18585 - DNA, 1762 bp, Arabidopsis thaliana landsberg
  unsure (1)..(1762): unsure at all n locations
taagttgatctgtagtgcttgtagcagtaagtttcagttacaaatacgttttgtaatctgatatcttcttttacattacgaaattgtaaatgtaattgcaccccaaattatttaacgaaagggggtttttgtattgatagcacacatctttaagtcctgatggtaaattgttgacgattgtgggagacaaccctgaaagccttctggtagaccccaacactggaaaggtacagaaacgatctctgtgttacgtatccctgaataaatatgctttctaactaaatttggaattttctacagacactggcaacgctatnnnnnnnnnnnnnnnnnnnnnnnnnnnnnnnnnnncacccagatggattcacgttctccacaggtaaccaggacaagacctgccgggtttgggacattcgtaacctgtcaaaatctgttgctgtcttgaggggtaccttggagcaatcgatccattcgctaacatctgatgggaagtacatggcatggctgagccggctgactttgtccatgtgtatgatgtctcaaacgggtatgaaacggagcaagagatcgacttctttggggagatctcgggaatatcatttagccccgacacagaagcactcttcataggcgtttgggaccgcacttacggaagtctaattgagtatagccggcgccacaactactcctaccttgattcatttctatgatcacccgacataccagaggaataaaagagccgatacatatgtgctgctgcactctcctgtcgctctgttaaactaagaaacccgagaaaagagaaaacataaactcaagtcgatctctaatggtgtaaatgatgtgttgtgcaagtactagtaggaatgttgtcacagagagcggatttagttagttaatgttcatttcttgtatgagtgttggagttcgtgtattgtacataagtatatgaggttcgggtgagtttgcatcaagtctcaactcttggcaaagagacaactttactcgagtctgtggctcgttatttggctatggtcacttgtagaggaactcaatttgagatgtttctgccgattgttggatcaaattatatatcatgatgtttcataatatttctgtttcctagactattaaagtgtatcagtggtaagtttctctctctcttctctctttaatatcttttagagaaagctaaactctccgatcaaacctttgccttctggtttgattcgaaggctcatgttcctcacatagtgggctcgtgtctggcatctccgactactttagcggagttggctagctttcttctgacagcgatggcttctttagcgtcgtcttggtcggcaccactccggaagcagtagcttacatagtatcgtcttgaccggatttcgggtttgtctccgccgttgttatgtttttcttccagttgtttatttacttacaataaattttattagggatgtgttgataatatcgattgaagcgaattatcgcttaatgaagtgtattattcgatgcttttacttttgagtttgcaattacaggaattgattcatagcttttcaatgaattatggactcttattcgctttgatcaatttttgtaaaatctgtgccgctgtgtttttggaattcgggaatcaattgtcttttggaagatcctttctttgcaaatttgatgatgatgtttgtcgggattctctaattaaaaaccgatggacttctgtgtttaaagttcaaacagtttccggtggctttca

SEQ ID NO: 18586 - DNA, 260 bp, Arabidopsis thaliana landsberg
ctaattttgggtcaaaaccagcttcaatcacactttggattacagcttctgaaccatcacacagataggaaattgccaagcaaacatatctcaagacttcttcaagtatgtttgcagaatcttcaaagccttcttgtctacttcatagcttccgtgttgttgcaggttctgaatcttttctatccctttgatcagagaactttacacgagtggccagtctccatttctcaaaacatccaagaaagaaagattgtaagtta

SEQ ID NO: 18587 - DNA, 880 bp, Arabidopsis thaliana landsberg
ctccttctccatgcgcttgttggacaccttcaatattttctctgcgtcgaatcctggcgaacaactataattgtacatcgttgtagatctcctgcatacttgcctccattaatctgcaaatctgctaataaatcacagtatctggactcgaaccccagacctcttggtgtggaagcattaatgaactcttgttaaccattggaccaaaggggcttccactacggttttagtttaatattaaagttatataattttatattaatgttgtaacatgtgtaatattataattgttaatcatatattttttattttacaacaaacagattaagtatgggcaatttccagacccaacataaaatagcaataaatttgaaataaaaatgagacccaacataaaatagcaataaatttgaaataaaaatgacagttaatatatacattcataaagaaatctgattaaattctatttatttgaaatttatactctctttgtatcataattcataaataatgattttatgaggtttaattttctatcaaaaagattgtttttcggcaaatttttatcaattaatgttaataaattgtgaatttcaagaatcattaattaagaattttaaaatttgatgaattactattggttaatagtctaaatttattaatttgttagtgtggacttggaactcaaagattgactaattcgcttgaacgtaactaactttttcttttctttttatcaaattcgactatgtacaaatgctcatttaaacgtggagagaatacataccctttaaagtgtatttttgaggtctagacataacattgatatcattatgtttcatgatattgagtgcaaaagttcgatgtggctatcttattc

SEQ ID NO: 18588 - DNA, 551 bp, Arabidopsis thaliana landsberg
gtctgggtctgggacgtccatctttataccacaattcagtagatattctttttgtttctttgaatatttacgactcaacattttcgttataatcttccgctgtcggtgaccttgcaatcatcgcatcaaactcgtcgtctgaaatgaggagttgcttttcattatcgccttctttggccaaagttggatgagaaaacgatagcaaaaccatgatcgaagaaaatatcatgaacatggttttattctccatcttaaaatattttgagcttttattcttaattgtttttttttgtttctattatatcagtgaagatttctgcatgtatttatagtatcaaatctttattaacgttattatttagtaattttttattagtaaaaataatttttttttatttaactctcacaaacaatatcttattagttatcaacataatttatatcttttgacgttttacaccatttctaaatattgtatgtttaatgcattttagtttatgacaatatgaattaagttgaaataaaaatcataagcgtttcattgatagaaa

SEQ ID NO: 18589 - DNA, 637 bp, Arabidopsis thaliana landsberg
ttaactatgcaaccagggctgggggggtttgtttaagaatatatccgctccctcccatatgcaaacttcttgcaaatgttccttagttgtagctagcgtttgcgttagtgtcttcaatacccaaagatgatatccaagttcttaaggtttccatcttttaccccattgttctaggtaaagaaaaaacgaagcatcatactttaatagtggagattgttgacaataaataaagatttattcaattttatcaacgttaaaattaactatgtaaccaacatcaaaattattggtataagaatatatttgttatctgccatatgtaaacttcttgcaaatgttccttagttgtagctagcgtttgcgttagtgtcttcaatacccaaagatgatattcaagtttttaaggtttccatcttttaccccattgttcttggtaaagaaaaaatgaagcatcatactttagtagtggagattgttgacaagaaataaaagtttattcaattttatcaacgttaaaattaactatgtaaccaacatcaaaattattgctatgtacaattaatcaccatatatctgaaccacaaagcgagtatcatcaaaagagagactaaatctcaaaatcgactataatctaaag

SEQ ID NO: 18590 - DNA, 1066 bp, Arabidopsis thaliana landsberg
tcattcacatgatcactgtgggggtccagcgtcgacttcgacacgaagcgacagaagatggaccactaccgcagcatcaaccagtcgccgtcaccagtccagtcgtgcagacaaagtggtcccatgtgccattgactttcgacgccagagacgtcgacctgcgcacgcaccccacatcgatgccatggttatcaactgcagcgtgtcaggatgggacctgcacaaagtcttagttgacaacggcagccaggcggatatcattttcctccatgccttcgaccgcatgggcatcagccacagcttgcttaaaccttcgaacaacccattgtatggcttcggtggcaaggacacctttcctgtcggcaaaataaagcgtaccgtctccttcggtgtagccccaatgcacgaagcgagcaagtcactttcgatatcgtcgacatggtatatccatacaacgccatcatgggccggggctccatcaataagttcgaagctgccatccacggactgtacctatgtatgaagataccaggtccgctaggcgctatcacggtctacggcaaccagcagacggcgcgcaacatagagcgggacttcgtgcccggtcagaggaacgtgcactgtcttacgacccagtgcgaggtcccagcgcccgccagcccaaccgataaacagcacgacaaggcacagctgcagagccaagacgggaccaagactgtccccctcgatcaggccacgcccaagcagacagtcactatcagcgaataccttacctcacatgaagaagtgaagcttctctgctgcctgtccaagaacaaagatgtcttcgcctggtccgccctcgacctggtcggagtcagccgatcaataattgagcacagcttgggaattgacccttcggtgcgaccaaaacagcaaaggcttcgcaaaatgtccgacgaaaagacagaggccgccaaggcggaggtgcaccgcctcctagaggctagattcatcgagccagtgcgttacccacatggctctccaatgttgtaatggtgcagaaacaagcgggaaatggcgaatg

SEQ ID NO: 18591 - DNA, 1146 bp, Arabidopsis thaliana landsberg
acttaagaaatagtttaattttcatgaaccttatgcataactcctaaatattttcttttctacatgacctgttccagtgattctgtcctttggactagttcatggttggatttcattacaaccttagcagtcggctagttaactacaaaacgaaacggtgctcatcgactgaaataggagttcaaatgtggttagagatggatctagtgaggactaataatttgcgaagttagctacctttcaaggtaagttcatccaaagcaggataagcagacttttcctaattctgttgtccttgcagctagaaaactacaaatagcttccaaggccacctctagcgcccggaattcaaacggggattctatatagcaacaaacaaacacttcaatgccaaaagtgaaaagagtgaatggttcatttgttcttatgtagacatcaaaagatcgaagatttttcaaattttctatgcttaaaatgacaaaagttaaggccttgaggggtaccatcttcttcacccacatcaccatctccgtgagcaccatgttcctcgtttcctacaggcaatcttctctgaaactcctctaggacggggataacattttcatctgacgaatctcggatcaaaacctataagcattttcaaataaccaaatcaagccatcatcacttcaaaaagagacaaaatgttcaacagtcacataagtatcacaacgtccagctgaaatagtgaacttttaaaaaaagtcttcacatttagctacaagccagtaagaaatgattctgacctcttcggcagtgataatcgccttgatatgctgcatccgaccaaaacaaacacgaatcaattgaaaaagctgtgaaaaatccaaaagcagaggagtgacaaaaagtcccaacctctaagttaagaacaatggctctttctcgacccaaaatagcagaagggtaaaaaagattcgggtcaaggatccggagatcacgagcgtggatctgaacacggtgcataatcacgtgtttgtcaacgtcaagcacagttttttgccccgtcgcgtctatggaaatccaactccttgataactgagatgttttcctcttcgccgtgaccaccggcgatgaatccacggaacaagttctccgtcagtgaca

SEQ ID NO: 18592 - DNA, 1851 bp, Arabidopsis thaliana landsberg
aaatgataccgattataataacattttacatagaataataacatgctaatttactaaatatcgaaataatagttgtctcaacatggtaagataatcgatatatgaataataacatggtaacatactaaatatcgaaataatatttgtcttaacacggtaagataatcgatatatggataatatttatttgaacgtactaaatgtttcatttaacgtactaatgtttcatcgaaccttttatttttagtttaattaatttaggggtataattgtcataaaattaaaatagtagaagacaaccgtgttttttttgtcagttaattatcattattctgaggatagatagtcatattacccaaaaaaaaaaaagtaaactaataaatgagtggcatgatatataagctacatgcccaaacacacatccttgtctaacattgggctcaaatagatctagtcaagtaataatttgggctgtcataatttatcaacttcaatctttttttttatatatatagcaaaagttcaaaagacaacaagattgatggcaatgtatatttgcactatgaaaaaacaatagaagtattagataattaatacttgaaccattttttcaaatgaaacagtttttctttttgacaataatgaaacagttttaaaaaaaattagaagtattaatcctgactgataccttttgaccaataccaatttcataatatatggtgatataatcaacttaactaccaatcatatgaaacaaaataaatagctaaataaaagagagagtaagataaaagatgaataaaaagactacataacgacataatagtttttgcaattttagcaaattactaatcagaaaaaaaaaaaaaaattactaatcagaactaaaatatcttaaacagaccaaacaaattagtcggtgaattaacattaacaacaacaagaatccaaaaaaggaaaagaaaagacatcaccaactgtagatagtctcaatccaacaataaagactaagcaatacaaattttttttttacctgcttacattttctaagtcccttttactggcatttcttatagactggaagcttcaccttcttctttcataattttctcctaactcgctttaccttttcataatttggttatttaacttcaaggtctagctctcttgttactgcaagttgggcatttgtaatgcttgatgtgttctgcttttgcaggtgttatcttcacacattttccatggaaccatttctcacacgcgtcgcagcaaatccagaactcatctgtaccgtagttgtctccacaagcaccacaaaccgcaccttgttcatcgtcttcactctcatcttcactctcatcttcttcttcttcttcttcttttggcggtggagatgacatctttgcaacctttgagagagattcggattggcgagactgtttgtgaggaatacaaagagataaaacttagcagagattgataaaacaaaatggtgaaacagaagagataccttgacgccactaggtttgcttttgctattattgttgttaacagatagatccttggactgctttgcattgccgctcacaacttcgaaaatggttggcagctcattaatcatctggaacagcctcttcctgaaaaagaatcggtccatggcataagcttaaaggcaagtgatagctaagttgttcaaacaaacctaatgccagagaagaatttgatgagattcagaatcaacaactcattctgctcaagcttttcgtttaacctgtcagctaccagtatcaaataatggattcagtgattgttgctgagctctcaacaaaggtacaatgcagtggaaactac

SEQ ID NO: 18593 - DNA, 1436 bp, Arabidopsis thaliana landsberg
  unsure (1)..(1436): unsure at all n locations
cggcgtagtagtcaatcctcgtggcgtctgcgtccagaggcgttagagagagaatcgaagaagctaggaactttaattccactccgaaaacgcgtttcttgacggagagtttcggctcgcaatcggaggaagaagaacagagacacgaaaaggacgaggaagaagaagaagaaaagaagatggttggtctgaaggaacgtgtatagagagattgtgtgagtgttaaagtagaaatcgccattcttctttgagtcttcgtttcgatctctgcttccttatctgcgtgaagccagagcctttggtctgaatcttttgtcttttgagtgtgcaacggtacaatggatatgattatgggacccacccgtatttttttggatttctattttcaacagaacaaaaataataatgaaacttttggagccaatcggcccacaaaattgagaacccgaatcgaattatttggatagtaagataatggccagacctagttatcactcaactatgaaaccgagtatcatctgaatacatagaaaacccatcagtgcgacaatagcttgatatcatggtccaccataaccaccaccataatattaaaccatcatcatcacccattattatatattccatttagatagagatacacatatatgcacattgttgatagtttatgtaagtgatgtgtataggttatacagtgcattggtgacttaagtgtaactggtccgtggacaaaaaaatatcaaaatcatttgaacttttgtatacacaagaacaagcaaaagatttttcatcaaatgtcattatttgttttgcgaccatcaatccatcatcaaatcttattgtgaaaaacaagaattattatttttaagagttactattatactatacagtagcaaatgatattattgaaaaccccgcttacaaagaactgacatttcattctgaagtgttgttaagctagagactagaaagagatataaattaagctgaatattctaacgattgattggttaatgagaagactgaaaaaagttaggaattttgtagacgcatcacattcagagccgtgacaaggtcaatggttgtcggaggcggtcaaatgaaatttgcccctattcacaaacaaagagacttataataatagaagtaaaagtgtctataaagataaattgtcatatgacaaaagtaggtcaaaaccaaaatgtatgtataattatcattattgattacctgtttttcttttgcttgggaaattttcaaatttcaaatctgttggtatggtaaaatgagagtcaagtcaataaaaattgacgttaatgtagatgatacaccaaatatgaataagcacatgggagaacagtaatttatcaaatttcacatcaccacangtctataattaattaataattatatactatggtcccaaaaccatattt

SEQ ID NO: 18594 - DNA, 1007 bp, Arabidopsis thaliana landsberg
tttgattttcatttgtaaattcgctatgttatatgtatgagaatagattcgcgctaataatgtcaacatttcttgtagtgaaaggaagctgaacaagaaactgcataagaaactaaacaagaagctgctgcgcatgaagctgaacattctgctgtgcacgaagctacaaaagaagttgacgaatatttacacattttaaaaaaattaaacattgtattaagctaactaaaaatattattgtcttggatgtggagatgaacaaaggtgagacaaatgctgagaacaaaacacaggagaccatccaagatatcaatcaatcaggaaacaatgattagcttgaggtgagttgtatatgttttggagcaaactgatttgaaaatgatttatacactacaagggataaggacattactagcacatggaaaatgctactaaaagactttcgtagcatatttataaacgctgatacatgaggtgttatgtattttggaaaaaacttatgatttgttatggcttttggtaaaaacttatgggatgtgttatgttttttggaattagaacttctgttatgtatgatgaatgattatgtaaacttttactcttcatgatatggaatcagactttatgtgaaatgatatttatttctatgtgttcatattaatagctagttcttaattctaaatctatgattaattattctcaaaaaaaaccatataatagctatatgaaaacatatacaatagcaaataaaaaaatgatctatacttctatcatatcactaaaatatttgttttcaaatattgtattatagcacatgtaaatgtaagaactaaataatttattgcttacaaaggagttatagtataagcatatattctagcaccaaattgatactacaaaaatatatattagcgcaaaattaaatagctattgtacaatgacatcaataacaaaacacctggtgctatatgaaaatacgtactagtgttttatattcgctatagtcg

SEQ ID NO: 18595 - DNA, 483 bp, Arabidopsis thaliana landsberg
attcaaagtgttagtgatcaagattacttacagatcttgaagattgcgtgcgtactactaaatttacgacttacaaagaagtgattcttggtggtgtggagatatttgtgttgctgcagtccaaagcgtcccacctaagctgctcagggaagcatggatcgccttgccagttgattctactcaatccatagctggctgagatgtttttcatagcaaccactgacataataaaagaatcgatgtgtttttgatttatttcgttactaacataagaaaccatagacctggaaaagaaagtcccataagaaaccatagacctggaaaagaaagtcacataccggcgctttcatctgtttctaactgcggaaactgaataactgcgtagacttccaaagcattaaccagaggtggaagagtcgctcttttggttcttatcatccgccaataacattcccattccttgcatgttatccttgacactcc

SEQ ID NO: 18596 - DNA, 1913 bp, Arabidopsis thaliana landsberg
gatccttggaatgagattcttttcctcttgagggcagctctttgttgctatttcttggccatcttgagtagtttcttagtgttgatcatctttactaatagaaagagagcaaacaaaaaagggattgtaagttgtgttgtagtataaatctctgaagtaatgaaagtggtgaatgatgaagaatgctctaagctttgttgcattttatatataaagagaaagtattagagttttagatataattaagagcaaccaaagaagacagaaacacatgctcttgtagttcttgtctaaagaggtcccaaactagtaatcaatcatatctgctaaatcaatttgtggattagaaaccattaacatggtgagaagaaacatgaccatgtgggggtattaaatcaatgttacaaagacatttgaaggtgaaagaaaagatgcgggtcctctcatgttctcagagatgtaaaaaaaccttaaacctagagaaatttttggaataccggtttaattaaatgtaaaccgaactgaaccgaaaacccttattagctacctgtgaactgcctcttatataaagccgtcgctgacaatctcataggagactcgacactcgagactcgagagagtcctaaactttcaaaactagtgattatcttcgagtcatgtcatgttagcgtttaggggttttgtgtgtctatccacatgttttctgcttctatataaaccctaacgctctcgatactctagttgttgtgtaagtaggtgttgttttgtgtctatgtttcttcgttagctcagattgaggaaagtgatgataaggaattgtcgccccaggcttaatctgcatccattacgatggttgtaacatggtgattgactatttttgtctgattcttcgaatcttttcttagattgttttataatgtttgtgaatggatatgacgaaatggcaataatgttttgtgacacccagtctgatcttcgtgattgatctgccatattttctgatcctaattcttcttcagttttgtggattttgattcaaagttttgatttttgaaagggagggatgaggatataattccatacgtctgcaaatctgaaacacagtgttgatacaattgacatgcactaccatctgacctctgttttattgttgttttcaatacccttttgttagttgtctgcaatcagtgatgaaattatgtcaaattcaatgattatacaatgattattataatcactagatcaccatctttcggctgagattgcagtttttcttttttggaattattgtttgtgatattgttgacgatttgcctatggtatctgatgtccaaagtttgataattgtgtttggacatttcgtttttcttaggcagaaagtgaattcaggctttgcgacactgttagcttatcacataagctacctgttacttttaatacctggttacatcctatatatcaatatcaatgttgttttcgttttgtttatattccatcttgtttggtggttacattccaaatcttttcgtaatagcatcctctgtgtttgactttagtttgatcttatgaagactctttgactcaatcccaatctactgatgcttctgtgttttattgtcaagttcatgtaagcgtggttacttcagaaagtgaagagcattgcttggacttcaatgggatttacattggtatttactggattgtcagagtccgcccaagtgcttattggactatctggagttactcctatctgtatcatgaattcttatgtaatttttctgtgacgtgtaatgattattgttccactgatattaaaagatgatgacagagttattacccttttgaaccttgttgttatataagttgacttcactgtccggaatatatactcttttgtttggacccgaaattta

SEQ ID NO: 18597 - DNA, 596 bp, Arabidopsis thaliana landsberg
  unsure (1)..(596): unsure at all n locations
actgttacacattgtgaccagtgttaaaattgcaggcatccaaggtcagcaacaaggtcaggtttaaaatgcgagcaggtgataatagtgccacactctcggagggtggcagtggggatagtcatcaaaaagatcataatgtcttcggtgctactcttgttgaccacagggacgatgcagcatcaagtggtgccagcacaccaagaggggattttatccagtctccttttggtgtattcacatgtaatgatgagaagtttgtttcgaaacccttcaaagattccagtgatgagagtgatggaaagcctgcaatccnnnnnnnnnnnnnnnnnnnnnnnnnnnnnnnnnnnnnnnnnnnnnnnnnnncatggccatggaaagggaatgagcaggaaggttcaaaaggaagacctacaaattctgtttggccttgggtacagaatgaacaaaagaaagagaggtgtcaccagattaatccctctgctggtgttcagtatgaaagccatgcctttgaaagtaataagcctatcaataatgaggcttctagtttgtggtcttcccctataaatgcaaacagtacatgcagcgctagtagc

SEQ ID NO: 18598 - DNA, 500 bp, Arabidopsis thaliana landsberg
acaagaagcctctctcccatttcggtagagtaacctttgtgattcacaatgttgcaatgcctaatgttgcagagaatctccaattctgtctcgaattctctagtgtttgtgtggattatggttgctgcgtttgctctcttaaccgctacttgcctcccgtccgccaacacggctttgtagacaaacccatagcttcctctgcctaactcattgaactctttaaacccgttggtcgcgtctttaagctcagagagtctaaacacttgagcaaaaggcgttaccgatggagcaggggatacattttcaagtggctgatcagtgtctaaatcgggctttcctatgcaagatttgaattgattcgctgctccgtcttctttattaggactagtgacaatccgtggcacaacacagcaaccaattataatgatcaatagagcggatgcgcaagacccgatgataagaacaagtctctgtagttgatgccaatgcttatctggaaa

SEQ ID NO: 18599 - DNA, 1746 bp, Arabidopsis thaliana landsberg
ttttaagtctttaagcttgtaagtcttaaaatattgtaattcatttaaatccgctaaatcttataaagtctttaacacacatgtaatacctttgtaatctttggaaaaaaaaactctaagtctttaaatacacttgtaaaatatttgtaaataatgttttaaaagattttataagacttttaaaacgatttacaaaggtttttaaaaaccttgtaaattcttttaaaaactcttgtaaatcttttaaaaccattgtaaaaggttttacaaggattttaaaatatttacaaaggtttttaaaatatttacatatgtatttaaagaatttataaggattttaagagtttttaaaataatttacaagggcttttaacaactttacaaatttttacaaatttcttttaagagtttttcaagggtttttcaagagttctttaaaatttacaaagatttttaaatgcattttttggcgggaaaaaaagttggtacggagaaaaattttggcaggaaaatttattgggcgggaaatgttggtcattttgttcgggaaaatttcagttgtcaactttaaatagcaaatagagtataaaatctcaataaaatcaaaaaaaaaatctgaaattttcttataaaattgtgtgtgattatggaagatgagttcgctttctactatcatgaatacaattggctaaaatgaaaaataatatgtatttcatgcttaaagcatgtgaaagatatgaagattttatttttaaaaataataataataataataaagttatgaagattatattcatcataggtcttaggccgttagtggagatgattttgtacattttggaatttgagacatgatcatatgaagtaaaccgtataatactttactttattgaccaaccacaactaatattggtcgtttttatcgttattgctatattagtctagtcgaccactttatgtgtgttttcacttgaaagaaaacttgtattgtattataactcccgctatttatttccataatttatacttcaaccgcattgtgaaaaaggttataaaaccaatttttagaattttgcatcacaagtcataagcaatgagaattatatttgtttttgccaatcgttacaacggtgatggtgaaagttggagcagaggagtcttcgttttgcatttcaggtaacatgagtgtaagacttaacacttttcgaactgagacagtctttgaacccttgttaatcagagaggctattcccactagccttagatctctctcccaacctgaaccattaaccaatctccagcaagttgtatatttagcaaactaacggaaaccctctgagcgtgttggaaggtttgactttgagaaagaggacggacggtggtgcaaatcgccggagattttttcagagattgaattgtgtgattattttaagcaatgttttatgttcagaggtggatggaacacgggtgagcccaaaacagaacacactcctctgtaatattaacaactgaaactatacaaaaatggaaaagattggaacatgtaaccatgcatgatgtactcagagagagatagagagtccttgagtcaaatgtaaccatgtattctcgaaagccttgatgataacgtcatgatactcgctcgaattcaatgaaagataacatgctagaagatcttccaggtctttctgttccctcatcttgttctccataatcatctcaaccatggattctctgaaatctttc

SEQ ID NO: 18600 - DNA, 705 bp, Arabidopsis thaliana landsberg
ttattccaccaccactacagctaccaccactatcactttatttaatttataatattctgttctatactaaaattaaaactgatttcgaactaatttatgaaaatagtatattacaacattttatttctatgcatcataaatagtgcaatataaatgtacttacaaacactatttactattttataaattcacatccgattttaaaaattcaaactatgttgtatgtagaaaaaaatttaaatttttatctaataaattttagaattagaatctattttttggaaaagatatataacaaaaacatacaaatgggtaaaaactaaatgaggtgttactaaatcatctctcacaaactactccacaccaaaattgtcttttctcaacccttatatgctactttcttaatttatatatatgctgctatattcttaattaaactttgaattttggttatacacctaattcacccataaaaatattaccaaactatttttttctatcaaaaatattatttcttaaaacactatttttttttctccatcaaaatcatgggtcaatccaaagttccaaactaaagaatacctaacaagagggtaagtacatatttgtaaaatattgtttaagttattcgaattactagatggattcttagtttcttaccattaaacgtttgacaatctaatcactggaaaaggtcctaaagat

SEQ ID NO: 18601 - DNA, 659 bp, Arabidopsis thaliana landsberg
tgctccattcctgttcgctatgccaccaccggcgatacgatcctgcgcaacgtccagccgctgttcgccgacctcgccatgggcggtttcgccgtcgcgcataacggcaacctgaccaacgcgaccgccctgcgccaggaactggtgcagcggggcgcgatcttccaatcgacctccgacaccgagacgatcgtccacctgatcgcggtcagccccttcccgaccctgatggaacggctgatcgacgcgctgcgccagatcgagggcgcctggtcgctggtcgcgctgaccgaggaccggctgatcggcgtgcgcgacccgctcggcgtccggccgctggtgctgggccgcatcggcgacgcccacgtgctggcgtccgagacctgcgcgctcgacatcatcggcgccgactacgtccgcgacatcgagccgggcgaggtggtcaccatcaccgccgccggggtcgagagcgcccagcccttcccgccgcagcgccggcgcttctgcgtcttcgaatacgtctatttcgcccggcccgacagcgtgctcggcggccgcagcgtctacgaagcgcgcaagcgcatcggccgcgagttggcgcgcgagtcgcccgcgcccgccgacgtcgtgatcccggggccggattccggcacgcccgc

SEQ ID NO: 18602 - DNA, 1137 bp, Arabidopsis thaliana landsberg
tgtctcagaattgttttcagatagttacttcttatctttgcggcttgtctctctccagtaatcatccaacaagcaacctctacaacaacaagaacaaaaataccaaaacatcacatcctcaattctctaacccttaagcaaaatgcaatggagaaaccaaaagaacaaaacttttcttcctcaattctctaatccttagatgcaattgcaacagagaaacaagcaaatcgcgggtaatgacttacgaagaaaggctgctccaagtcttccaagtccaaggtagacgaatttaagacaaacctatataagaagacacagtattagtactaaaatgtgatctaagaacacaatcaaaaagttcaaaaaaagtttggatttttacctttgagacaacatcaacaatgtctttgttgttctgattttttccaaacgaatcgatgagatcaccaaacaacaatgtcatgaaaggtaaagacattccattcccaatagctccgattgagccacatatcatcaagagcacatcagaagaatctgcaaacgcaaatagcttgtagaaaggaactgtgttggccttttcttcgcttttttcctctttcttcgtctcttctccttctttaggacttttagatgttgatggttcgtgtgaaacagagtcgccttctctggcgccgtcaccgttcatatttcggcgctgacaaaaatcagaaagcttttaacttttaagaaaactgataatacccagatcgaaatcgacggtatataaccaaaaagaactataaagttacgagctttcttcttcaggttttgaaaaataaagcttttttaactttttttcctaaaacccagagaaaaataaagaatttaaggaaacatttcaatccagtgccagtcctatattgacaatctcagagtttactaatataaatccaaaaaacccacttgtgattcctgaaaagatttgtcctttatgttaaatttcaatctagagagttcccagaaataatcacaaatgaaacagagtctgttaagggaaagtgtcacatgctttttgcttgcccgtaaaataagagatctaattaaaaccctaaaaccaatcagaaatctaaattaaaaggagagaagttcaagaaacag

SEQ ID NO: 18603 - DNA, 719 bp, Arabidopsis thaliana landsberg
atggctccattgctgctgagcaaatcaatacttgtgaatccaatattgtcagtgcacgaaaattcaatcaagataacttgctgcagtgataaacataagtatgagaaaaatgtataagattcaagagaatgaaatgaaactactggaatcaacacaaaaaaatcgtaagaaaatttacatgcaagtgcctaccttctccagctgttataagagaaagcgcatgagcaggggatacaataatgagagattcattgcagaattttagagggcaaagcgatacaagtggtcaagttgcttgatgagtgaaaatgtggcaagagagacacaagaagactatctaactaagagttgcttgatgcaggagtcattgtcatgtgagctatcatatccagattgaacaatcaatcagttaaatcgatcataacaattgttttctgctgcctatggtcatgttgtgtgtgtcattaattagaagaagaagctaaaacagatctctgacaacacttacagatacgcgtctatgaccactctttgtttatgtaattttattattactatctggaactgagtcttaaagacagagtcatactgtttaagcctatttttatcaccatgagaacttttttgctaaaaacgtctgaaacagaaatactgacaacaatcgaagtaaaaaaagttttgaggtcgcttggctaggatatatcacgagaggctcggta

SEQ ID NO: 18604 - DNA, 2953 bp, Arabidopsis thaliana landsberg
  unsure (1)..(2953): unsure at all n locations
ctttcccctctgactagattattaagctaatagatttggttgaggtttttggtccaaatgtcagggtgaccaaagatttcctggtattataccgttagcagtgaaagatgctttcagcatcatccaagaggtacttgttaggatattgtttttttcatattccttggcccaagtactagcgacctcacatatttattttcttacagactcctaatcgagaatttcttctgcgtatttcctacatggaaatatataatgaggtgctattatttacctacttttcttctctgctccgttgtctatagtcaattttcaacagtagtggagtgataagaatacgctgctttttaattttccttaaagattactatccttaaggttcaccttatttcaggttgtcaatgatttgttgaatccagcaggacacaatttgaggatcagagaagacaagcaggtgcgtttcagcttcaggttctctttgttgcttttctgttgaaaacatgcgtagtgctactctcactgacttgtaatatctttgttatgattacagtggtcatagaatcccaaaaccttcgcatcatatttttatatattaggaaaccatttttgagctgcctgaaaaaaatacctactccatttttcttgcgaaattttatctctatggggactctgatattacaatgttaatatgtgatccttcgtttagttgatccttttaataatcatttgaactgagtattttataatgagcttgtcatgacttctattgctacaagtgtctttctccaagttaatcacttgaacttatcttttttattgactctagggaacctttgtcgaagggattaaagaagaagttgttttatcccctgctcatgcgctttctcttattgcagctggagaaggtatgtggtgcttccactttcccttttattcaaaggaaaaggtttactttacaaccatacaactccagcaaagactgtttcagtcgttgtatatttattacaaaattgtttatcagaaagtgtactcctccacatgcttgaggctatactgaacgttgaaaagtgtgtttttgtttttctttattgtgatagagtaattctctctcttttttttccagtaaatccctttcattcttaaaccttgtcatgatctagttaattctcgtcatcgtttgcttatcagttaatgcatattgatagagatcttgtcctcatgacagagcaacgacatgttggatccacaaattttaatttgctcagcagccggagccatacaatatttacgttggtatgttaatattctctttgaaatattaaaaactggtatctttgtgcagttgctatatcatttcatcacgtgattacatttatgatattgatggatatacaaaaaatctgagtttattttgtattactattaggttaaaaggtaaaagtcagtagttcttttattcatacaatcgccttattgcttaaaaatggaatactgaagaattatacgtcttttttcagcacaagttgtgtatcatgttcttcttccatatgatttcttctgtttaaggaattactgttctcctttactctaatcgtagttgtttagtcacattaactcatgtagctgtattgtttctgaaaaatgatcaactaatttggatgcagacgatagaaagtagtcccttaggtgacaagagtaaaggtgaagctgtacacctctcacaactggtaagttcatcttgtatccagtgatgatcaatccttttaatatgtttattagttgcattttctgaaaatttaaaaggtgaacatctgatattaactactacccataatttctctcatatctgcagaacctcgttgatctggcaggttccgagagttcaaaggttgaaaccagtggtgtaagacgcaaagaaggatcatatataaataaaagtttgctgacgttagggactgtaagttttttcgtaccacagttttcacttagttaacaataagttttggggtgcagttaaaatccaaggacttctttgacatgtccttttaaagcaggtctgataagaaaattgctttcttttatgttgtatacatattagagcctaaatattaagcacactttctacccctctatattttgagacttgcagattaaacatatagttacatacattactttaggtcttttacattttagatttttagtacttagccagttcaactgtagaatcaccttttcgcatttgcatcattttgcttgctactcttatttccaaattgttcttgaccaaaccttacagttaaaccttacaagtattctcctttgggctgaattttattagttctattgtgaggttataggtgatatcaaagcttacagatgtgagggcttcacatgtaccatacagagactctaagttaaccaggatccttcagtcctcattgagtggtcatgaccgagtatctgtaagtcttgtttaagctgctctcaatcctcgnggtacaataaatataaaatgcacaacatgatctttatagtagtatactttactgattagcatttctctctggatatgatagctcatatgtacagtgacacctgcatcaagcaactctgaagaaacacacaacacattgaagtttgcccatcgtgcaaagcatattgagattcaagccgcacagaacaaggtcttagtttacatctatccttttagcttagtgcatgtctgtactgaagattcattctggatttctaaccttataaaactacagataatcgatgagaaatcattgatcaagaagtaccaatacgagattcgccaactcaaggaggagctggaacagcttanacaaggaattaaaccagtttctcagctaaaggatatcagtggagatgatatcgacattgttctcctgagcagaaagtatgtttttctgctttgacccctgtttaa

SEQ ID NO: 18605 - DNA, 683 bp, Arabidopsis thaliana landsberg
aacgcgtcaaaggtgagaaactcgccggcacgagagtaactacatgaggtttttgctttgacataggttcgaacaatggtgaaggttttcagctgcttgcgtttgcttgctaaagtttcataggaatgagagttaaacttgggccaagctgagcagagggaaatattaaagagaatttatgatgattaaaaattaggggacaaaatcaattaaaagttatatgtaaagaatttgtgcacgttgtcgggagaagtgagagagagacaaaaacgtttcattttatcttcggaaagataatgatgtgtggttaaagcgcacggatctcgaggaaggagagatgaaatagagaagaaatagtgaaggcaatatagatattttaagtggaaatgtggtatgatgtgtaagggaggaagaattatggtagattgcataagaaattgaaaatatatggtagattttataatttttcctaataataagatgtcttattgtcagcatttaatcaagcacactctataaattattttttcagtaacaaagaatctttaaaatcattttgaatctgaatattcaagcttcaatactttataaatttttaaattcttaactctttaggaaaaagaagcatataatggaaataaatttttttttgtatataaattttaaatataataatataataa

SEQ ID NO: 18606 - DNA, 3549 bp, Arabidopsis thaliana landsberg
  unsure (1)..(3549): unsure at all n locations
gaatccataagaagaaacaaacaaacaagtagaatccacagctctctaaagtaaccacagattttctaatcttttattagtactctattaaaaattaacaaacaattcccagggagaaagaaaactgtgtaccaatagctgagacaatattttataatgtacaatgaattcatcaagaacaataaaacacatatgaaacaagaaagcaaaacccagtcctgaggaaacaaaattgtaccctaaaaccctcaagaacactaaaaaaaaaaaaaaagcttttaacttgctaaatcgagagaggagaagtagcaaaacccaattcaaaatcacaagttaaatcctaaacaaattgatgtgtttaaaagaagataatgaaaccagtggaccaaaagtttcgacctttaagtgaaatttaagataatgagagtggaaggaaacctgtggaactgtgattattcaatccaaaactctctctattgttcctttaatgggtgtttctgctccaaggagagatccaatttgtctgagaaaaatgaagattttgaagacagttacagttcaaatttggatagagagagacaaagagaggaatgtctattgatttagttgagatttgaaggaaggaaggaagtgagtgatgatgatggtcttgtctcgttgagtgttgttggtatagagactagagagacaagtcgaagaaacaacctcagacttaacccactttgtcccatcatttgcggagacaaacgaaacgcgctctcttgcagaaaaatcggtaagcaaataaccgaatgaaccgaaccgtaaaaacaaaaccgcatccgaaccgaagtttttaaaataaccgaatagttagtaaaatgatattgaatcaaatgaaaaagttttatcgatcaatcacattcccaagtcatggctttgtggatagttaaaacttaaaagaaacaagatattgaatcaaatgcattaggtagttcgattgcaattaagatgatatcttgtactaagcattttggttcattttagtggattttagtttggagtgatttttttttttttggtaggcgagtttggagtgttttgacttttgagtggactcttagattttttttaataaagtaggcataatagtgtttttttttttaactaacaagcttacgatcgtgtggtctgtaacatgagtatatctaggataacaatttcattacatttttaacaaaataacttttgagacaaaagataaaaattgaaaaaacatgcaatgattaagggacgcacgtctttggataaccatgtagttctttattactttttaaaatagtaactatagttccatgattataaatcatgtttttttttgaatgaatttaaaatttattcaaccaaaaaacctttttgtacaatgaatgcaaccttattttaaatgttattttgagaaaagatttgtaaagagattgaaacaactagttcctagaggcgaaccataaccgaagtccatcctcgtatttgtgtggatcccgacgacggactgaagataatttgttgcgtatcatatatcaagaaacttgattagttgagctgcaggtgttggggactcgccgtgtctttataaatcatgtttgacatgctcattatcactgacaaattttgagtagttactatggtggagcggtcgtcattttgtgaaaatttatatcatcagttattttctatcaccaaacaaactttctggtgcaaccaattaaacatgcaattcattttctttcaattgcatcttttttagtttagtcatttaatacaaaagttatgagtcccatgtttaattcgctattttagtattttggttagcagtcggatttttcttcaaattcttgcatgtgtgaaacattttttaaaaactaaaaagtattatttttcaataatactacggtttaataatactaatttttaagaacttctaaagcgaagaaaaattgcaaataaatattcacaacttttaatttttttggtaaatttattctccacctgcaaaggctgcaatataagactcaactttaacagactatataacatcatatatattataaaacaacgtcgttttggttaaaacttgttataaaaacatcgtgtgagtcgaacttttggtcttgtcgaaagtccaaagatacattatgcgcttctctaggagtaggcaacataggcatttctttttttttaatttaatgttaaattatattcaaagaaaaataaactgtttatacatagaaatgcaaacttttttaaaaaaaatagatcaaatgtgtatcttatctatccttgattttgatcttgccttgaagcaaaccacacttggattcctcttgggtacttctcttcacctctcacccttagtgtgcttaatcgattccttatgtttttgtcgattagcctgattatcttctccgtcatcgagggcttctcttcatgtctcctatcatttctttctctccagattgagtgtatcgtgttttgaaaaacatacccaagaacaaatcctgtagtgacgccaagatctttacccgcaagctccttcatgatatcttgccatttttccgtgtgtctgttttttagcagtccacccgccaaatccctccacaccttactcgaatatgggcaatgaaaaaataagtgctctcgtgtctccaaggggaagttgcataaaacacaactagtatccacgtttttgccccatttcagcattcgctcccctgttgcaatcctattcttcaccaccaaccaattgacaaaagcatactttggagtagcatctgaaaaccatatctctttgtggccttgcatctccggccttactgaacgtatctgcatccatgtctctttagaaataaaattcttttggtaactgtcgttttttcctctccataatggtacatcatgttctgtttcttgcatgtcttgtctctgtttctgcagctcaacttcaatgaggttcaagaaatgttggcgatgctttctagctcgtggtttactttntgctgcactaagcatactgaattttggaattacaaaggacaattcttataacaacccacattgaaaggggacaataaaacataagaatgaagcataattaacggaaacaacgatttaatttttgttttgcacttagcaaaatgacaaatcgaaactcaaaccaaacgtttacaaatcaaaactcaaaccaaactcaaaaatggaaacaccgaaacggccacagcaagaaccattcccccaaataatttgttgttcctgtaaaacaaaaacaaaaactttacaacattgataatcataatgctaaaacaaatacaagagagaattaatgttgcaattcttaatagtctttaacacattttatttttaaatttatttgaaaaaatctgatacatcaaaatacaaggtttatataatcgaaaacttacaatctatattctaatatattttgaaattttttaagtatgcataacatgtcaaagcataaaaggtacgaatatatcatctacaatataaagaaaa

SEQ ID NO: 18607 - DNA, 564 bp, Arabidopsis thaliana landsberg
ttcttttcttttaattattcatgttagtcgttgtaaataaatttctgggttttgctaatagttctcaacttggattactatttctgaatatagataagaaatgatgaaatctctcggttttttattatttgatatgagctttctaagttttcgctttgtagaattcaagattgataacttctgaatttacatgtgtttgtagtgtacttatggatgagccatatgtggaccgttcaagtttacctttgctgcatccttctcgtttgaatggagctaaatggtatggatttttccctatatttctttgattatttttactgagtcttaaactcattaactaattaatttcaatgaaacaggtttaaacaccacactcaagtatcaactgctgtaagaaaggtcattcaaagctgttttaagggaccatggtgatcttggaaaagagtgccacctttctacaaacgatcatggttttctctgtttaaggtattctttgtgctctatttcatcagattatttttgtaagtgattttcatggttactcatccatgtggggatatacct

SEQ ID NO: 18608 - DNA, 1006 bp, Arabidopsis thaliana landsberg
gatttttttcgactttttcttttgttgattggagtgagaagagtgttgagagaatagcaaccttgacaataacaagtttctcagtgattaaagatggaggagaatcctatacaattatgggttccgcattatcctttcgtaacctagattttttttttcctataattaaactcgtagcctaaaactaaaataactaattggtgcagaaccataaaaaaaaaaaaagacagagtacactaatgaaaccacacttttacatttttctatttatttcactttcctaaataaaaaataaattatttattttaaacgaaaacacattttctgtacagacgtgggtttcgtaatgtccataagtccatccatagtctaccatataatttaacatctacttctctccagtggacgcaaaagcttcgaattgaatgtgggcgttgcttctctcgtgtctaatataaaattcggataatcatgaattcttcgatgatagtgatataccgttgacaatgagtagttcattgcaataagtaagatcttgtttttgctaaaaagattcaatcatattttgaacgcttgccacccaccacttccaaaactcccacaaattcatagatatagtaatagacaggttacttgacaaaaggaataaaagtacaatatgatgctttacacattctcagtcaaacaaaaacgataaaatgaatgtgtaagataatattgtttaaaaaagaaaaaaagaaaaaaaaaagataatattgttttcccgacgactaatccactttcagtattttataaaataactgaactcaagttgctcgatcaaacaagtacccttaaatgtctctctgtctatataaatgtacactcttcccaaacaaaaccatatctcaaaatatgaataatcaaaaatggagtataggtttcatatctctcgcttttctcttcatcacttcctcttcagctgagttcatcattcacaggtatttttgatcttaaagctcttttt

SEQ ID NO: 18609 - DNA, 663 bp, Arabidopsis thaliana landsberg
gggtgttgatctagtatctcggccttaatttccaagtcggctacgaatccttacagacgttactatcgatgtgcttatgctgcaggacataaggtaatgtgaatgataatttgattgattattacaaattcaaatactaattagttggttttcaagctggtcgatgataaccacactttcaaatgggttgacgaagcaatgtttgatgaaatcaataaattggctagaagagcggatgctgttgaacaaacaatgttccagtttactgcggtaactatagatcacgagaaagttgtttttgataggttgcaatttaagctagataataaaatggtggagaggttcgatgacaaaatgttggaatgtaaatcaagcatcaaaaagatgtcaattgctgtcattgtatgttgcttacttatcattggtttgacccatgtaatatgatgaatcgaatgtatttgatctgatgtgtaagttattgttgtttgatattatgtttgttgggtaggttgaatatacataaagatgaacgagtggataggacgtgtaaattattgttgtttgatattatgttcgttggaaataacatatttaggcaatgtggatacactataaaaccgaaacataaaaattggaacatatatatagtggacaatattcgat

SEQ ID NO: 18610 - DNA, 1459 bp, Arabidopsis thaliana landsberg
ggaccagttgatttcaaatttgttttgcatcaaacctaaggcagccgaatatcttaccataatcttcatcgttgacgttgaaaagatcaaagcttccagtcctcgagtgtttttggcgtggaaatctattgttatacctacattcaattaggaaaatgcttattaatattagaaaaatatgaatgattaaatatatatatatatatatatctgctttgaatgagtagaaaaaatggttataaagtcccatgtatcatttactatgctttcagtgataagaataagatcatatggaacggagcaaacgaatcttaccaaaaaaatatgaagtgccaaaatgcactctcgtttttggtaagtttagtccactccgctcaatttatttaataaacctaaatgttttttaagcttccatacggaaattaagagagcaagaaaaaaactcacgtaatagcagctggacatgaccgcagtgtgtagtacagtgttgccatatctatctatctggtggagaagattgtttctatcgggactctctgccatgaaatagaacgctgttagatttttttgttccgcagctagatgaaagacggttccttttgctggtgttagtatgttgaaagatccttggagccttatccgaaaattcattgagaattggaattgagcatttcatggccgccaaatgcaaaggtgtgaaaccatctttgttgaccctctctgcagggctttcattaatatgtagcagcattttggttatctcgaggttgttggcattgcacgcatgatgcaatggggttgacaattctccatcagcattccaagctagttgtgggaacttctctagcattctccttattatatctgatcattcatcggtccaccacagattcgagtcatatgaacacatcatgttgaatctttatagaaaatagtaaggggatagacaaaaatgacactaaaatagtttttttttttccaaaaatagcatttttttgaaaaataccacaaacagcactcaaactttaattaaatattaaatataaataacgagtttaattaaaataaataaatcaaagtaaatatttcacgccaaattttttgtcaaaattttcccgccaaaaaatttccgaaaacattttccgtcatcaaaatttcgtaaaacatttcccgccaaaaaattcagaaatgtaactacccaattcgggaaggatttcacataattcaggaaggctttcacaaataaaatttttgtaaaacccttcatgaatttcgtagaatccatcctaaattttagaaaataattttttgaaggattccacaaaattaaggaatgattctacaaaattcaggaaggatttcatgaaattcacgaaggatttcacaaaaaaatatttctgtcaaatgtttttcttcaaaaaaatttccgtaccaactttttttccgcaaaaaaaaatca

SEQ ID NO: 18611 - DNA, 527 bp, Arabidopsis thaliana landsberg
  unsure (1)..(527): unsure at all n locations
ngcaattgtttcaggtaactttcctggttgctttacccactgaaacatgaaatgaagtgttttttgttgataacttgacattgctgattaaacaattgtttcaggtaattttcttggttgctttaccatgaaaaaggtgattgttgccatttctaatgcgttatgcatcgtttgcaggaaaaatataaagataactatgtacataaagcatctaaatcataatgggctagaaaattccagttgcgttcataaaatatgataaatcgtatcaaccttagtagagtccatgctggggtttgacttgatcaccattaaacaagaaactcgtatgaaaaaaatttaagaaattgtttctgcaactaaactagtatccaacatatcaagtccaataaaagataaactgcaaaatattaatgtccacttctgtatgtccaactattttatcatatttgttcactgataattgtccagtatcgtcgaatgtttaaactgttatattgattatgtttgatgtaaagggttgttaa

SEQ ID NO: 18612 - DNA, 1499 bp, Arabidopsis thaliana landsberg
ctctttcttttcggttctggctcgctaggagcagttgcagcttcttctttcgcagaggttgtgttttttcttttctgccctcgaatgggataacgatagtcagggtagacgaacccgattgcatcaaacacctgattcagcctcttcttttttcggcctccgaaggctgctgacagtgtagtatcttcggccttcgaataagccccaagcagttcatcacttaaattttcaatgctttttaaccagtcatcatctggctcaacgaatttatctccaaacttaaaagtgtacttcaacctgataagtccacctttgtcggcctcttttatggtttcttgcggcatttcccatttctccgcaagcggccataccctgaaggcaatatgctcttgtaccaaatctctcgttctaataaaagaacagataacgccgaggctctctggcattcttcggcagcttcattcatttcaaccttcggcctccgcatgccgaagctttgccaaatagggcgcataattatacctttgatatcttcccgtgttttcaggtcactcttcacataaaaccattctgtcatccagtcgccgggccatctctttcgaaaggttggcacgggacagcttgacccagaccgagaaacgaaactgtagcagccaaaattattgtgatattgttccttaccccagggttttgtctcgtatgataattcgtgtatgttgcagaaacttttcgcatcaggttccagaccttggcttctcacggcccacacgaagatattcagccttatgatttcttcgggggtaagttggtgaagatagacttcaaatattttcagcacctctacgacaaagttgctcaggggaaatcgtagtccagctttcaaaaagcttcggtacactacgactttattttcttcagggttcggacaagtcttttctccttcgtcggccctcacaacggacaagtcccggaaatatcttcccctcatgttgacaagatgattttctttgatacttgatttgccaaaaagccgcatggcttgatcgccaagggcgatcttcggagtcttcacctaccacgtatccacatcataattgtcgctgtcatcagtatcttcagataaaccttctaaaatctctttggtgatcttttctgtattttcttcgacattgcttcaagaaaccccaggtttttctcttcagatagactcagcttcatctcgacagcagcccttttatcttcagacatcttcgaagatgctaaaaaactgctttcaaagctgaagcttaaaaacttaaaaagctaagcagatcacagtgcacaagagctaaaaaatgagtaagcaggagcagatggcaagaaagcgtgcaaaataagtttgcggtatggccgtatttatacgcttgatgcgttgaaagttgaaagaccccacttgtcattgactgttgctattctagcaaagggaaggtgtcttttcggacctttggcttaaagccttc

SEQ ID NO: 18613 - DNA, 1034 bp, Arabidopsis thaliana landsberg
aaccacattgtaaaattgtgaaaccaattaattgaagtaggaagagcataaaaaaccacaatggacaatttcatataaaaaccacgcataaaagtttagatccgacctcactattacacacagaccatcacaaacaatacatgaaactcaataaacatataccgaccaaacgaaaagaagataagagaggtatttaaaaatcggtaatatcagctcttttcactcactcatgatccaatatctcttcttcatcctcgtcttcttcatactcgccttcgtcatctgcagttgcgtcttggtattgctggtactctgagactagatcgttcatgttgctctcagcttcagtaaactccatctcgtccattccttcacctgtgtaccaatgcaagaaagctttcctcctgaacatagcagtgaactgctcgctcacccgcctaaacatctcttggatcgatgtggaattcccaataaatgtcgatgccattgagagacctcggggagctatgtcacagacgctggacttcacattgtttgggatccattccacaaagtaggatgagttcttgttctggacatttaggatctgttcgtccacttcctttgtgctcatttttcctcggaacatggctgaagctgtgaggtaacgtccgtggcgtggatcagctgcacacatcatgttcttagcgtcccacatttgctgtgtcagctccgggactgtgagagagatgtactgttgagagccacgggaagtgagaggggcgaaaccaaccatgaagaaatgtagacgagggaatgggataaggttcacggcgagtttcctaaggtcagagttgagttgtccagggaatcttaaagagcaagtcacaccactcatagttgcggagatcaagtgggtcaagtctccaactgcaaaatgtatatatatatatgaactcttagaatttaggaaccaagaaaacaaagtggcaaacattaagggtttgatggtacttacagctaggaatgctgagttttgagaatgcgggaaacag

SEQ ID NO: 18614 - DNA, 2489 bp, Arabidopsis thaliana landsberg
tcaatgagtaaattccggtggaaagttcatggcttcaagaacattaataagaaatttccattgcacagaatcaaaagcttttgatatatcgatctttagagcgcaccggcttgaaactgaatccttatggtagtcctttactatctccgtagcgagcagaacattttcaataagaagccgatccttcacaaacgcagattggttccccacaatgaatttgggaagtaccaatttgagtctgtttgcaactatcttggagataaccttgtagaggacattgcaacaagaaatgggtctataatctttcatctctttcgcctctttcttcttaggaatgagagcaagaatcgtggagttgatgccctttggtaagaagcccttcgcaaaaaaagattgaattgccaaaataaactcagcaccaattatgttccacgctcccttatagaattccgctgtatagccatccggccccggtgatttatcatttggcattgagaaaacaaccttatgtatctcctcagccgaaacatgattggtgagcatttctttgtctgaatctgaacatcgatacggaagcaaatcttgaagctcttccactgcaatgccctcaaaatcattcgggattaactgcaaaaactctctgaaatgatgctcagcctctgtttttattttttcctcttgtgatgccacagacccatcatgacaaataatctctctgattgagttctgcgcctctcttgctaccacagctctatggaaagctttattatttctatctccaatatccaaccaatgtagcttagatctctgctttaaaaacttctcctctaaaactgcaatatgatcccatttagcataagcttcattttcttcctgcatagagcttggtgagggattggccattttcattgcttgcttttgacatagggtttcgaaagcttcctttgtctgtttaaccaaatttcctagacgctcctttcccaagtttctgagcagaggctttaatccttttagcttcttagaaaaacggaatagagaagaagttgacataaagattgcctctgtttcattccagtaactttccaccgtcggtatgaactgctccatttcagtaatgacatttacgaatttgaaaggtcttttcccttttaccaccgctccagcaccaacatttaaattgattctgcatcgcaagtggtcggagcatcctccagcctcgaacacactataagaacgcggaaaagactgaagccaaacatcattcaccaagactctgtctagcttctttgctattagatcattttctcgcttgtttgaccaagtaaaaagcggaccatgatatgctaaatcagtgatagagcagtgattcacagccatttgaaagtctcgcattcctgttgtcgtcaccggattttctctcgagttggagtgctcttccatgtcaagaatctcattaaaatcaccaaaaattatccatggtttactacggataataggaaagtcagagtgatctctcaagtcattccatagttccttacgttcctccataaagtttgaagcataaacaaacgagcagaaaaattcttctttaatttcaccgaacatgttatgagttgcccactcttaaaaaacggaagcagtctcacattcttcttccatactacccaaatacgacctcttgtactatgctcataatttgtcaacactgaccaatctttgaacaagttacagcccaaactctaagcccttctctccttaactcgcgtctctatcaaacaaccaaactgaaaattctgttcttctattatcacatacacatatatactataatcaaagctgtgatggtgtgtggataaatattttgcaatttttttacttatcaaaagttctatttttcctaaaactgtatttaggtgatttacagagatctctagtattatctatatagttatatattattattataattgaaagactaaaaactactagcactattttttttataatgactgagggtctaactgatccaaaatgtggaagaaaaaattttctacctaatttttttgagcccaaaagaatgggaaaatgttattaaaaaaaatcgacctaggcactgattaatcgatataggcccaaggcctctaccgaacgcctaactaccgcgtaacgatttttttaacattgaataagagtagttctcttttattttttgttatcaaaatatttttttccaaaaaaataagatttcctacttcaaattgctgggaaaaacaattattctatatgtatgggtcctaacagaatttaattgaatattttcttctaaatattgtactagtcacaccttaaattttcgaaataaaattccagttaaagtttctcacacaacggtgagcaaatacattacttaataatctttttttgggcaaaacattccttaataattaaaatacataattaagttaaagagagacactttaaccgttaca

SEQ ID NO: 18615 - DNA, 391 bp, Arabidopsis thaliana landsberg
catgaaagcacacaacacacgcagcaacactcacaacgaacaacaggaacaagacaaacgacaaaccacgccacaccacggaaatgacaagcccaaaccagagcgcaagaccaccaaaaacacctcaaagcactaggaacacgacaaagcaaccgggaaggcaacaagaaacaagacacgccgcaggagggaacggcacgaaccaccgcataaaggaggaccacactacctgcaggcgaaaggaacgcacagaaccaaacagccaccagccgacccatccgccgagcaagaaaagaaaacgcaatagccctgcgacgcccaaaaaacacaggaagacccaagcaacccccaaaaccacccacaccgtggaacccgagaaagcgaccaagaa

SEQ ID NO: 18616 - DNA, 1265 bp, Arabidopsis thaliana landsberg
attaaccggttacaccgataaatttgttgacactttggagaatcttgtcagcgagacaaagcgtgaatgaaatactacaataaagaagtacgtacgtagcaactgtttaaacaaagaagtcacgtggtagtaatttacaaaaccacgaagtagttgttataaatttgtcggctttgttcaatttttcttttcttttcttttcaagtcatcatgtctttaaaacacagtttcaaaaataaaagttatgataagaaaaagtttaaaacacaaaaattgttaaaaatgattaacgaaaaaattatgcattctttcaaatcataggattactattactatatagtacgtaacatcattagcaagttgcaatttaaaatttaaatatcagttacttaattaaaaacatataaataaatctgaactatataaatatctgttttattttaaggtgtccagcatacacttgaatacaaagtacaaacggtcagcataataactcttttttatgacttatcccatagtttattgagaattccaccaaactaagttcacacattttgaatattaaacccaagaaaagaggaagaagtagactagtgacatctcctaggaacagcaagagccttaagcggatgcttcatgacgacagtgaattcgagcttctccgtcaagtcaacttcatgaccttccacctctttccattggaactctctgaccatgttggcgacgtagtactccagatgcaacattgctagacctatgcccggacatatccttcttcctgctccgaacggcatcatctttatccctctacttccggtgaggtccaccgcttcttcttctcccataaacctctctggcttaaacgccattggttcttcccactcctctggatccctccctatctccgccaccatgaagttgatcgtcccgttcttcggtactttgtatcctcctaacacagtgtcctccgtgacactgtgtgggagtaaaaagtgtcctggagggtgtctccggagtccctctaacaccactgcctttagatacggcatcttctccacatcttcttcctccacctcctttgcttcttccccaaccacgctcttgatctcctcgtgtaatctctcctggatttctggatatttcactaggttggccatgatccattgcagcgccgtggccgtcgtgtcagtcccgaccgtgagaaactccgagcacaagttcataatatcttcctcgttcaacttcctattttcctctgggagctg

SEQ ID NO: 18617 - DNA, 2028 bp, Arabidopsis thaliana landsberg
gagattcaagacttgtgcccctttcaaggttcagtctttgaagattttgagcctttgataatcctgacaagctgcacaccttacttgagtgattgagatcgacccattttaagactggtgtatcctgagcagtaaaaattttaacaactagttagaaaagctacacaggttcatttaacgcaaaaatgcaacaaaacattttatacagagacacaccttaacaccatcccaaagtcgttcaatctcactgtatggcagcttaaggtcgacgagattaatcgggtcaaaatcgtttggaagttcctccaatgggaatttcagccagtgaaggcatcgaacctctttcaatggtagctcaagtccatcaggcatgtttatcttattattggttttacattcttgaggacaatgtgaattgtataacttgagataccggagattgcgcatattcttgaagagttcacggtctaagcttgtttcaaccttcacttcagacaaatctagaaaaatacctcttacatcggcagctccctgttaataatatataacaacaataacagaacaatattagcgaagagaaaaacaatgtaagctttgatcaataaaaatatagaggaacttctactttcaccattgttttctgctgtacattaattatgtcttgatagagccataacctccgttgtttgatatcaccttgagtggatgctttaagatcaagttccctagaaaatctatacagtagatcatgcatctccacacggccgtcacatgtatcaatcaggaacttattcttgagagcttttattgcttcagcagatccagggtcagacgaaaccagtaaactttctacataatccacatcctgtgatctgaaacaggctatgtcgagaaatgcatctttctgcgccaaactcaattcatcataacttacttgcacgacttctccaatataagtggtgggactttgagcaagtattttcagttttgtttcccaatgcttcatatttttctcattaagctctctacccaatatttagagagctagtggatggtctctggcataatgcacaaactcatcagaaagcttcatgaaatccacctttggaggaatggtttgatcataatgaaaggcgtgatagcacaaaaagttgcaagccgtctctgccgtttaattgccgaaccacataagcgtcatgaaccagaccctttaataaggagatatcgctcgctgcaatgataatcctgctgccatgtttgatccactcatgtttactgttaagatcatattttccaagaagagcatatatgggttcccttccggtaacattatcaaggacgacaagaactttgcgttcacgcagtagacccttatgagttttgtatggttcttcaatactatctagatgaggactattcaactccggtagtagcttctctaaaagcaaagtaggcaagcactctaacctgaagttatttgacttcccacggatttgatcgatcaaagcatacctcgaaaacttgccctgccatatcttatagagctctttcaccagtgtggttttaccaattccaggcatgccaacaactccaacgacacgagttcccttgtatttaacaagatccaacttctcttccaactccttcaaccgttgtttgattccaaaagtcttatccttttcgcctcctaccgaacttagagtgttaatactttctgatggatccacagagaccaccttttggcttccctccaatgaaactttcttcaacactttcttaacctccttaacgatttcgttgagtatttcactctcaggactacaatacaaatgagaaaaataagatcaacatgaccttcctagattcccatgaaaagttcctaaacttatctaactactaaagggtcaagcttttggttaattcacacgaatgacgaaaattatatcatgaccatgaaaggttcctaaacttatctaacaatttccaattgtattaactaaaggttaagcttttttggttaatactcaa

SEQ ID NO: 18618 - DNA, 762 bp, Arabidopsis thaliana landsberg
ctggaccaccggtgaaggatgaaggaatgatataactttttcctttattagaaagatcttcatcttcaaaagcatcttgaactgccttcttgctagtactgcgcaacttcgtttaattcttttaatataccttaatcgattagactctatcatagtaaaaacatcaaccatgaattgttgaagtaaacgctttgagcgaaagaggatgtgcttctcatcttttctctcttgtaaacgatagtcaaaccacttcctcatactaacatcttcctgcttcttctttccttttgttgttttggtaggagttttttttttattccaagcctatatctatcctctcctttgggaaataacaatgaatactgaagtgctagatatgaaacgtgacactcatgtattctccttaacttacgagactttatctgtaggattatatctcttttatctagattctcgtcgaaatctccaggtatcaatgcaacaacttcagctacggatggaaggttatacactctgcatctttctggcgattagatataatcttcatatgaaaattttccgcttctttctctatattgaatctattacgggcaatcctaaatgcaccaacatgagggtttatcttttccaacatttctagcaaagctgtaactgtttctttcttgaacttttctttgcccccttcgttcccaccattattacctttgttgcaattttggataattaccaaagatatataataaacaatatgtattggtgata

SEQ ID NO: 18619 - DNA, 673 bp, Arabidopsis thaliana landsberg
atcttttaaaacacttttaaagcctttaaaaatcttttaaaaactcttgtaaatcttttaaagccctttaaaaatctcttgaaaattttttaaaactctttaaaaatcccttgtaaatcttttaaaatcccttgtaaatttatttcccgccaaaaaaaaaattcgattggaaactttttttcgaattttttggcagaaaatttattttggaatattgcaagcaaaaaaaatattaacatttcattttgttaatctaaaacaatttttaaataggggtaaaatgaccattaaaaatttattgaggctataaataaaaatttaatgtggaaataatatttttagcaattatttttgttttttctgtcaaatgacgaagagaatcgttttttttttttgtgatttctgaggaattggatgttagtctgtcaaatgacgaagagaattggggttcctctttttttttttttttttttttttgggggatttctgaagaatgggatgatagtgcaaacacggatctccccaatctataactagacttccaaaaaccttttcagttttcaacatcgaaatttctcctatttgttatttttaaaacattttggggctatttattattttcttaaaagtatagtggtcagttagattattataagaaaaagggtctcaaacc

SEQ ID NO: 18620 - DNA, 620 bp, Arabidopsis thaliana landsberg
  unsure (1)..(620): unsure at all n locations
tgctatttttgttaaaaacagactctgattataagcaaaatgcggttactgactaaagaagtactccagtggactgagaaaagagtcggtatgacgaatgagattttgtcatccatggatactgtgaagtatgattgatatttttaaaagtattcacttttcagcttttctgaatggcgcattcttaaagaagttattctataacttttttggaatttttgcaacgttgttagatgctatgcatgggagaagagcttcgagtcccggattcaaggaattagaaacgaagagctctcatggtttcgtaaagcacagttactatcagctgtatgtctccttatatttgaatttgtattgcctgtcatttcttgtaagcacttagttttgtatatgacttaggtaaactcagatttacctttcttccacttttaacgatttattcctcttgcagtttaatagttttatactgaatagcatcccggtagctgtgactgtggtttcatttggggttttcgttctgcttggaggagattngacaccagcaagagcattcacatctctttctctcttcgcagttctaagattccctctaacatgctaccaaatctactaagccaggt

SEQ ID NO: 18621 - DNA, 710 bp, Arabidopsis thaliana landsberg
tgcagaatacatatagagtttcatcatcaaattcttaggtttctagaaccgaacactaccctctgtttaattggtttaagatgaacgttgtttatgaattacatgtgtctgatgtattattgagaatgttgttagagaaataatattttaatactaaaaataatttcttattgcatgagtgaataattagataaataaaaattatatttaaattaaataatacaaaaaatccaaaaaactgcggcgtagcgcgggtgatcatctagttaatttgagtttaggagttccttttacgagatatcttcatcagcgtcatacttagtttctcaaactctatatctctgtgatttcttcgaagagcttgtgagctttgtgatgtctctctcgatacttctttcgatcttctaatctctttttcttcttaatcacgcaagtcgcaagaaaacaagatttcatctttggaaattataataagatgtgcgtagtgttgacatgagccacaaaaagggaatgggtgaagatcatatgtaggatattgtacagaaaatctatctaataataataatcacaagaaattttttttgtaattgtttttttttttgtggcaatctttataaactaaaaaatatatttggcggttgtggatttttagaaaaatgcattacgaataaatattttttatggatttttcttttatttgagctcctcat

SEQ ID NO: 18622 - DNA, 1039 bp, Arabidopsis thaliana landsberg
ttttacatactaatttgagaggatttacaataaatcataacgactttcttaaattcacccaaattcttcaaaatcatataaaactcaaaataactcaaatcactcaaaataaaatattgaatacaccccttaatagtgtattagatggtttcaagcaattatttttaatgataattttcacttatttttaataaaatggttttaattgattttcatttttttataaagggtttcaattaataaattaaataggaaatacgattaatttatccggaaatcttaatttttttttgctagagttatataaacgaaacgaaaatctacaaaaagtctaattaaactgaacaaaaacgaactgtcgcggaataaatgctctccacattgccgacgaccataactctgccgcggaataaagacctagactgaaaatttgccatcaccaagaagaagctatcaaaccaaataccaaaccgattagtgagagaagaaacctactaagccttgccgtcttggttttactgctgtcgttcgattatcgaatttgttggaggaatgtatgcctaaaacacgagaagtttttgtcggaaaatcgtggaacaataatcgagtgagagaatagaaacattgtcccttaacgactctcatgtttcaccgatcttgaacacctagtctctagcacaaatcatctagttttcatgccatatggcctcataaaaaaaaacaatcgaatagcacgattccatcaaattgccatttcaaaaaattttaaatctgaatctaggttttaaataatgttttaaattttattttaaactttgaaattttaaccgtattatttatagacgaattttaaaaatctttttgaaagtataatgtggtaatataacattcgataccttttttttttctacatcactttttttttttttttttaatcattcttagatcattattgatcttatattaagttttgttggcgaacacaaaacgacaattaataaaaaaagacacagaccttatctaaagatgtgtcttatca

SEQ ID NO: 18623 - DNA, 2155 bp, Arabidopsis thaliana landsberg
gaactagagggaatatgaaagcggttcagaatcctacaaggttctccaagtctctatttggtaaagggagaaatcaacttcaaaatagattgtaggaaagctttctatggggaagaaatacaaagacccgctaactcggtttcgcctagctttgctgctaatagttgatggcattctttgcccgacatgtgcgcgaacaatcatcaatccttaaaatgtagagacggttaaagatgttgctgcgtttcttaaatatccttggggcagaaccttgtttctaaatgaactaaggaatttgcccaagatacaacagccatacaagggttcccgcatgcattagttattgtgactgttaccgcatgtccaactatcatatacatgtcggactcggttatcagcatactagacccaacaatttcagttgagaagctggttcaatatgtattaggaaggagcttgaaaatcaatgtgcatgaagcccgcactatagaccaaaatggcatggtaatttcttagttatatagactgctacttgattttggtattaaattgtgttttcatgccttaactatccaattcaactttatattgtaagaccggatcacatcactgctaaatgaagaactacttgcaagagatattgacttatctttctcttatgaggaggatgatgaagaagtatcacacttgctgtccttattaatgaaggagcacccattcaagcataacagttcgagtggtggcgtggacgcttgcgatgttgtataaccatctgatgatgagttccttgcagatgaaggtatgaatccgtctaaaagtgatggtgaagaggagatggaggctgatgtcccaagtggtgctgcggaagagagacaagagggtgcaactggtgaatgtgaagacggcatggatgctgattttcttgctgatgatggacaaacacagaaagatgatggcaattttctggctggagaagatttgcagcatgatgtaccgattgctggggaaacgccatacaatagtattgctttgatcaaagaggcacctgatgaatttgagtaaagttttctcaagattcaacaggcgaacacagttgaattgaaggcctactttgatactaaactagataagcataagaaagaattggtggaaatgattactgaatctattagggaagtggtaagtgggcaaaatagacagaaggctcaaaaaggggaatccaacatctacaaaggtttggttactttgatttgctgtatatgtcttggaaaactgaccatatatgttcaattccattttcagtgacataatatgcttatgttacaattgtaattcatgaaacaggaacatagaagctttgaccagccagggcatacgcatgttggttcccagccggatgaacctgagattgggctagctggtggaagtgatagtgtagcgggtgtttgtggcataactggtggattaggtgtgttagatggcagcaagactgacactcttaaggaggttagcatacggtaaaaattgttactcatttgttttaatgaataaatattacgtataaatgtgatgtactattaggtccgaggtgacgatgctagtcagaaaggacggaaaaagagtccagttctaaaatgaattcccaatctactacgccacttaaaagagctaaagagaatgagtaggtgtcaagcacaaaggtctatttatgtctgtagatttcctacactagcacttctttatgttgcattacacccacttactttcactattggatattgacagattggaaacatagaagaagtgcatgcacacaaccctgtaagacttgatagttatgtttatagtaaaattatatgttctacatgtgtccgctgaactatgcacatttgtatatgtttgcaggatgtcgttgcaatagagcaattggatgatgaagtagacattctgggacctattttttcattgggcctaacgcaagaaactatggatgacatcagcaggtggtttccaagagggaagaagaagacatcccccagaaaagttgttgttttgtggtccagcaaccggattagggacagtaaaagcatgagcaaaagaagagtgtaagtctttacactgactatattttcatgagaacttgattgtgttatct

SEQ ID NO: 18624 - DNA, 729 bp, Arabidopsis thaliana landsberg
tggtcatcttaggttatagaaaaggataacgttttttttttttttccatcaagatcttggtgatatagcaagagccaagttatacttcgattcggttggacattactcgagaccagatgttttacacttgaccgtaaatgagcacccgaggaaatcggttacattcgtgacgaaggtggagaaagctgaggatgactcaaacaaatagtaagagacttgaagttggtatctgctgaagttatgtcaatcgtatggagtcaagtccaagatgttctgttgcgttttcattttatgttcaagtttatttatctttctcttcaatggtaagatctatggagtcaagtaataatggtaagacttatgttgttgaataaaacgaattggttctctcctcttgtattttaaaactgtgccattatgtttatctaatttgggcgttgggcgttgaatctcaattgttgttcagccgtataactatttagccaactattatgaattaggcttttgagatctctgtttttttgttttttttttaatatcaggaagttctggatcgaaacctaaattagttataacataaatacataatttgaagtctagttgcgatggtgtttgaaatggtcttaattataaatcacaaatttggataattgatgaacatggattttgaaatacttgattgaaaaggaatctatgtcacgtaactttttaacgagtcaaagattgcac

SEQ ID NO: 18625 - DNA, 1623 bp, Arabidopsis thaliana landsberg
taatcctaaaatatggaaaatataatctatagcataaaaaaagttaaattcttaaggcattaggcataatctagttaatagactccaatcttgggatcaagtaaatgcctaaaataaggattataacttagaagctttggagtgagattgctacgagaataaacaaggatcacaacaccagacactcgatgccaaacttacttaactcttaatttaacaaggagagaagagaaacgaaccagggatcagattcaggaaagcaagtaactaagcaagctcttttggagaagaaaagaaagacaaggacaagtttctcggttttgggattttacgttttaactttacaaaacaggattaaaccgaaattgaaccgtacaaaacctgtgcttaataccgtcatctcaaatattgaacggtaataaatcgacaacaatataaaattgattttggttcactaagaggaccagacttttctctcggacttgagacactggagagactgaatacgaccatgtcctcttcgctccattgctcgggtaaacttttaacaagggttcgaaatcgaatacacgaatatctcggtttgttcaattactgaaaccaatcgaattttttaatctgtttcgattttctagttttagcatttccggtttagttcgatttaaattattcggttaccgtttttgtttagaatcacagaaaaaggtgagattaaggaggagcgaaacatgacgaatccacttaattccaccgccgctaatcgctctaaccaggtatgttttgccggccagaactcatcgtcagttttgatttcggtttcgattagtgaaatttcgttctgattatccatttttctcagccgtctgatggaatgaacgatgtacttggcggcggcggtcagatccctaacgcggaaactaaatcacttaatacgaagtaaccgatttcatctcttttcatgcgaattgatttctatgttgattctaggttttgttaaatttatcggattaatattgattctggagaagcaattttactggtgaatttagtcaatgttaaactcgatttgcttgatttagggttttgtttgatgaattagggtttaatctgcttctgaatgtaccaagtctcttttcagtgtttcgcataggaagaactgttctgggcataagctaaaagaaatgactggtagtgacatattctctgatgatggtaaatatgatccaaatcaccagacaagaatccattaccatcaggatcaggtacttgtctcatccatttttacttttgttaggagttagttgatgataatggtatcttatgtaatggttactggttctgcagctgagccagatatcattcagcggcgaagagaatgcaacaactcccatgaatggcaaagatgatccaaatcaccagacaagaatccattaccatcaagatcaggtacttgtttcatcctccattgtactcttttcaaggattcagttgatggtaatggtattctaagtaatggttattggatttgtagagaagccagatatctttcagcggtgaaaagaaaatgactccaaagaaaccaaccactttaacgaggctgctaagcaaaaggagtatagcaga

SEQ ID NO: 18626 - DNA, 323 bp, Arabidopsis thaliana landsberg
gagtgattttttttttctagctaatttagccttttgaactgaaatttatgcaatatctaggaaggttttgactttaaccatattaagaaagcaaagattgtgattttcacatcttttgtatacccagccattaagacaaagatgctcatgtaccaatactctaaggggaaaacgtcaaaaaatgtgtaaactttcaaatttggaacaaaaaaaatgtgtaaaatattatttaaatcacaaagtttagtttaattttttgctaaaatggttaagtttctccgacttggccattttttcttctataattgaggaaagaataattt

SEQ ID NO: 18627 - DNA, 564 bp, Arabidopsis thaliana landsberg
tcagaagggcaattagccccttacggaaacgtttacgtgaattgtttcgaaatggacatttgtcgaaaatacaaaaaacgtcactaataacacggtatttagtccattttagctattgttttcttatatttcatagagaatttagtgttattctagagccaagaagagaagaaacacgtattttaggagttacgaaagttttaagagtttcagagcaaaaagtatcaaaagatcatcaattccaatacttcagaagtttagcatccggccgaggtcttctcgatcaaaacaacaagatatctcggtatgtaagaaagctagaagagtcaagattaacatcaaagtctaatcgaagcaatagaagatatgacccgaagagtggacatatcccacaaatcggccgtttggaaaataataatccaaaaagcatccgcccagagacttgaacccgggcagctcctcaagcttgccaccgaccactaggctcacgcctaaacccttcctctccgtgtcaccgtcattaggctttaccatgaatcccactacttcgcatgatcacttact

SEQ ID NO: 18628 - DNA, 1675 bp, Arabidopsis thaliana landsberg
tactttattcagattgacctttccggtatttccagtgacaggaatattgtcgcacttaaggtcacggtgaattacaggaggggtctgagaatgcaaatagtgcaggcctttaagaatctgccttgcccagttcatgatggccttgggatcaactttgcggtgcttcttgcgataactttggaccaagagaaatgacaatcaatggaaaggcagacgtagatatattataagagataatgaaaagagaagaagagaggagaggagtaagtagacatacagggtgagactaccagaggtgaaaagctcagtgatcatgttgatggacttgttatgatcatcaacccaagagtagaagagtttgatgatgttatcatgtttaagggaattgaggagatggacttcggaatatagcctatcaagttggccaggcatctgcaagacatcttcaatgctcatgaggttccaagcaacttcaataccttcgacttcatcaaatgccttatatctacacgcggcgaggtaacaacaacaacaagagatgagaaaaatacttaaaaagcaatcagagtaacataggcactgcaatgaaaaagtaaaggacgtataaacaaacaaacatacacagttttgaaggctcctctcccgagaacgtcattatactgaagaaagaaagaagaagattgttatcctaaagtgaccttccaagccattaacgtagctattacttatataaatcttatcgaggaaaagtctatagattgacattgttatcctagaaaccatggaaattgcagatagcgtcgtaccctaatgtagcgaccagtgggatctttctggacgaagtcagcctcttccatggcagatattctaacctaatgatactaataatccggaagcagaagaagaagaagaagaagaagaaaggagggatgatgattggtggttacagaagggtgaggagatggaaggagattggatcggagaaggcctcacgggcgaagcaataggagtcgatcgccgatcggaatcgagatcgggaacagaggagtgtggcggccatctccgagatgatgacggtggtgagatggttctgcgtttgtgtcagcgtcgtgtctcttattattgttattggatagaagaagaagagcatctcctccattcatcaaccatccaccattgcttttagacaacgaccaatgaagaagcttcaatttcgccaccaaatttcacaaatatcaaacaaaaatcaatttctctctctctcgaaaccctaaaaacagatgaggatttgatctttgttcaactttttatttatatacagtgtctcccttttatcctcgtcaaggataacgggcatctattttctgattcagtcagttaactgttatccacccaaaacggtgtcgttacgttccttttttctttaaatgggccttctttctttgtcttagtcaatgttttaaagcccatacaatcttcttcttttttttccacgagcccatacaatcttctttgatgtaatgttacaactatttatcaacagattcttgtgttgttgttgtaacaaaaagaaagacaatcacagtggtaggtaattatactatgataataaatcatcatgtttggtgtggtgttgaaagagctgaacaagtgagtacaaggctttaatccttgt

SEQ ID NO: 18629 - DNA, 663 bp, Arabidopsis thaliana landsberg
agccggatagctcgatggtctcgacctgaagtattaccctcgccgttcgaccggtagtgctggaggtgtgattgcctcaccagttggtgagggcaatcccagactgaacagtatggtcaatctggctgtcgtgctcaacacagagttggaccatgccccttgacaagttgggcaaggttcgggcagaggttgcggaattgcgtgttgagtgcgcaacatgccactatctggatggtggttctcccgcccctgtcgggattcagcacccttactgttcaccgccccatggtcgcttcgactatggtaccccagactgcaggacccggatagatttggatccatagatcgacagagtcggagtctgtaataatgcttaattcagagtctttgtctcagttagtcttagttagagttagtttgcttgtcatatgtcttgatgcctatcgtgatgaacttgtaatgaagttggatcattgtaatgattgtcaccaaggtgtgggtatcccttgcaacttggtgtagttattaataaagttagttatttagttgggtaatccctttatttctgctttcctctttatctgagaagctatcagtgaagatgatcaattgttcagtgctatgaagattttctatacatattttttatgttgaaagactgca

SEQ ID NO: 18630 - DNA, 1566 bp, Arabidopsis thaliana landsberg
  unsure (1)..(1566): unsure at all n locations
cgatggatgacgatgtagacggtctggacctataagacttgacagattgcacgaccctgatctttttcagaagatttagattctcagatcttaacttcttaacactctccgcaaattcatgtctaatagaagacaactgagacttcatccacaatttaatgtcttctgcttcatcatcattatctgctacttcatcatcattatcttctgcttcatcatcatcaaccaattcaaacttacgtttcatgcctcgcgtggatgtactaactttagtttttgatgagttcctttagaagaagaagttagcaaaagattccttttcctaataactatatgcttcttgtgttcaactacaagctccttttcattgacagaaatgagcggtagatcaacataaccaccagaccactcctttttggtgaaattatggcatttgcttatctgttcaatcaaataaagaaccttcttgtctctctcttcatcatcccactcaccccaaccatcctcattagtgtttacagacagcttatggataacagtcatctgaagaaacagactcaaaaaattataccaaataaaaaaagtcatgaacgcacatgaaagaaaagataccacaacaatgattacacttaattacatcaggaacacgttcaaggatatgaacatcgctgatagtaagattgtttttcggtatcccaattgactgccattacaaaaacgttctctcatctgcataaccaggaattttgtccagtagaccagaaatgttcctataagcaagaaggtgcagggctaagggaaagccataaatagctatactttgctgttgcatctgatttgtgaattgttggatgggatcttctagcttgaattccaagacgagacctctatctcttagaatcagccattgaaggtttgtttctaacatgcctcatgatctgaatagtcttcaaaatagattctctcccccatgggaaagcaaggaatgagtcaatgtcctctaacatcttaacatacttgaaagttggacgatgagtctggttattagcaataagaactccatcaacaatcaaaagcagagacagggggagttttaaagggttctcaatcccttttaaagcttggaacttagaggaaacatcagctaatgttgcattcttatcttccccaatcaaaacatcccagtaatcattcgtcccattctcacgtctagggaagaagtcaggttcatactcctccggaaattcaccacacggcaaaccagttacagaaccaaactcaactaaagagaatctaagaggctgtccaccaaaaacagtccacatttcgtatttctgcttggtcactaactgtctacataacaaagcatgaactagtttgccggagattggacattcgctaacccttaaactaaacaaagacccaaaacaagagtctaagatggtttccactccttggaacctttcaagacgtcacatattacagtgagaatgtcgggtctggagtagatattgagacgagcatcagggtaacggtcagttgcganaagccgtggagggagacgag

SEQ ID NO: 18631 - DNA, 656 bp, Arabidopsis thaliana landsberg
tgtatattatttcacataaaacttatacttttatagtcttataactatcattaacagatcctattattaaaagaactattataagtcgaatttccatctctttgcggaatttttagattagttttataaatgcctaaacccatgtttattgaatatgtgtaggtaaattcaacattatgtataccatctttaaaattgacagactatggttggtgtttttatattcattttataaatgcctaaacccatgtttgttgaatatgtgtagctaaattcaacattatgtgtaccatcttgaaaattgatatagattatggtaggtatttcttgtgttgtctaagtggaacaagacaacataatgtacccacaattgaaaatgatattgtcaatcaagaaaggtaagaaactaatgttttggtgtccaacatgtaaagaagacactcctaaggttgtaccaaggtaaactacttaccatttgattttgtctctaggtacatgttaaaccttgcattgatagacaagaaaggtgagtgcctgagtggtgatacttaacttactataatcatttaaacataacaatcaagaacttactatttcatatttaaattggaaacccggtttaaatctatcgtttattcaccttaattcaaaaaata

SEQ ID NO: 18632 - DNA, 1185 bp, Arabidopsis thaliana landsberg
attttgaaaaaagaaaaagcggattttagtgttaagagatatagattgaaaaaacttttgtgataaaagagtaaaaaattatttttaaaagaagttctatttttttgcttgaaatgaacaaacaataatttttcctataattaccttgattggattattaagttagccgaatttcaaaacatataaacataaataacaatgttcttacgctatgcttacattataatttttgaattattttcaataagttcctttttctgtttttgaaaaaagaaatgaaattttattcatcttacgacagattgctttaatttatttttttattaaatttaatacatagaaataaatttatgataacgaaaatgttacaaagacaaaatataaatatattcgatcaaaatagtattaaaaacatacatattttaagcagttttagaaattgagacacaatgactccacacgtgataccttttcttcaagtattgtgctttacgttcaattaagcttggtctgtcagcaatatatttaatgagattatcatggcacacttttccttctttgacaagatccttgcaacaaggatcaggcatggttccattttcaaagacagcagcgattatatccaaagcacacttaggagtgattttaacaagacaagtattccataataatgttgcttcagcttcttcgactgagaaagccggaacaaacgcacacaccaaagctaaaacaatgaacaatgtagtaatctgagtgttaaattttaacatatctacttatggttgaaatatacaagaaatattcttattttactaaagaaatcgtaagaaagaatgattagtatttgttatttaaaaaatgacgtaatctaatttttatataggaaatcaaaatcacaacgtaacttctaaaaaaaaccaaaaaaagttgacgttatatttaatggcaattaaattttccacaaataaatatactaccaaacttaaacttaatagtttctatcaacgtttcaaaattaaaccaaaaaaatttaatacatgtaacaatatccaattcaatataagaaaccaatggttaatttttttttattttgatatctaacaccaaatagtttttttttgttaaagggtttctaacaccaaatagtcaatgggtataaggttcaaattgacatattttatggta

SEQ ID NO: 18633 - DNA, 581 bp, Arabidopsis thaliana landsberg
ataaaccggatacggacatacggttggcttggttagaagaaattcaagtgaccaaatttgaactcaaatttttctctattcattctgagtctaaattttcttgataaaaaaattgcatcggacacttttgacaaatgacaattacaaaagtttgtatacattaatctggttttgggtaataatattattcaattaaatttatttaatatttcgatgttttacgctcatgcatgtagcttttgtataggggccattaatactaaaccggccaactttttcagactctgacatttttaaaaaaaacagtggctatatataaacactatacaattcgttattggtcatttccaatgtctttaatattttttttttaagttcagaatcaaactaagagtggttccgtgccattctcaatgaaggactccatttgtggaacaacaaaacaaaaacccttatataaaccgttcccttctttaactttcctctatcttttattctcatacaaatttctctatttttcattggtcttttctaagaacataataatattcatctttggttcttcaaaaagattcccgttt

SEQ ID NO: 18634 - DNA, 581 bp, Arabidopsis thaliana landsberg
ccgatgcaccatggaaaaatgaaatgtgacaccaaccaaacattatacttttatgattccaccaatttcaactttacaaaacccacttctcgattaaaaaatgtcacactgtattaacataaaatattcaaaaagtccgacaaattaactcaagaaaaaaacacagagaaaaatgaatgaataaaaaaaaacaggaaaggaagcaactttcgtattattctcttccccacttgattgcgatttgagagagataaaggtcgagaaagtcttttcatctcctcaccctcatcgtttcgcgtctcttctcttctctctcagaaaatgctcatcagaaattgtctcctttttgtttccttgatgtgttttctcttctaatctccggtgaaacaaagaacaaaggattcataatacacaaagcagagaaggagagagagatacgaggcttttcttcatctttatggcttctatgaccgaaaaggaagctatggtggatccttttctggtcgaggctcttcaaaatcctcgtcatcgtctcaccagttagtcaattttctctctttcccacgattcgattttgcttt

SEQ ID NO: 18635 - DNA, 607 bp, Arabidopsis thaliana landsberg
acacgcgcgatcagagcgtgcgtccaacattcagtacaatatcactgatggaatgagtactccaatgaaagatcaaaatgctctggttacatcatcattggagatggaggcaacatgaaggaatcgccaacatgtcataaaaacccttttatagtgactttgatttaagcttgaagctgttattgcagatccaatttggttcaagaacatatactacttgctggaggaggagacaacttaggatcgaatttatttagtttctcttaagaattttagtttctctttataataataagactagtttttttatatacttaggatgggttttgggattggagggattaccctggtgttatcggatatgtggtgaatcaaggatttcaaggtaattagttatgcttcaaactgcaagtattttatcatttaatcattatgaatattttaaccataaaatcattgtatatcaatttttccatcgataacaaaaccaaagaagttcatcaattaaaaggattttcaatgtacttcaatatttccattattcctaccaaacttcaaaagctttattttttaaccatttattaaaacaaaaaaataaacccctttt

SEQ ID NO: 18636 - DNA, 1343 bp, Arabidopsis thaliana landsberg
atattaaacgctctgtccattttattgtggtgtagttagtgaaatagtaactcaaatatgaaatatggatgaaaaaattaaaagttcacaaattgtatattgttgatttcgatgtaagtggttgtttatagctgttgagtgtgactaacatattttggctaaaacatatattgattctaacgttgttaattgaaccgttaccatttgctgattaatttggatgtcatgttaattaactaccatacactttgatgttgcaatcgagtctaacaacggtgaacggatatattgtagatttgtgtgatgatgcgagtaaaactatccgtattgaagttgtttatgaaaccattcgccttgctacagatttacagagaattagatccgcgttgtgaatgtaaaagtcattactgataatataatggatatcaaaacaaaaaagtattatttgaatgatatgtgtgacaatctaccgaagataaagataattccttgagaaccaaaaaagggaattaccttttttgaaagatgcccacaaaaatagtagtcaatgtttgtgaaggaaaaacaaaaagtcacgtggaaaaaagaattcaaaaaagcttgatgagaggtaatggatcctgtcgttaataatcaagcttaaggtgaaggagaaatatgacacacttcccaagcctaggacatgaagaaacagacatacaccgacatgattctaataatactagacattacagccttcactcttttgtcccaaatcagactcgaaattgatagagacgaagatgagttagcatttgagattttctttagaggcgcatctatattcaaactaaatacaatctaccttactatatcaatcctaacaactccctcaagttgaaacatgtaaggtttgagcggtctaactattccaagaacaagataatcctcattgcctcctaaagtgcctatgtgaagatcgtaattctaaccactcttcaagtaacgccactcgaataactgaagaatggcgtataccttatctcgggctcactttcaaataccaaactacagggtaatcttttgacatttcttgcatgaattgcgttcaaatgtgaacacaataggagagttcaggtcgaataaaagcgaagtaaaaatcaaacatttaaacgattcgctaacatgtaaagccaaacaacgctgtttttgattctagaaggttgtttcccatattatatctaaactgagaagatgaagtcgtgagacagcgttgtctagatatatttgcacacaaggatttaaactccagatgatcaaatcgacatcatcattcatcgacagacaccattgtttttacttta

SEQ ID NO: 18637 - DNA, 586 bp, Arabidopsis thaliana landsberg
  unsure (1)..(586): unsure at all n locations
tattttcattcatattagagataaacttatactttggatagtttatatgtgtttgaatttacttcatctttcgaaaccatgtaaaacaatataaaactcaataatcttcttgaaaggataagtttgtgtttgtcttttaaactctttagaattaaactgtttacaataatatatcaatatttaatagaatttttggtataaaaatagggttgtttttgcaaacaagaaagaactttctcaaaatttcacttactttttttttgtcgtcttagatttattatttattgcaaattataaaagctgttatataaacgattctactacggacaattctttctgacccttattagatttacgacatatgatacctcattcttcttttcaatactcttgatggagagcttcaatgatattctctgcgtagaatcctggcgaacggttataattgtacatcgttggaaatttcatgcatatttnnnnnnnnnnnnnnnnnnnnnnnnnnnnnnnnnncagtatctgggattcgaatctcagtatagaagcgttaataaatcctttgtcaaccaatatgtatgtcaagggagct

SEQ ID NO: 18638 - DNA, 593 bp, Arabidopsis thaliana landsberg
tagttttgacgcagatttagagattcttatagcggttaatgaaaattttaggtatatttgggaaagtttaaggcgctaatggtataattcttttttaaaggatctagaatattctagtagaaatatctactagacttatttgcatatcttttcgcagaaataactaagaatttttaaataatttcataatatcaaaacaacttattggaccagtgagaaaattactcaccattatacgacagtttccacatactagtgcttatgtcttgagatcagaatgttgttttgatggtcaattcctacataaacaaacatcattacatttacaaattctctcagaccaagaattacatgtaaaacaaaaactcatcttgaaaacaaaattctcaactcatttgctcaaaaaaccagcccgagaactcctccttcgaattttcttactaagacttgtaaacatttaaagaaaccgagaaaaattaaaacgggagaagaccaaacctggaacaagaacaaggccaaacctggaacgagaacaagaccaatttagagatatatcttttctacaaaagagttttggatttaggcgttttccc

SEQ ID NO: 18639 - DNA, 1860 bp, Arabidopsis thaliana landsberg
  unsure (1)..(1860): unsure at all n locations
tatacaagttacaccctaaaccctatacaaccgtttattctcatccttatcataagtttatacatagatctcaaccaaacgaactctcaattggtgcatgttaggaggatctctacttttgaaggttttcgtttcagttttgtctatatatctctattgtagtttgttttattgtttagatcccaaggatggcagaacttgcttttgacttggtcattgagatacttgcaaaggttccggttaaatacttgctacggtttagatgtgtctgcaaaagctggcgttcgttgttccaagatgagagattcatcagaatgcacacaactcatgccccgagcatgtttctactgtccgcttgttggccacggtatacaccaccgcgcacttgtacttaccaaggnnnnnnnnnnnnnnnnnnnnnnnnnnnnnnnnnnnnnnnagagccacggaacaacaagtgctaagtatacgaagattatgtggaaaacgttacatatacaatataactcaatttcttagcttgtttgccacaccgacaaggaatcagtctttgggttagatgagccccggagatgttcattggataatgacaaggatgctgacacttccttgcaatgtagacttcttctcgtttcaagaaatctaagaagattccataattcttatcagcggaagagcatgccggagaccaggtcggtctgccagagtcgagtgacttccgattgaccttatctgacatggttgctgctttctctgatttattcaaaccaccattccaagcttttttggctaaagtcttgagtagattttagctagagagtcacaacattatagaaattttataatcaaagaatttattttggttaaagtttataataaaagaatctattttgttaattaggtaaggaaagactattttttgtttcataatcaaagaaaccatgggcccgtcaaggtcgaaaccgggtttagagggttctaaagaggccttaaaacgcagcccaaataagcgcttttctaaataaactcttcttataaacgcagccccaaataaacacgtttttattataagctctttcaatatacacaagcggtgggacataaaaaaacatatatatagccatatagggttcattgaagaattggcgaacagatttgaggaagaagatgtgcaactactgcgagttctccagcaacaggtagggtttagctgttgaattagtctctggtaattggaatatggaaaccatccccaatctgtatctttagattgttgctttagctagctagttactggggctccaacatgattatgattagaaaaaggttgatcaatctcatttagccaaatagtatctctttgagctaataaaagccttgactttttttccagatatggatgtggctcctctgaacaagacaatgtggtatatgcaattatttccttgtgtcctctactgaatttccaaatcatatatatatatatatacacatatatgtcttcttcttgcagctgcgggaaaaggtggagagattacggtttttgatcaagtatgtacatctactactactttttttgttctactgcttcactttggtttatatgactttgacttgtctttctttcttactctcaggagaatgactggaaaagacgacgatgctcatttcaccgagctgcaagcacttgaaagtcgtcttaaggatgttagtcgcactgtgttggaccaaaaggtgaggaaacttccatttaggggggtgggaaggatgacctccgactcccttctcataatgtagaaaatgctctcattctcaaacatcttgtttcactattgcaggagaagatgataaagctagaag

SEQ ID NO: 18640 - DNA, 1675 bp, Arabidopsis thaliana landsberg
acaaatatggtgtttatgaagcaagtgcggcagtgaaaagtaaggattgaggatttgagttgcaggaaaatttattgaagacgatggtgttttatcaacactataacctcacacaaggggcaaaaccgtcatatcccttaccaatatatgcttatttccataagcccattcaaaaagttccttttttctaattattgggtcaaaatgtgtccaatcttacaaaagtcccaagttaacttaccacattttaactcatgaaatttttcatgttttgagttaggtttaatttaacttatttaggtaactctaaaactctaattttatattttcaaagctttgtatcaaaaacgttatatttcttaaatataatttaacattatattcaaaaaaaaaaaaaaaaaactctaatttttgtaatttctaaacaaatcaagtgagaactataacagctaagccgagctctaacggcgccccattttttggagatgcatgaaccaacttctaatctcggaaaataatcagtaacttgaagaagaaagaagttgttgataatatttatagttttgctgtattttgtaactttggtcttgctttcagtttatttgtagtgctatttttttttgttaatcaggcttttggttttgagagttttctttaaactcgtcgcttttgttttcagagggtttctgttgggcatggattatgcccttcactttaggcggacccaaaacaagattaacttcattagaaggcaaccaattccaattaaatactcatgatggtcggtccatgattctatcaccaacttatcattttataaaaagagaggcgtctcattaagagagatgagacatataaaaaagatgggagaagaaactcatacttcaaacaactgctctattcatctaacttgggttcaactgctctgttctttcatcatgtcgcttgactgcgtatctcgtctaactggcgctaaactgttatgttcgtctatcttgttgattgacagtttagttcatctaacttggcatccaactgcttcgttcgtccaacttgacacccaactgctttattcgtccatctagttgcttcagtttgtccagcttggcgttccattgcttcgttcgtccatctcgtcgcatgactttgcttgactgctagtttgtcacataaactacctagttcgtctcctagattttatatcttcaataatggattagctcccacttattgtaatatgaactacgaatacttgattttttttaaaacggtatataggtaactattcacaaggcacatctataaaataaataaactttatgttcgtcgtgagaacgattataactcctgaacatcaacatcgacgtgaaaatattttctccttatcaaagaacttataaatactttgttgaaaatctctgcatcaacattttcaatctttgccaattttttgtctacgaaaatttctttcagttctccccttagtataattcatgttctttttttcaataaagatttcatattttagttatatatatatatatatattacacacatatttgtatatccattgtattatgtcataaactttagacttatggattttaattgccatatatattctatggacacgttctcgttagtgctaaaatcgcgaatcatttcatagaataat

SEQ ID NO: 18641 - DNA, 919 bp, Arabidopsis thaliana landsberg
atgctccatttcttttttattattattttaaattaaaacactctaatttaatttgtagataaatccaaaattatttggtgatggacgcacatggagttatgggttctggaaggtaaatctatatgtttttaaaaacatgatcatatgtttatatgtgtttaaaatataagtaatatagtcttaattagttatcttaaagtatgttgtttgtcttttatgcatcttcaatttaacaatttttgatgatcatatggagtagggtgcaaatggagcaggttgttataatacaagatgtcctgaatttttgttcaagtgtcaaaaactaaattctttgggccacaacctactgaccctaaaggagaaaagggtatatatcttagtattgaacaggtaacatatacacttgtcttagcattaaatattgttttgtattttatcaaattaatctaacatagtgtattgctgtgtctcttttaccattttttaattatccattgaaggataaaaattcaggaaattggtggctatcagatgtgaacttaacaacagaagatgatcaaattggttattggccaaaagaattgtttgatcttataaggaatagcgtggacctgattggagttggcgggatagttcaagcttctccttctggtgtaagccctccaatgggtaacggtcataaaccaactgaagatgtcaatgcggcagcacgcgtcatgaaacttgaaattgtagattctaattataagatccaggaaagtgacaaatacaagttagaaaaactattagacagtgctaaatgttatggcttaaaagatggaaagggcattgtattgatctcatatggtggacctggaggacattcttgtgggatctaatatcactaagatgtatgcatttttgagtattataagaaata

SEQ ID NO: 18642 - DNA, 498 bp, Arabidopsis thaliana landsberg
gagcttgttccagttttgttgtctaattgggtgcaatcaataaccatttgagaagcttgggacatggctcggagagagaatgagaagaagcaaaacaaagcgacggcaaagtgtgtattgattcccgtcatttttttgtgttctttcttgattattatgacttatagaaagaacaaaacagagcatatagatttataaaagagaaaaacattgtctctctttaaaaataaaatagttcaaaatgtccaaatataatgttgatgactaattcaaaggttgaatccattattcttgtatataaaacgttgattatctttaaatacatgaagcctaaggtaaaagataaagttgataatttagttttgtgaaaactaatgtacacaagacttattcggacaattgtttattaaatagttgtgggtaaggaagaaattcttcaaagggtgtaattattcttatcatttttggggggtcctttcttcattattatagccttat

SEQ ID NO: 18643 - DNA, 567 bp, Arabidopsis thaliana landsberg
caagtgatcactggttgcggggtcattgtccaataagcatgtggatctttaaaatctctctcaaatatgctgcagacagtgccaacaacagaagagtcttcgttaaacctaaaaaaaaaaaaatcaattggtctaattagtataatcatctaaaaccaaaacattttaccagatcgttatgctaaaccaaacaaaacatctacacaactaaccctaaaaccagaatagaaaccaaaacattttacctgattgttatgctaaaccaaacaaaacatctacacaactaaccctaaaaccataatagaaacctaattagtgttagaatgaaagacatcaacttaccagagagttcccggaggacgattagggtctagtctcgttagagatgcatgaccgggactatcaagaaactcatcaagtgtcaggttgttgaaacgcctagatataggattagcatgattatcagaagctttgaggcggttgattttgctgtgtagaagaagtcccatgtgcttcagagttttgattggttggagtcagaggagaggagggaaggcttctaccatg

SEQ ID NO: 18644 - DNA, 1299 bp, Arabidopsis thaliana landsberg
ttttaaccttttaaagtagccatccactagcgaccattcaatgttgaccatatagttgtagggatcatttactttttttttgtaaatggttagagttatgaccatatgatgtatcattgtagaatgcgcaaacaaaagaaagtgctaatttaccgagctataaacacattcacagcaaatcaaagacatagttgttgtccattgatgacagtccaaaaaatgtagtccatatggttatctaatgattcacatggtagttttataccaataaacaagtctatacatgaccaataaacgccaatccaaagtacattatccatttttctttgaccatttattcacttgtgtataaacaatcccatcagtaggacaatgtcagttatatagcttttataaagaatttaacgaagatcttatcactctcaatgaagaccattagttcacttggataaacccgtctatactaatcatttgtaataggtataagatagaaggatgtgtccattgccataaactacagatttttattcaatagaaattcaacaaatatacatctattgtataacgtcataactcacaaaagttactttgattttcatcgtgtctcaacctctcgtttatttcttcatcttgactttgaattagaagtgattactctcaggaaatcaaatcaatcagaaacaatactttcaaatttatagatctgatgtggaataagattaagaactttctaattttgtatatcagagataccagagtaattaggagcagagaggcaccaaacaaaacgacgaataaggcataaagctccctccgccaccgctactaccaactacgccatcatgtcttgattagctttttaaaaacaatcatagcaaggagtcaaagcaaatatgtcggagattagaagataaagccctcgtttttgaactttcatttttcgtaaaagatttgattctggttttggaaatagaaaaataaaatcgatggagaagcgctgagaagatatgacaaataactgtcatatctggataaaactgtcattttcaatattaaaaataatgtttttattaaaaatggagaacaatatattttcaaatgaaaacttaaaatagggtagttttcaaaatctccctttttaaaaagtggtattggaaaaaaaacatatattaaattcatatttgagacgattaaaattgtaattcatatttctaaatacttttagtttgtttgagatataaaaaggtagagcaaccatctcatcccgaaaaagcatacacttcaagtttttttttctaa

SEQ ID NO: 18645 - DNA, 1314 bp, Arabidopsis thaliana landsberg
atttttttgttttgtttataatggtaatctaaacacttatcatttatacaaatagatatatatttctttttagtttgctatctaactcaagataaattatatgaaacaacattctttgtttcaaaaatattgattcttagcatttttttatatatgtttattatatggttagtttatataacttatatgattaatgttatgttttttcataaataatcaatgatttgaaatatgtacttcctatatatatatttttcgtatatgcacaaagattctcaaaacatatatataactaagatttaaaattttatcttataataacaggagttatgggaaatgatgagcaattaagaggcaatcggtgttttcaaataaaacttaaaactgggaaatgtgttcccaaagaatgtcaaactgcatgtcaggagaagctaagaaaacctaagctaaaaggagagggattttgtatgaaagaatgcacatgctgtttttatacataaaactcaatttttatttaattaaataagtcctatgataatgtaataaatatttgtaagagtttttggtctaatgttttggacttatatgctaaaataagtgtttttaacatttaaatgagatttattttaagttataaattattatttttgcattgagtaaatttcttaaatttcaataacaatctactaataataacaatcacaataaatgccttttgcacttatgaacggttacgtcttccagaaaaaaacggttacgtcttccagaaaaaaacggttacgtctattaatcgtagtttttagttaaaatattgggaatgtggcataatgagatactttccgagaaacattatgcacttcaaacaatttaaaaactagaggcactttgccttccttttggagtaaaaaaagacatatataccccctcaatttcgattgagatatcactccaaactggtttatggtttcgctagaatttctttaaaatttacggttgtaatcagcggtttaggaaagagcggattttaatagtgttatcggctgagattaaacattataacttcccctgcttttctagtaacaaaaaactgaaacacgagattctgggttgatcgaagaagattctgggtttcaatcatcaatctttggccaactgtcgtgtcgaaagaggtacgattgttgaaaactgaaatcatcaaattaaaacgaaattctgtgcagtctatttgttacgggaatcagaatataaccaaattatttttatgtttatatgtacatggatcgatggacgactatatcatggttatgtgtggaa

SEQ ID NO: 18646 - DNA, 1348 bp, Arabidopsis thaliana landsberg
gctggtgaagctcttaaggcgaatatcactactttaggtcctttggttcttcctataagtgagcagattctgtttttcatgactttggttacgaagaaactgtttaactcgaagctgaagccgtatattccggatttcaagcttgcgtttgatcatttctgtatccatgctggtggtagagctgtgattgatgagcttgagaagaatctgcagctttcgcagactcatgtcgaggcatcgagaatgacactgcatagatttggaaacacttcttcgagctcgatttggtatgaactggcttacatagaggctaaaggtaggatgaagaaaggaaaccgggtttggcagattgcttttggaagtgggtttaagtgtaacagtgcagtttggatggctctaaacaatgtcaagccttcggttagtagtccgtgggaacactgcatcgaccgatatccggttaagctcgacttctgatttaatgaaaaaccatttgtttggttagtcctagtcttactagactctgccttgtttatttttcttcttttctggttaagctcttgtactcttaatgtgacgcttcttgattattactctcgcgttttatgctatggcatctttatccatattaaagattggttcgttattataatcatctcaaatcaaaattgacaatgaaacaaagtaattttttgagaataaataaaaaagcaagggcaagagctctttgacaactgtagattgatctcgatctcaaatgacatattattaggacttgatttgtatccaagcaaagggaatcttacaaaagtagcctgacaggcgattatttgctggcaatcttgagatccaaatgtgtgttttgggtgtctttatctccaagttggcgattttgatacgatccaaacacaaagtatcttggttcatatcatcaacattactacgtaaggttctctactatttagtcatatcgggtttaagtccgcgggacgagcccatcccggtccgccatggtgcgggtatgtacataaaattttaggcttgttaagaagaaggccacggttttaagtgggtttttcccacagattgaccgataggcacacaattaacaaatatttacatgtgtatacataaaataaagaacggtttcgaaaagttactaactcacaagatcatgacatgtagcaaatctaacgataagatttttacatgtgtatacataaaattatttttattaattaaaaggaaaattaacaaatttgattttacatgtgttattggtcaattaaataaatctagcatgtataaattttaaaaaaatcattagtatggataataattaattaaaaag

SEQ ID NO: 18647 - DNA, 763 bp, Arabidopsis thaliana landsberg
atcagaattttgatttaggatgggtttgacattcttattgtgtgatagataacgtagtttaaaagcaatacaaatgtagtagatcaagttgaaacagaaaagaaagaagaacataaagagaagaaaatcccaaataacaatgatatgatgatgctgctgagaataataaacagaaaagggctattccaaaggaggagctcgatgctatcaatgatgctgaaaccttttttgcagaaaccttttttgcagaaatctttttccgggaaagtgtgtcaaaactcattgctcagttttgtttttttcaacagagaggtttcaactactatgtgtgccctttcatcaagaagctgcagaagtaaatgatattaaggctctctcagttgttagagaagaacatctctccttattatatcagagtgcaaagaaactaaagatggatataagggtgaccaatgagattgagacagtggatttaaaaccccatggttgtttgttttcgagttccctaagtttccacattgacgaagagaagaaagttgctgtttgcggtgagaaagtcatatacaacaagatatacattgttggagaagataaatacacaaggtatatcgatcttctggtttcggtagctatgatggtcggttaagtgtgtttacgtatgttcaaagattgatttaaatccaacaatatgtaatatcctgttggacattgatcagtttttatatattatcatcttaaatgttttattcacatcttctggatc

SEQ ID NO: 18648 - DNA, 1698 bp, Arabidopsis thaliana landsberg
  unsure (1)..(1698): unsure at all n locations
agaaacatattttgatcaccacggcaaaaaaaaaaaaaaaaaaaaggaaacgttaggtttaggttcgtcaaacaaaaaggaaatttccattttatatatgttattaaaaaaggaaatcactaatacaaatattgatcacaacggtaaaaaaaggttgccgttacaacaatcatatatctatcttcgcctaacttatttgacctgacttgcgtttgctgtagttaattatagattcaaaaattgatttagataaataaaaaaaagccatgattaaaagattatctgcgagttgtggagagaagaaacagaaaggacttttagttttggtgattaaaagtgcaatggaaggattggcatgagttgttcttatacgagattgtgtatatttgtcttctccgaatgcagatccagtttatggagcagaagcagattcttaaaaacttgatttaacatgttgacatcaggctagtctatgtatcgagagagaagcggcatggatatgatcacaacaagaaagcaggctatcttcaatactaagccaaaaaaaaggaggcgacatatctaatatagactatgaattttatttccaattgagtaatacattatgctgtgctaaacagatacagatgtatacaagagctgttacacataacattatataagcgttatgtgacataccacagaacctcttgtcaaaaaccaccagtttatgctatgtatctatctctcacaatgtgatagcctcaatcctgaccaaaagacatgcataatgtgagccaaagattcaaactttacacaaacccaacaaaaacgaagaaaccaaaacttacaagtttccttgccctgaatctgaacttgaggggaagctaagaatgtgcctcagaacgattggtctcgccaatgtgatatttttgctacacttagtcgcgttatcacccacttcctcgattctctctgtgaaaacatcaaacttcttgctgatctcgtgcatcgaaagcctcacagccacttcttcttctttttccttgagtgcaaaatcaaccttttgcatcatcgattccatctcaatcttcaacttatctacatgtactcgaatgttatccatgtctttcatggtaacataagcaccaatcctcatcgacagaacaatatctttctgtcctttcacagccgtttcatacttcttccaaagatgattacaccatttccctattgatccaattggaaccgctaacgcagctgcaagcgcagtcacaactggcggtgcagcaacagcggctgctacaacagagaagatcaaaacagagacaaacgcagtcacaaaaaccacattcgagattttcttccaatactttatgttcttaagctttttatcaagcttcctcttttgcttatgaagtatctccagaagcataacctgctgctcgtaaacagactcaagcagcatgaagaaatctccatcaaacggatcaccagaagccttaaacttgttaagctcttccaaagttttcgcgtacttattagtacccggttccacggatttgttgctccctgatgactccatctcaaactgcttaagcgcaaactgtaagagcatttggcctatcctcgcgcgtntaacacagttatcaacagcattgcagaaatctaaagtcttgatgctactatcaaaataagcattgaccaaacatgtcaaat

SEQ ID NO: 18649 - DNA, 2200 bp, Arabidopsis thaliana landsberg
  unsure (1)..(2200): unsure at all n locations
caaatattgacactctttattaccacttaccacaaataactgaagcaaaatagttacatttatcttcagaaatttcgtaaccaagtgctactaaatagcaacaagtatatagtaagcatatgttacacttagttacaaaattgtataacaaatctgatatgaaatgcaacaaaaaagcctgtcataaaatgatacaaggaagagacaatacacgttaataacaaacttgatacaaagttgttacaatataccctgtaagtacctcttactaactgtcacaagatcattgaagtaaatnnnnnnnnnnnnnnnnnnnnnnnnnnnnnnnnnnnnnnnnnnacaaatcttcttgtaacaaatgtaacgatgtagacacaaaaaattagtaacaagtctaacgatattcttgtcacttatttacttacaaactgccacagggctctagtagcaatttagcaacaaattgttttaactattttggtgttattagttacaatttactatacttgactaattctgttttaatacattttaattagtgtattaaatcgttttgcataaaagaaaatcaaatgttaaaacaagaattcagaaaagcataattaatatcatacattaaaatagttaattatatcttcttacacactctggattaataagatgaaaagcatagttcagaaagcaataaattaaggttagacattaaacaatactcggtctcaaacgatacaaagagtaggaaatttaacgagtatatcacttaaaaggcagcaccaccacctgcttcatcctcaccttcaaaagcctcatcattagcatcctcattcaaaggataaagtgggtcaatgtcatcatcttggtccccatcagcattttcattctccatgttgttagcacggtctggaatggtcactgaagcgtcggttcaatgtgtatcgatgcgtcgaggcaaagttaggcgcaccatttggcatgtactgtttcagacactccacaacagatgccagctgctcttgcaaggttatgacttggcgtttaagagtgactctacccaaagcaccagctgctgagctttcacctcgctcgcgtgtactgattcctccaacaccaaaaatcctcccattttgaggtgctataacctatagagaaatcaaagagcaaataaacaacttcagtttctaaacaacttcagtttctaaacaaattcagtttcttaaagtgctaaacaacttcagtttctaaacaacttacaatttctaaactttcttaaagtgctaaacaactttagtttctattagtttggaccaaacaacttcaggttttaaacaacttcagtttctaaagtttaatacttcagtttctaaagtttcttacagtgctaaacaacttcagtttctaaagtttctaataagtttagaccaaacaacttcagtttctaaacaacttcaatttctaaacaacttcagtttctaaagtttcttaaagtactaaacaacttcagtttctaataagtttggacgaaacaactttagtttttaaacaacttcagtttataaagtttcttaaagtgctaaacaacttttgtttccatgatgagcaagtagataattctctgaaactccgcttgcaatagaagcagctcggtcagacacaaatactaaatccttctcatcagggattatattcagcaaacacttcaaaaaccagtcccatgacgcatcattttcagaatcaactattgcaaaagcaataaaatacaaattaaaatttccatcttgagctgaggcagcaagcaaagtccctttaaactttgatgtcagatgggcaccatcaatagatatgacttttctcatcaacttataacctctaattgatgcaccaaaagctagaaatgtatacttacacttattagcagactctttttaaaacaatttatagaacttggattcgtcacttgtaccatgtggaaccacttcggtaaaacctcaaaactatcatcaggtaaacccctcgcaagttctgctgcatgttcttaaactctccaagccttcgaataattgatcccaactccatgatcttttctaaatattttcatcagctatttaggtatgaggggaagctttccttcttcaaaattgttaattatcaatcttnctaatgtccttgcagatgcttgacgatgactagcattccttaatga

SEQ ID NO: 18650 - DNA, 504 bp, Arabidopsis thaliana landsberg
  unsure (1)..(504): unsure at all n locations
tctaggtaatcaggaatgaggtaaaaagttggaggaagtggatgacgaagagtttgacatcccacctttgtttgaggacatcgagtatgaaattgataacttacctgatttggacattgatgatgatggtaaaggtatataccaggaaaaagtgtatgcaagcaaagaagattgccaaataggattggctatatttgcgataaagaatcagtttcatttcaagcaaacgagaacaaaatggaattgctcagatgagaaatgtgattggagaatattggcaactgtaatgaatggcacaagttactatgaaattaagaaagcgcagcttcaacacacatgttcagttgagactagaaggcagtacatgaagagagcaacgtcaaaggtgattgcatctgtatttaaggcaaaatacagtgaagcttctgctggtcctgttccgatggatcttcagcaacttgtactagaagatntgagggtttctgcgtcatacataagtgttgg

SEQ ID NO: 18651 - DNA, 763 bp, Arabidopsis thaliana landsberg
gctcttaggacggataatgaacctttaaggtttgaaactctaaacaaaaactcacttttgccctctcatatagtattaaacctttttgttatcttctgattggatgattgaatatgaattcttattgatattggaaaggctgcaatgaagaaattcactgaaaagattgtatggatgatgaaagcagaaaagttgtttcaaactcaaggaggacccatcattcttgcacaggtctgttgttgtttgttacattaaatatcattaaccaatgattaaaattggagggctcaaattaaatgttttctataaaattaattgtttaaaaatgaaaaaatgatatggacagattgagaatgaatatggaccagtggaatgggaaataggagcacccggaaaggcttatacaaaatgggtagctcaaatggcattaggactctcaactggtgttccatggattatgtgcaagcaagaagatgctcctggtcctatcgtacgttctttcttatcatatgcataatattctggctgaactacaacacaaagttttatttttgttttgctacacaaaaagtttttgttttatatataagaaattttaagtatgaagtaccaaaccggtatgattttttggggttttctttgataaccgttgactcgggtttattactaccaaagcatgtcatcaacataacaagaaattaaaaatggttttgagtttttttgttcttggtggttagaatctctctaattcctctggtttcct

SEQ ID NO: 18652 - DNA, 432 bp, Arabidopsis thaliana landsberg
tttggaattcggaaagccgaactcacgatacgcctatcatttttagctctactcacgacggcgcatttattatttttggatgtactaagggaatgatgaagaggcatgggcttcacagggtaaaatactactcgatcaaccgccacatgtctcactttcacggtcaaaatctttctctttgggatatcacaagatatagtagcgtgctgggatggatcaggtgggactcgtctgtggcgagcgaacatgagaggataacaaatggataggctctattaacaacgcggaaggttgatgaatggtatacttcacctaaaaagccggattcaccaaagcgtgacggcgggctattgatgatttaagactgcataccaagggtcgagatgcaggtttgcgcacagagacatgaaagtggctatcctaagacttgtg

SEQ ID NO: 18653 - DNA, 677 bp, Arabidopsis thaliana landsberg
  unsure (1)..(677): unsure at all n locations
tgaatttaacacttatcgcattaagctataatatatttttctattttaagaggatacatattatctacataacccacaaacaacgtccgtcaaagcaaagaataacttaatccaatgtgagatgttttaaatggacggattagttcatttaacattcataaattaatagacataatttaaccaacgagctgttggcccattgataaatcttctaggtggagatgctggattcgaggcatgttgggaggaataccttttacgaagaaaatgaattttaacttggtgtggctcccgtctctggaaaatatagggcttttagatttgaacttccaatattcaaaaaaaataaaaaaaaatatacataatataaaatattttcgtaaatttgatcatgaaacatatagttagtcggattatcatcactaactcatattcttttctttttatatatataatctacacaattaacatcacacaatttttccaattaattattttatcaaaattaaaaatcacaaataaaaatcaaaattgtgatgatccgttgccacatcacgttatagcgttttcgatcattaacatttgctggttttaaatgtttatgtctcaactcttagntatgtaaaccggataatattagaacagtagctttgtactctgagtactctcttagaaac

SEQ ID NO: 18654 - DNA, 1252 bp, Arabidopsis thaliana landsberg
atcacatttggacccagcgaaacaatgtcattcataatcagttaatcatctcaaatgtcactgttttcaagctcatcaacagagagatcaaaaacatcatcacagcgaggcaacatcgcaagaggtttcgccacctaatgcaactctggatatcatgacttcactttatgtgtcttcccaatcttgaaagcttgtttttattctttttgccaagttttcaaagcttaggcttttctttgtaactgccaaacttttcattatatatgatatattaacagtttagcaaaaaaaaaagattatcattggttagtttccttctcagagactctcaaagagtggactttgcgtgatagagaattcgtaactcactagttttcttgttattttaggtgcaatgggaggaggacttgtgattgttttggtaatcatagcactgatgttacagaaagtgaaaacatgttgtgtaagaaagacaaaccttgaagcacttataccactgaaacgttatagttatgcacaagtaaagaaaatgacaaagtctttcagatatgaagttgggaaaggaggatttggggttgtgtatagaggaaacttttgtgtatagtcttttcagatatgaagttgcgagtatgagcagaacatctcatgtaaacattgttagcctgcttggattttgttatgaaggttccaaaagagcaattatatatgagtttttggagaatggatcattggataaatttatctcaagcaaaaagtcatcgaatatggaccagagcgcactttatggaattgctctaggcgttgctcgtggtctggagtatttgcacaatgggtgcagagcaaggattgtgcatttcgacagaaaaccacagaatgttttgttagatgacaatctttgcctcaaagtttcagactttggcctcgctaaactctgtgagaagaaagaaagcatcttgtcactactagacacaggaggacgatatgttacattgcacctgaagtgttttcaagaatgtatgggagagtctcccacaaatgagatgtgtatagctatgggatgttagttcttgagatgctaggagcaaggaacaaaacatccatagaagtctctgcatctaacacaagctcaatgtaccaaaacacaactctcgactataccaaaacaaagaaggtaaactaaagtatggatttaatgttttcaaaacagagaatttaacgaactcaattataaagtagtatagatattagaacg

SEQ ID NO: 18655 - DNA, 634 bp, Arabidopsis thaliana landsberg
aatcatataacactattctgctctaatatttttagcatttattcattaagatgaagtccgtagaatcaaaatccagtttataatgattaaatagatagttaaattgtattgcaaatggaatgtgtaagattggaattttttttaaattaaaataataaattaaaaatgaaaattaaaataatactattttgaattcaaaaatcatcgataagatgtagtttgtagaattaaaatgcagtttattaatatgaaataaatagttaaagtgtatagaaaaatatgggatgtgtaagactgaaatttggtttgaaattttttaaaattaaatgttaataaaaatatttattactatttagaattcaaatattactgatacaaaattatatttatttcttacatccgcctttttaggcgggtcttatctagtacatatatatcttacataaataattttaaaagaaaaaaatgacttcataggaataaattttcttttacttgatgaaaagattttttttaaacctaaatattctcctatttatttatcttagttctagtttttaaaatcgaaaatactactattcaaggctttgtacatcattctataattgaaaagttttggaagttgatgatgtga

SEQ ID NO: 18656 - DNA, 2089 bp, Arabidopsis thaliana landsberg
gagttgacttgaaagcctttacttttggctttgtagcgtgaactatattcaatgtctttatatccggtcattgctcttagatctgtggttactagttagggttgctcctgtcacccgctcttcaaatttgcgaccttgcttgcgtgaaatgactcaagggtatagagcttagactagagacttcatgctttcataatagtagtgcctttatatctagctttgtagcatgaactatactcaatgtctttatatccattaattgctcttcaaaattgtttctcctagacctgtcttgagagctgctcaagggtatgtttgcttgcacacaatacaagggtctcttatgtgtactctcttaaacctagaagataactcccagaaagtctttgaaagcataactcgtttatatgcaaaatttcattttgatctttgctggtataggcataacttgtttaccaattgattgatgatctactctttctgcgcaggacaacttcagagacaactagtcaatcccagaaacctccgtatcggactgccgagacatcttctaatgtgaaagaagacccatttgtagtcttggaggagtctacatcaacccttagagaaccttccacaggagggttcactgatccattggaggaaattggtaaattcaacagcagaaaaactgatcattcatctgtccacggaggagtatttgttgatactgatcctctcgatagtcttggaaaatcagggccagatatgaatagtagaggcaagagtcatttaaggccaccaggaaacatcagtggctcccagtcaccagtagaaagttctgggctttaccattctaagaatgtttcatttgatgatgttgtagagccgcagaatacgagtactccaccacctaccaattcagatggaagttttgaatcatctgatgatgtgtggcttactgtatctgagatccccctctttacgcaacctacgagtgctccaccacctacgagacctccaccaccaagacctacacgtcctattaaaaagaaggttaatgagccttctataccgacgtctgcttaccactcacacgttcctagctcaggaagagcttctgtaaatagcccgacagcatctcaaatggatgaactcgacgatttttctattggcagaaatcagacagctgcgaatggatatcctgatcctccctctggtgaagattcagatgttttttctactgctgctgcatcagctgctgccatgaaggatgccatggataaagcagaagcaaagtttaggcatgctaaggaaaggagagagaaagaaaatttgaaggcaagtagaagtagagaaggagatcacacggaaaattatgattctcgtgaaagggaacttagagaaaagcaagtgagattggatcgtgagagggcagagagggaggcagagatggaaaaagcccaggagagggagagagaggagagagaaagagagcagaaaagaattgaaagagaaagggaaagactgttagctagacaggcggtagagagggctacaagggaagcacgcgaaagagcagccactgaagctcatgcgaaagttcaaagagctgctgttgggaaggctaccgatgcccgagagcgcgctgaaagagcagcagttcaaagagcgcatgctgaagcacgtgaaagggcagctgcaggggcaagagaaaaggcggcgaaagctgccgcagaagctagagaaaaggctgagaaagctgcagcagaagctagagaaagggtgaatgctgaagcgcgggagaaggaagcaagggttagggctgaacgagctgcggtggaaagggcagccgctgaggcacgtggaagggcagctgcccaagctaaagctaagcagcagcaagaaaataacaatgatcttgactccttctttagctcaatttctagaccaaacagtgctccacgacagagaaccaaccctctggtgagatggcattatctacttctgttctgctttaagtcatttacaggtgatttgacttcttctataactctgtatgtgtgtcaggatcctttccaggattcatgaacaaaggaggatctttgaa

SEQ ID NO: 18657 - DNA, 1137 bp, Arabidopsis thaliana landsberg
gggttacccgctcctaattcattagagatccttgtgctgcactaatattaaaggaaagtcaatggtctatcatgagtttgatgtaaggttacatgattcaagttatataagtttaccttgcagcgccacttagaccaaatgggatcatccacattgatcctgatgtattaaggctgcaaataatttctgactaaactcaagaacatgataaagaaaatacacaattattcatatgcattgttctaaccagattgagagaacagaagtttctagaaccgggtttggaagaagtcctgataagagaactaaaagttcaaaggaccacatctctaagctgcactcaaacaacattacataagaaatcaagatagctaattaagagatccatgtatttgtaacattgattcatatatatgtattaccagaccataagtgcagaaggaacagctagtctcagaaaagggaggatatcgcgtagagcctccttagagaaaccggtccaagttagtgagcaagaaggcgaaaacttgacgtaacagaacaagagaacgacattaagccaatacgaaatggagttggcaagagcagctccttgaaaccctaaaccagatttgaaaaccaagacccaacaaaggaggacatgtagagaagttgttactccagagcagaaaaccacaggaaacacattgttttgggcctgcaagaacctgttaaagcattgaagaagaccgtaggcgaagatgcttgggatcatgaattttgcgtaggagccagcgagtgtagcaatggatttgttttgtccaaagaagacgagaaggtgctctgtgttagcccaaatgatggagagaggaatagaagctagtgtaagaacaaacatagctctttgcatttgtattcctaacattccgtacttctttgctccgtacgcttggccacaaagcgtatctaacgcacttgctgttcccatctgttcatgaggaaaatggaaaagtgaatcagtgtagtttcttgcttcacaagtaaaaacgtacaacccaatttttaaaactttcaattgaatattaaaatttggatttgttgacatcgttcaatgttcgacaagtggtttttaagttcaaataagagccataagcaact

SEQ ID NO: 18658 - DNA, 673 bp, Arabidopsis thaliana landsberg
  unsure (1)..(673): unsure at all n locations
acaatggacaatgtttacaggttcgggccgctgagggatgcgtaataccctacgtcctggtgagtatgctttgtgtacggggttacaaggtagctctctgaatagagaatgcagagagttgaggtggatggctgagtaatgggatcgatcgttcggaaggggttccccctaggccttatatattcgaccgtggggcaatacatgtggatatgataacaatgtgtacctaaaaggtagtgaactgtttgagtctatctttctatgattctgccgacctatcctcgcctggctccgctgcatggggctccagcgcgggaaagtcggatctttgttgtggtcgcttgctcaacgctgtgggccgtccggcgcttgcaccaatccggccttacgtcaacctgctttactggttgtcctccccaggcccacgaaggaatgaccttacgattttttgggcccttgcgtcntcgtgaggtcttttgccttctagtggacccgagggatatatgtcccccacaagcccctaatctttgagttgattttgaaataattgactcaaaggttcttggtcctgcctatgggttcatagcaagacttgatctattgtacctctgttgggtgcacagaaggtgcacccatttggtgtaaccagccgagctttgagtggatttagaag

SEQ ID NO: 18659 - DNA, 1223 bp, Arabidopsis thaliana landsberg
  unsure (1)..(1223): unsure at all n locations
caactctattaataatttacatatctttctactactattcttgtatggaccattcgatttttggaaacttcttttctcttaaaaaaacatcaataatatcgggcgaaatgtcaaatgtggtttttcttagccctatttaccattcttaaccacatcaagaatctcattgctagtgttgtaattattctttgtcctttagtgaaaacattaagaaaaattcatctattgatgttcacgttctctgtaaattttttatagacgcatgttacacgtaatatattattagtttattaccatatgaagggactaattatggcaacaacaagattataaaaaaaggactaatcaaaaggtaccaaaattagtacgaatgtaataaataaaataaaactttatgacactagcacacatatttttggactcttcccacgaaacttcctctacaaaacacattttgccatttgttgcaagacttgaccctactcctctgcacctcttctcctttctcttttattttattttcacctttctttcataaatacacatacattacccacattttacatttatctcttattatcctattcaattttgacaaaacaaaacaaataatatcaacaacgtacatgcacttccttgtgtatatatataaactccaaaccccatctcttcataaagcaacaaaaacttaacccatttcttcttctttttttgtttctctctcacaaacacaacaaatatggaatacagctgtgtagacgacagtagtacaacgtcagaatctctctccatctctactactccaaagccgacaacgacgacggagaagaaactctcttctccgccggcgacgtcgatgcgtctctacagaatgggaagcggcggaagcagcgtcgttttggattcagagaacggcgtcgagaccgagtcacgtaagcttccttcgtcgaaatataaaggcgttgtgcctcagcctaacggaagatggggagctcacatttacgagaagcatcagcgagtttggctcggtactntcaacgaggaagaagaagctgcgtcttcttacgacatcgccgtgaggagattccgcggccgcgacgccgtcactaacttcaaatctcaagatgatggaaacgacgccgaatcggcttttcttgacgctcattctaaagctgacatcgtggatatgtngaggaaacacaactacgccgatgagtttgagc

SEQ ID NO: 18660 - DNA, 1762 bp, Arabidopsis thaliana landsberg
  unsure (1)..(1762): unsure at all n locations
gactgactcntattttgtgatctgtaggtcatctgatggaaaagattgaagctgagaatttacttcacagagctttcagtgtgtttttattcaactccaagtatgagttgcttctccaggtattttcttatgatcaccttgattgtgaagacgactctaggtttagaaatccagtatctgaatagttttgttcaccattatattcagatcatctagtctctatagtaatgtctgaaacaagtcacacttgtagcttatggtggccagccaatggactcggtgtgtaaactagatttaagaaattttatagccaaggctgtgaaaatcacgtagctttatcataaaaatggttggttgggttttggcgttgcttgcttcagagtatgtgaccatcctactgaaattttcttcttctcttatggacagcaacggtcaaaaacaaaggttactttcccacttgtgtggacaaacacttgttgcagccatcctctttaccgtgaatccgagcttattgaagagaatgtgcttggtatatactcttaagctttatgaaacatcgtgaatctttcagcgttagtagctatatactgatatatactattttatctttccttatcaggtgtaagaaatgccgcacaaaggaagcttttcgatgagctcggtattgtagcagaagatgtaccagtcgatgagttcactcccttgggacgcatgctttacaaggcaccttctgatgggaaatggggagagcacgaaggtaaacaatccttccatgtttgatcatttctctttttaactcctttaacttcagattttgaatctcttgaggatttttgttgcagttgactatctactcttcatcgtgcgggatgtgaagcttcaaccaaacccagatgaagtggctgagatcaagtacgtgagcagggaagagcttaaggagctggtgaagaaagcagatgctggcgatgaagctgtgaaactatctccatggttcagattggtggtggataatttcttgatgaagtggtgggatcatgttgagaaaggaactatcactgaagctgcagacatgaaaaccattcacaagctctgaactttccataagttttggatcttccccttcccataataaaattaagagatgagacttttattgattacagacaaaactggcaacaaaatctattcctaggatttttttttgctttttatttacttttgattcatctctagtttagttttcatcttttgttacttcttcagttacaacttacaaaagcaaagacagaacataacacataaacacacgttgaaaacggaacataaaaaaggaagaagacagaacaaacaaaaaaggtgaagaaagtaaaattaaagacgacaaggttatcaagtagtaatctcatgattccttgctctaagcttcaccactacctctgatctgatttataccaaatccaacttttcttctttcaaaaagtaaaaaaatcaatcatttataatttattatggagaagtgagagcaagtgttagcttttgatctttcttatattcttctctgaaatagtaacacactgtgaagagtttttcctacatctgaattttgtctgatccaggtaacaaaacttgatttgatcccttccatagaaatattttcaaaagttttgtcctttttcttctgggtttgtttgattctccatgaaatagaaaacagatcaggtgctcatactcaagctatatcgaaaatctgaaaatctgataa

SEQ ID NO: 18661 - DNA, 1377 bp, Arabidopsis thaliana landsberg
gaataccaacgcaaagggatgaggcatttaaagatgaggaatttggcgggtaagcaaagagaaagaggttgaagaagaaaatctggacaaaggagaagggcaaagaaggccgacgagatttattcttgctgggacaaaaagggcaccttcttctctcctcacagttttaggttttacgagggtattatcgtcatttccagatttacacaagtcgtgtttttttttgggctacacaagtcgtattattggacttttccttactagtaaaatagtaagttagtaaaactaaccagattcgagataacttgagaagtactaaaacccacatataatccttggaggaagaagaagaaaccttagatctaatgatccatttggcaaagttttaagaaagaaaaaaatcacctaagcaaatcctagatcttaaagatggtagatgatcaggctgatattccgaacagtgagattgtgccatcttctcatgcaaagtgttcattgatccttcgtgtggcctatcacttccgtcgcaccaatcttcggattgcttacctatgtgagttggtaacaaatatacaatgatatagtgataaaacttgcccatcttctaatctcttgagttgcttattgtttccatcaaggtgttcatggtgcgcttgaggagtcaaaaaagagtaaccccttaatacttgatcgtggtgttccataaattaggttttcccttgagtgttggatccaaagggtattactattaacatatataaatcattctcttctttttttttttttttgttcattgtccgtttttttcttttttttttttttactttgtgtaaaatgatgaaataaatgaagaaggaaaatttctgcctactaatatactttatttgcaaagtttaactaggaaaaacaaaaggtagaaagtcttggctcaaaccactttggtagtgtccagcatggctacttggcaagcaatgaaagaagcaaagctttggaggctagcgttggcgcaatgcaagaggagctccaacagatgaacgatggacaagctaaagcactagctccatctcaattaaaccatggacaagaacaaaaacacacgatttgtttgaacataatttctccggctttctttttattttctttaaatagggattttggaatcacaagttcctacatacattgaagcatagtgcataaaggaaaaccatggaaacgtgagatactgtgatccttgaaaggatgaaacagagcacgaagattcttatttatttgctgcaacaaaagaaaggaatagaagaacttttttttaatatatactggggttgctcaagtctattcaatatattaccctttcattatctttctttctttttcttt

SEQ ID NO: 18662 - DNA, 1374 bp, Arabidopsis thaliana landsberg
acaatgccagaaagtataaaaataccaaaatcaatcaaaacaacaaaactttttttattggtatcactaatttcaagatatagtaaacagagcaaaaaacagaggaagaagaaagaaagtgttcaccaggtattgaaggggatgtcaacggaggcgtagaccctggaaacagtggtggtggtgatggtgttccaatggcggtttcgttgtagaacgcgtaaagctcgtaccttgaattacaacttggccaaaactgtcttgctccaattctaaaaagtggcatcattctattgatggaacttgtcagacagctaaagcaatcttgtcttgcgagatcaggagtgcattgaacaagcccatacaaagtctggagtgaggtcaattcggtctttatcgtagagaattttctagaactgttggctgcttcattggcagcttggttcatattagattgaaccaaatctataaactggtctctttgattttgaatagaagaaatattattggggttcctcatgataagttctccttcgtatgtaactgtcgatagaaaattcttgtgagagtatctgagtatgcactcttcgtaatagaacacagcttctctctgatttggacaccgagttaacgattcgttaacggagaaggcaacgcagttactgcaaacttccggggataggtctccgcgacaaaggaaaagtccggtgaccctgtcgggggtttgtcccgccctgatgttttggaatccggtggaataagaggcgttgcgggaagcaaaagaggacaaaagggttttgagattggtggagtacgtgctgttacttgagtaagttgtcctatttggacaatcatgatttaggtaaaaaggattttgagcagaagctctgaagctagtgagaaaggagaagaggaaaaggaaaatgaagcagatcagagaagacatggttttgtttttttcgagttccttgatttgagtttctcatcgtggagcttccatgatactctctctgactagtactgagtaacgtgaagtatacgacggtttgttacgactaagtcagtagtcaatgtaagcgatttttttcttttaaatgtcgtaaattgtgaggaaaagagagattgggactgatctaagtaaagttccttgtttcaaaaaatgactttaaaaatctaatacacagttgtaaagttaaacaaggaagagccctaaaataaaaattcaaagataatctttacaagttaacctgccactgagcgtgttgattgattctgattctgaatcaaactagggtcgtgtaattcctgtttttacttaataactgaacgtttgtaacttgtctgttaaggaagtttaacggtactgtctgatttacc

SEQ ID NO: 18663 - DNA, 1515 bp, Arabidopsis thaliana landsberg
  unsure (1)..(1515): unsure at all n locations
acgccgatcggaatatgatctagagattgcagattcttctctgtctccgccatgccaactctgctcggttttttcaaaccctaatatattcttgtaatccaaggatatcagaaacacataaatgatattaaaataaaatggaaaacaaagagaggaaatttagcgaaaatatatatatttgtaaaataaaccttttagtaatatcaaatcttgcctataatcattttatacaaaaaaaggaaggaaatctcaattataaaaaaaaaaaagagaggaaagtgatcattttatttatatatgttcaaatattaataataagtaaaaaaaagtatagaggcatacatactgtagtttacatttatgactgaagaaattaggttttgaccaaagatggagcaacaagagaagaagaagagaaaagtttacagaagaagaagattacaatcaaaaccaacttcgtcctttcctctcgatctagcctcagagatactcttaaggctacctgagaaatctgttgtgaggtttcgttgtgtgtcaaagctatggtcatcaatcatcaccgatccatatttcatcaacttgttcgaaactcggtccccacggccgagtcttttagtttgcttcatagaaaatgacaagttgtttgtgtcctcaattccgcaacatcttcattcacttcagaattctagaaggtcttactcttcttctcagcctctttatcgttatcatatggaattaccagaaggatgtagtatttattcctctacggaatctgtccagggcttgatctgctttaagacatcaaaaatgccgatggtttggaaccctagcaagagacagttgataactttacccatacccagattaagctggaataatataacagtttttctaggatacgatccagttgaaggtaaacacaaagtaatgtgcttgccttttagaagaagttctgatgtatgtcaagtgttaacattaggaccagctcaagaattcttatggataacggtaaaaacgtaccataagcattgtgctgactatcagagttctggtcgatgcatcaagggggttgtatattatatagctcaagtttatcatacacatgcttgggttttaatgtgttttgatgtcagatctgaaaaatttgacatgataaaattacatgcggatatttatagggaaattctcataacttatgaggggaggatagcttgtgttgaaaaacgtaccacgaaggatgattacatagcattgtgcattttggaggacgcaaaaaaagacaagtggtcgagtaaagatattcttgcaccttttggtcactttgatgaaagattaagaacctttttccaactaaaaggttgcactcatgatggtgaatttattttcgtatcttccacgtttcgaaagatggattatattttattctttgatccggtgaaaaaaacctttagaagattcgaacttaaagaaattgcagacgaccaagctagggtncaataatgagatccatatgga

SEQ ID NO: 18664 - DNA, 391 bp, Arabidopsis thaliana landsberg
cgtctgtctctaggggaaggtctccgacggccgggggggctgcgggtgcatccggagcgccttccgcggtctccgggggcggctccagggcggccccgggcacgggctacgacgggatcggctccgggtcaggcagcgcgctgttcaacgccccgaagtcatccaccctctcgccacgcgccgcctaagacacaacacacaaattcagcaaacccacacatagcccacatccagcaaacgccaaacaaacgccaaacgttacctgagccctcgccgtctcggcccgctccctgaccacctcgcgaccgtgcggaccccacatccggtcgtagatggctccggcggagtccttcactatggggtcctcaaccttgtagatatctcgctcaaa

SEQ ID NO: 18665 - DNA, 4382 bp, Arabidopsis thaliana landsberg
tatccagtaccacttgaggcatatcaaaatttataacctgtgcataaaaaaggtttaagggaaggttaagagtatagagcaaagaaaaagaaggattcgttcaattatcccaagcagcatagagtacaaaaacaaagaaaagagaacccccttagcaaaagtcaagtagcataccgtgtgaacttttttgaaatcaattcccctaactacaccgaactcagcatctagctttggtttgctacgcttattatttttcttgttctccttgttagcctcacctttagcctcttccttttgttttttagtctggctattatcatccgttgcaatcaagtaatcgaaaagtcctgcattgaattgctgtatacaaaaaaatatacactgattaattatgaaacgcagctgcttccggaaaaactaaatctaggtgcatgacttggtgatgtacctcaaggatatgaagtcgagaattctgaggcaattccccgtttaaaattgcagacttgattccaaactggaagaaacaaaacaaaagactaattcaatattattattacaggtacggtttttagaatcggaatgctcgtataggtgcccacaagttaccttttccaagaataatttcaacctgaatcccatgtcaattgtattgatgaaaatcagaattttcttctgaacaacctctagcttcaagagagcaagaatgtgaagcagtttatcctgagcactgcaagagatctaagacaagataatacacttataatcattaatcagacccagaaatgtgaacttataaaaatatctaagcgaccgaatcatacccaaaactgctgaacattacttgggacggcctcttccttgtcattatcttctgtcaaggtcaaaacgattgggttgtgcagaatcaatttcttcaatttttcgacatcagagctaaaaatttgcaaaaatattattcagttaaccatgcaagacaaacttcggagaaaaatatgagtctaaacagaatcattattatcgatatatgtctaaccttgtggtagccgacataagaaggcattggcaacgccttgggattattgatgttaccgaccttagattatcttcatatccatatgacaacaaaagatctgcctgataacaaaaatattatcaacatcaactctcaaagagaggaggaataaaggaaaaacatgatagatataaccactaagaaatgcttaaactacatgttcttccaagaaaatcaaatcatgagacttccacttaaaagagtgactactaaaacaacctctaacaaagccactattataattgaagcacatatatcatacctcatcaagaaccagaattgaaagtgattcactgacagcagtgggctctaaaactccggcagcaaaacatttcggaatacaagcaggtgtggagacaagaatctcaggcagtccagccaatgcattacgctgcaaatgaaacatcaaaacaaaattagaaaaaaacaatggaatgcattcatgatgagaaatgcaatactaaccatatcagatgcagacatgctactagtcaactgcactgcttttagctgaactctacacagctcaataagcgatgaaacctctgtgtaaacctgtatttttccaaatcaaacaagatttcccatcaattactgaaataaatgaaagtaggagagatattaaacaatggtccaaaacaaacctgctgacatagttctcgagatggaacaagaataaatgcagaaggagcaagcttcttcttgctcacagaatctgctgaaaatagcttctggagcaatggcaaaaggtaagccaaagtcttacctgaaccagtctttgccctagcaaccacatcttttccttcctatataagaacaacagagacaataaatcatcagtcccaagattatataagtagccacgaaactcaaaaaaaaggtagagactttctattatcattaccagaatgtaaggaatggctgattgctgaataagggttggtttctctataccctttttagttagggcacgaattagacgagaatcaagccctagctcttcgaaacttttagttgcctcttcttctttttgctcttcttcttgttctctgtcgtttctctgttcctcaacttcctctgctttctcaacttcgtccaccacttccgagttcacatcctccacaggttttaacttcgtcttacccatggaatatgaaatttccgagcttgtctggtcgaataggtttgaaaagcggcgcaggaagaagatgaagaagtgaagggaaaatagtcgtaaaacctcctccgccgcgtttcctctgttagactgttactgagttttttcaatgtcccagacctgattgatgactccaatattgggcttattttgggctacattcttctttatgggcttaataattgggctttcctattttttgtcgaaaaatgaaaacaaaaaaaaaaacattttaaaaagagaagattttgcaattattggatttttgccattattggatatttgccattattggataacagttattcgtctgggttcagtgaagatggagcagaacgagttcatggaggcaataatgtacgttaatggtgttcgtagagttttgcctgatggattagctcacatgacgcttctcgaatatctcagaggtgcttttaactctatattattgatttcttcaaatgcttatatctaatctaagtttagatagagtagagaagccacaaattgtacaatgcagcaaaatttagagggttaggttgttgtgtggtgggattcttgaaaacgttttttgtttcctttagatttaggattgaccgggacaaagctcggatgcggcgaaggtggttgtgggtcttgcaccgtgatggtgtctagttatgaccgagagtcaaagacatgtgtgtgcgtatctttttctctcataggttgcatctgctttgcttaagtttaggccttcttatactgttcataccggaaacttttattgcaggcattatgctgtcaacgcttgcctagcacctctctactctgtagaagggatgcatgtaatatccattgaaggagttggtcatcggaaacttggcttgcaccctcttcaggtggggtttacttcttccagattttttttttctcatttctgcgatcctaattctccctatttctctcaggagtcattggcatcttcgcatggttctcaatgtgggttttgtactcccggttttgtcatgtcgatgtatgccttgttgaggtcaagtaaaaactcaccttctgaggaggagattgaagaatgccttgcaggaaatttgtgtcgttgtactggttatagacccatcattgatgcgtttcgggtttttgcaaaatctgatgatgctctatacagtggtttatcttcacttagccttcaggacggttcaaatatttgtccatctactggcaaaccttgttcttgtggatcaaaaacaacaagtgaagcagctacttgtaatgaagatagatttcagtcaatctcttatagtgatatagatggagctaagtatacagataaggagcttatttttccccctgaacttctgctgaggaagttaactcccttaaagttagggggaaatgaggggattacctggtatagacccgtatgtcttcagaacttgcttgaactcaaagcaaattttcctgatgcaaaactactggttggtaacacggaggtgggaatcgaaatgagactaaagaggttacagtatccggtgctaatctctgctgctcaagtcccagaactcaacgcattgaatgtcaatgacaatgggatagaggttggttcagctttgagactttctgaactcctgaggttattcaggaaggtagtaaaggagcgtcctgcacatgaaacatcagcatgcaaggcttttatcgaacaactgaagtggtttgctgggacacaaatgagaaatgttgcttgcattggtggaaacatctgtacagctagtccaatatctgatttaaatcctctttggatggcttcaagagcagagtttcggataatcaactgcaatggagatgttagatctatacctgcaaaagatttcttccttggctatcgtaaagtggatatggggagcaacgagatcttgttgtcggtattccttccatggacaaggcccttagagtatgtgaaagaatttaagcaggcccatcgcagggatgatgatatagctattgtcaatggtggaatgcgtgtgtttcttgaagacaagggtcaacaattgttcgtttctgatgcatccattgcatatgaaggtgtggctcctctttctttgtgtgcgagaaagactgaagagtttctaatggaaagaa

SEQ ID NO: 18666 - DNA, 1095 bp, Arabidopsis thaliana landsberg
  unsure (1)..(1095): unsure at all n locations
agacaaaaatattagtttttatttaataaaaatatttttttttgatctacctcttgaatatgttatgtgtggatatatataatattagttaaaataaaaatatctaattttctgacaaaattatcaaccccagtgtaccgcgggtcaatctctaaataatacaagttttatatctttattacgactaaaaaacccaaaccaaaaaaacaaatactgaattttactattaaactaacaaatatgagaacataaaacatgaattattcaaaatttacataaataaaaattatgtgtgaagaatataatatttatatagaaataataattcttataaaaaaatatttatgactttctaatgaacatatccacccgcggtgtaccgcggatcaatatctagtttgcttacgttttgagttgtgattcttcactcatttacgtttgctatttatagaccctgaaaatattttgcgagaaaattcctataacactttgcaagggaattgcaagggaaaatctatttagagaaaaattatcagattttttcgatataatttcactacctaccacaccaacctactaactttcatttaaaacgtgttcatttacacaatacttgtaaattcgtcgcaaaatatgttgggacctacttccttgcaaattcgtcgcaatattgtaacgaaattgcaacgacaaagtattcattgcaaagtagacgcaattacttgcaaattcttcgcaaatttgcgacgcgtgtctccctcgcaaatttacgacaactttatgcgcgttgcgtagttaatagtaaacgactnnnnnnnnnnnnnnnnnnnnnnnnnnnntaatatccatcacaaaatgcatgttttcttgtagtgtgggtaatactattgtacctaagtaatactacatgtaaatggttattactagtcaactaagtcatactacatacatctgggtaaaactagagttacgagtaatactacatatatatttttcaattgaatcatgtgcaattctactcagttctaccagttgtatttccgacaagaactcaagtggaatggtttcgggttcaaaactacaagttactatgat

SEQ ID NO: 18667 - DNA, 2514 bp, Arabidopsis thaliana landsberg
  unsure (1)..(2514): unsure at all n locations
ctcaaaatccgacaatcaacttcgtggcacaatcaaagaattttactgctcgtttggtgagtatttggtgtagcagcatcacataactgattgactccctgaccgtccaatctcaagagaaaatctgcgaggtctgtttaatctcccagacccatcaccaaaatgcagctctctttgatgattccggtaaaatcaacaaacaaccgagacgtccaagctctagacattcattgttctccacaatcgnnnnnnnnnnnnnnnnnnnnnnnnnnnnnnnnnnnnntgtttagatgatgatttatggagcttgttagcgaggggttccttgaagcttggaaaataggtgatttttccggtggtgattggaacccttcccgatggcaaatcgagtcaacaacaaactctgtcggcaaatcaaatcaagtcaaatgtctttctttcatagagagactgaagagtagggaaaaacatgaagaaacagaaaacaaaacaggttaatgtccgttagaataaaccaaaatatctactcggcccatcaacattacaaaagtttaggcccatgtaatagcataagaagtttagttttttacaaacttgggctaggctaatttctattttgttttaacataagaagttttgttttttaagaatttcggctgggctaattttaattttttttttaatagaatgacatgtacaaatactaacgtctgattggtcaacaaaaatgatttgtattaaacgaaatgttctaattggttgttgattttaacagaggtgtcaagctgagaagaactaaaaaagctgatgtgttagcacatgagcgattcttattgtttttatagtattgatataattatacataatcaaatatatattacaaaaacggaataaaactagcgcatgcggtgtgcactgcgggttaaatcctagttactactaaaatgtgaacatttttgtataggatcatcaagtttgtgcttggtagttaggtttttgaggcctaactattgtgtgttctatttccccttaaacactaacatgtcgatgtagcaataaggggtgtcaattgatttcactatgattgttaggcaatcaagatgtgtacagaagcaactaagtcaaaccaaaatatagtgatggtgggttttaaataacagccttaactaaagtttcaaacaataaaatacgaactaaagtgccttactcgatcaaagaggcgagtagaaccctataggcaacatattcaagtactaaaatacaataacaggtgaatgaacatggtaaaggaaaatagacaaataaatcaaagaagaatagaagttctaaggatgcattcatgaataagagcaaactgtgagatctattaggtggctgacaggcaaaatacaaataccctaaagaaaatgttttaaaacagatcaatgcattctcgtatcattgaccctcaaactgagctaggtgcagactcggttttgtcgacggactcaaactcatcaggcactaagcaccaacagattaaagtcaaaaagccttccaaagagccatctttgggatagagaaactaatctctagaattagtagatcaggtataccattagaacatcttttggatgctgaaatgcctcagggcaaattctaattgatcagaaagaaataagcatgaagcataactaatccagaagggatcttacctaatcttaaccagcttacaaaactagatattaccctaatctaattcattctcaagaaccctaattactactcaagcaacgtaatcaagaacacaaacccagaaatatctatagacatatcaaattgtagatctaagcaaaataaacaactttcttcaaagaattaaatgcaaaaacaaaatagattgatagtaattagagtttaaagattctaaatcacaaaaatggttcagagaataaaagcttggtcctttggacaaatccaaaattacttatttatagtaaaaagttgaaaaccctaggtcactagaagacaatagttttgaggcggtttagtgatatgctcgacccttatcattgagtgactagggtgcggtaaagattgtgcttttgcctctatgctttgagtgatcacttgtcgagtggttgcttcttcctctcctcttcttacgctcaactgtctggttaagtggggaaatgaggaggatccgcaggcgcatggatcgatcatctcgtcaagtggaatccgtcggttacgctcgagtaattggatgagtgattggttgagtggtgggtcgagtggtgatctctggcttcctccgcagctatgtgatagagtgaatgcttcccctttggtgtgattgagcaatatggtcgagtaagctccttatgcacctgaaaacacacccaaacatgcaatgcgtttatagaatgatcctaaatgcctaaatgtgcaaaatatcctaaagtgatgcaaaaagatatgaaacaacgagttattacagagctaaatgatgacaaatgcatgtatgaatcgagc

SEQ ID NO: 18668 - DNA, 223 bp, Arabidopsis thaliana landsberg
cctccgctgctgagccatctcaaacctgtccccaccagtgttctcttccgcaccgtcgaatcttctgttccgaataaatggtctgaagttgttgttgtggtagttgtcagaattttgtcttctcatagaatttccgaaatcaaatttctgtccaggccggaacttcctttccctgaagctattatgattctctccaccatcattattcctcccttcaaagaac

SEQ ID NO: 18669 - DNA, 1735 bp, Arabidopsis thaliana landsberg
  unsure (1)..(1735): unsure at all n locations
aggcacgggcgctgacagcagcgcgcgcaaggaaggcatggcaaaggaaagcgcgcacaaggaaggcatggcaaaggaaagcgcgcgcaaggaaggcatgacaaaggaaagtgactgatttggtggctaaattgatgtcacacccggattttaggggtccaaaacccgggcgcgaacataaacaccaagtgtgctgggaccaagtctcacacatatgatgcatagtggcacaggatcgaatgtcacatctttactatataacaggagttctgtacaaaaataattaaataattacatcatatgaggaaacgatccagcaacccaaagttgactgggagacgacggcctagacctctcacgaacatatcacagcatcctccatgcgcctcatcctgcagtacctgatcttgacctgtggggggggtgtgagacagcaagagtgagctcacatacgttcatcgctcaacaagttgtggggaataatgtgcatgaactcgccaaaggtgggagctcacgtgaagtgtaaggcttaccaaagaggatggttagagctgagcattgcttttaaagttggtcaaaattttattagcaattactaagtataagtaaataccaacccaattaagtagtagaacaaaagtaacatcatcacctgcgatgcaatgcatatgacaaattgaatttagttccataaattaatttagttccataaattaatcatcagagagtcctgagctgctcatgaccgtgagctcggctagtataccagttttacactctgcagaggtggtaccctttacccacaagtcatgttacccatctgccaagggattgcgacttcccatacacctctaccgaggaggcgaggcagggtaacactacgaggcctttacaaagttccactagcttcagaaaacccgctacagtttctaggaagctctaatgcagggacccctcgcctgactgccatcgcagcaaaatcaacccaagggcctccctacactgaccactcccctactgcccttgcccctttcgggtaaggtagttctcgactagctttcctaattagtcagccaagggcgtcccataccacccttgtggtagcactgttttcccgggtggttctccatgttccaattaacataatgatcttatcatgaacagtaaataacaaactgacaataaaagtatgatcatgaataatatatatctccatacccaaaaccgcataaagcaatagcaagactatccaaatagttcaggggtaaacaaggtaataagataatcagactagggtgacctattgggtcccatcaaaattaaacctatgcatgaataaatgattataaagaacattattgggtaataaaagtgatcaagggcacaacttgcctgtgacttgagattcaaggtaccaggatgatcttcagatgacttgtaacctcgtgctagtcgtagcaacacaaataaacatggtatagacaaaattaacataacaccaaacataagaacaaactgcgtaataataatccacgcgttgctttgagattatgggttcgagaaccactaanatcggagttacggacaccgagttacgatttacgcaagatctatgtgatttagatattaaactatgttataaatggattagtgtatatcatataagagaatatctataaataattaactcaacttaatctagatataactttatagagatcatcttaatcaaata

SEQ ID NO: 18670 - DNA, 2750 bp, Arabidopsis thaliana landsberg
acttaggaatcgaattatattctttgtagcatcgaaaagacctggaatatcaattgccaattcatatccaaattgaaatccaaaaaacggcataccaaattcaaatctccataaggaaaattgaaatcctaaatccaaacattccaaattcaaatcctaaaaccaaaaaacggcataccaaattcaaatctccacaaggcttgaaatcctaaatcttggttctccgagtgatccttctcgtgacgtttgcttccacgggttttgaaggacctccatccttctctttcgggtccttctctttctctttctctttcgggtccttctctttctcttgttccttctctttcgggacaccatcctcctcttgatcaccatctttctcttgaacaacatcctcctcttgatcaccatctttctcttgaacaatatcctcctcttgatccttctctctcggatcaccatcctcctcttggttcatctcatcttgattctgcgattgaacgaagttatatcagtattacgcaattatactttagttatcatagtgttacttagtattacacaattatcaatatgtacattttcctcctttgctttctgctcatccttgaatgcttccaacgattcaactcttctatccaaatcagaaatcattattataatttcattcatctggtctaccatcttcttatccaagttttcaatcatctgaaccacagaaaccaaactcgggagttcttgtccaagcactgcgggaatatcctccgcacccggaatctttggacctgcggtgatctgcagggcttggatatcctgctggtagagctcatcaaacctgattagacggccctctttacgacgcttctcccaactttcaaccaccatatcagccacgtcaacgtcgtctttttcttcagtgattgctttcatgagtttttgctcctcaattccaagtgtgacgatagaatcaatgacctgtaaagataaacagtatgaatggattattataagaaaatataataactatcatttgtgaaacagtatatcttaagacaactaacctgagttgtacccaattctgcataaatggtatcaagaggaaagcctttcaaatggttcttcttgaacctcaccttgcacatcctaggacatcccggatctgcttctgcaatttcctcaataaatgtttccctcaactgtggaattgcctcgaatgcaagaagctacagaataaaaaaacaattttaaatcacaaatagtattcccagtattatcagtattgcaaacaatcacctattctataagttgtaactaacctccatcggaagacagaaacccggaaccggccatatgtacttctcgttgttggtgactgaaccattaaaatgattcaccgtgtgtgagatggttcctaacatgtaatcgaaagaatacctcccccactgaaaattcctacagaacgtgagatcactcatcaccttgaggaaaaattcatccacttgaggtgccttatctccggtcttgataggcgctatgataatgctgcttaagaaatacaagaccatcatcctcaacctttcttttgatctttcaccctccggtaccattcctatgagcttctctctcacgtcttcgcgtttcacaacagtatccttgaaatgcttcctcttgaaatccaaattccccgtatttttgtagccaagtttatagttcttgcaattgaagcccgatatcaatgcatgttccaatattctatatcggattggaacgccattgacgatgaaccacacttctttcttcctttcaatgcacgccgtgcgaagaaggagcatccacatacccataagtcggtggtttgggtctcttggcatgtggaagatgtgttggaaactcggatggttctcaaaccatgccctctcggacttgctcattgcaggctgcaacttatctaatgtagtcaacacttcgtgaatatagaaccgagttgaaagcttgattttcttcactctcttcttcctcattcttgtcagacttcccttcttccattgcctctaaaaccggactgatggtcgggattgttcttcaactcttcctccctcaattttggattttgctccgtcgatgatggctcctctgtcgttgtcggctcctccatcgttcccccatcgattggctttgttgtcggctcctccgtcgttcctactcctctcctcctctttaacctaattttcttccttagagacggcattaggattctctatgggtacagttagggttagggtgagactcggaatgttgagaagagagattagggttcttgttaagaatgttgagaagaaaacggagaagattgagagagaggcgtttggaaaagaaatcgaaaagtttacagtttcgaaacttgaagtttcagttttgaaagagaaaaaccgaatagatctagagaaatatccatttgggagagatgggtcggatgtgggtcgaataaatccaggttttgactgtaaaaattggatttcggttggggtatacaagtcaaatccacactataatgttttggagagaaattatagtttggaatggtaaaagcagttcaagcgttgcagatcatgtaggacatatacagaatatgcagatcatgtaagacaagtgcagatcatgcagatcaagcagatcgaatggtgaaagcggttcaatatgtgcagatcaaattattaaataataaataataaaaaagataattaaaaact

SEQ ID NO: 18671 - DNA, 721 bp, Arabidopsis thaliana landsberg
atataatgtgttgagatgatctttacctctcaagtgcagtcttcttatataatcgtttataaaaattgataatctgagcacaaaccaattttaaattgattaacgaggatcttgctccccacgccaaggtaattcataacttaatacaatttggctctcaagggtactgttgtaattttaagacatgcttaggtcagcttatttaagcttatgccaaagtcaattctaatttggaaattaggtaacttgttagcttatgcaaaagtcaattaaaataatttggtacatgattttcctcttaaaaccaaaacaatttcaactactctcaatgccagaaacgaccacatcaagatcacgacttgtagagcataattaagtagtagatcaacactacatttctctctgatttaccaaatgtcacaaaaacgtataatatcgtagtaattaaaatactattaatcctcatatagagcaacaaccatagagtgggatcacactctcccttacacccaaaaaaaagacaagggagagacacttctacgtatgcatggatcctgtaacatacccttaatatcaaaaactttaagggattcgaatactcctatatctcacacctctcttgaaggttatgccatatatataaaccttcagacaccgaagactatggaactgaccgactcagcgatcacctttactgattcctgcttgacttctccatttg

SEQ ID NO: 18672 - DNA, 530 bp, Arabidopsis thaliana landsberg
gtcgactgtttgaattataattgctccaaatgaatgacatatagttgaatgattggaaaaatgggtgcaaatggttgcctaaaattaagaagttgaaagagttgaatgagcatttatctattttttttaccatttaagatgaataagttggaaaaatgattcaaccctttcaacttaaaaagttggaaaaataaactaattataaagaaattttttcaacttgtatatcttctatttcacagagaaatgagttgaataatattcaacttttatttttcaactcaaaatttccaattatttcatctctatgcaaccattttcagcaaaaccaagttgaacattattcaactcattcatctacaaaagagtagatgaaatggttgaacaagtttcttttataatttgttcatttttctttttttttttgctgaatgagttgaatcgattttttcaacctattcatttcaaatcgtatataataaaattatattgtgtatttcaccattttttaacgctttttattttttaaa

SEQ ID NO: 18673 - DNA, 946 bp, Arabidopsis thaliana landsberg
tatctggcatcccatctggctcgccccggtaaacaggtaatgatggcgccccgcatgctccatgacgacggcggctctcagcccccttacggaagcaaggagacgtcagcaaggactcgacagccccgacagctgtccttccgccaggctccaacgctcctccaacggccacgacatcacacaaacagggtgccaaaacctctccggctgccacgacggcatgtacttagggcactagctcctctccgctagacacgttagcatactgctacatctcccattgtacacctggaccctctccttacgcctataaaaggaaagtccagggccctcttacgaaggttggccgcgcggagaaggacgggacggcgctcgcgtaaggccgctcgctccctcccgcgtggacgcttgtaaccccctactgcaagcgcacccgacctgggcgcgagacaaacacgaaggccgcgggtttcctctttgtacgcctgtctccctccgacttcttcccctcttcgcgctccgtctcgcgccgacccatctgggctggggcacgcaacaaaaatttacttgtcggtccagggaccccccggggtcgaaacgccgacagttggcgcgccaggtaggggcctgctgcgtgttgacgaacagcttcccgtcaagctccagatgggtagtctccaacaacctttccaacctgggacgatgctccgttttgggagtcttgagttcatgtccctcgacggcggctacggcatgatactccttcctccgccgcgcgacagcgacaatggcggccgtcagcccgcccgccggcggcggaatcaacgacgtcttccccacatggcggaagaacaacatccgggtttgtcctgtcacctcccccaccgacggaggaggaggcggggcaaccatggccaagcaggaggcggcacctccccccctatcg

SEQ ID NO: 18674 - DNA, 1841 bp, Arabidopsis thaliana landsberg
  unsure (1)..(1841): unsure at all n locations
aattaggaaaaaaagaatatgctaagttgaaggcttaaacaaataaggataaaatatttttgttatgagctaatttcctttatcgataaggtgaaataaatatcgaattatttgtaggaaacaaatgataaatggaatttattcatcgcagttaaataggcaacattttcctttgagaaataagtttgttataattttatatagtccatatcttttacaaatcggagaataaatgttgttttacttgaatgttggaagtaaccttcaaggaaagcttgtattaaagaaatattaacgcaattgttaatgtggtttcctttttttgtggggatattttacctaaaaatatataatcaacaatcaacgataattaaggaatgagtataatatcatctatataagcaagatccgtttcaatattttcaaaattatgtttactaaatcaatcaatttcgtttggatttttttaggaaagtgtcaaataattaaagatgcaaaataagaaggacgtgggccaaatatcatctattaacatgatttggcccaaaaatccggataaaaagaacgggtaaaacccaaaaaaaaaacccgatccaatattgatgggttaagttgtacttcaaaaatgttaagtaaatgaatttgtttagctggaataaaaatctatttttgaatataggacaaacatcattatgtgtcaagataaaataagataagatgaataaaataacagtaatgatattgccgaaaatctaaaaaatgttaatagccatattataagaacgtaaagataaataaataaactaacaataaaatttgtttatccaattattcaaaaatcctaatgagtcaaaaacttatttgactaaaagtgtctattattaagggttattgttataagttacctcttttaccctcttttttgtcaaaaacccataaatatccctaacaaccttcaattcttttttgtctctttctttcttcttccctgcgccagagtccgaatccgatctaccaccactactccttccgcgggtcattaactgccgccgatttcaaactatccgatcattttcggcgatatccaatcgcagactgatgttgttagtaagtttcttttgtttacttccgccgataaatttcatatttacgagagcaatctagagaattttctaggtcgctcgacttctaggtattcttaaatcgatacgatagagataagttcgatagttcttcttctttgtagataaattgaatctgtgcaggcgcttcgatttatctggcttttgcttaagaaaattgcaatttgtttgatcgtaggtgaatctgtggttttgatcagttattatctttgtcactctttgaaaatggctgtgtaagttcttcttttgccctattttctcgggatattattagaaatctctcatctataaaaggtatcaatattagtgaattctgtgtgtttaaaaattccttgatgcagtgttgcttctgctcctgggaaagttttgatgactggaggctaccttgtactcgagaagccaaatgcagggcttgtgttgagtacaaatgcacggttttacgcgattgtgaagccaatcaacgaagaagtcaagcttgaaagttgggcatgggtatgtatcctcttctcatttatgtgttattgggaagtaatattgttgcagcattgaggggttattatgttgcgtgagacaattgttggtttgtttgtttnnnnnnnnnnnnnnnnnnnnnnnnatgtcaaattaacatcaccacagctctcgagagaaagcatgtataagctgtcactgaatcatttgactcttcagtctgtgtct

SEQ ID NO: 18675 - DNA, 673 bp, Arabidopsis thaliana landsberg
gctgtttttggatcgtcttcttgaacctgagataattaaaaacaaacacggtttctttggtaagaaaataaacttgaaactagtattatatattttaaaaatctcaatcaacatggaatcgcaaacggatgaaacttgatattttagcctttgactaacacgataagaggttatggtccgtacatctctaaagccagggacaagagcatttacgatggtttcctcttaagtatcactcgaaccaacaacctctaaatttttcgtgaaatactttattaattgagctattgagactcttaattaatgattgaaccatcttaattaattatgaactagttatcttaagttgtgaaaacatatttaatttttttataaagattatttatttacctgtagatcggttaagaccatagctacggtagctttgacgacagtcttggtgaattgaaacacacctttaatcttttttcccccaggtaactgctctagaggaatacacgagatgggtgggttgaagatgtaactttcgaggaggaatccaaaacttgtcatggtcttttcagccagcgacactagggcggctcccaaagagtgtccagcaagccacatagctgctttactgtgtttgtccaccatactgcgtattgctcgtatggcctgcaaagacctaccg

SEQ ID NO: 18676 - DNA, 1437 bp, Arabidopsis thaliana landsberg
caactacttgtacctgttctgctgcgcttgttattcatagatggagtggaaccgagtttgcagagacctcttccagatgatggtatcaaggcaaaaaattatgtgcaatggtagagacagcattaaactatacaatcggatttactgatttagaactgtagagagatggaattacaaatgaaaactacgttaaccaaagatagtcacgaggtacatacgatttaccaaagctagatttgactcgcacagacttttataaacgtctaatactattaactaaagaatataaaggcatacatgacatgcccttttgctttttacctattccttgtctcattgttttactctcttatactcttctcctcttcttctgtcttcatcttcacttatgtcttttccatttcttctccctacttacaccatcatcatacctcgtcccctacgttgtcaggacataacgtttcacagcagtaacagcggctcttgatatgagaaatgcttgacttgaattgctttgcatcgtttagacaaagatcctcaacatagtcaacaaaggcataaacttcaccacgatgctcaacctcttcaagcttagctccaaaaccttggatttcaacactttggagggttttcttttcgggatcgaagtagaatacatagtacggtttacatgtatacttcatacacaaaacaatatcgcctcttgcagtcactccagcaactgaaaactcgcaggaaccaaggacttcattctccggtaaagtgtagacatacttgacccattcctgtttctcaacatcctctagaacccacaaacacaactcaacggaacgtcttccaccaacgtcaacatagttgcacttagtcacagctaatttacccatatagttgaccaaacttaatccactagggtcctctatatgatcatctaagcattctgactcaataaacttgaactcctcagagctaacatcaaagcaaacaatcaaagacagtgtttcctcgaaacaagttctagataagtaatacaaaaccccattgatgcatatcccttgagtcctttgacagcgataatacaaaggaccatcaatatcgtttctatcctttctcctccacttgagttcaccagatccttaatttttcctctttccattggtttcgccggagtgcgtgattgttccgccggagaagcagagggttttaggaatacgacgacaaaaagagagagaatacagtacgtggcgcttcagtgaccgctcctccctccaaactaaaacaacttcaatcgtcgttctgcaaatcttgatgttattaggcctatactttaatattagggcccaataaatgtttgctaaaataataaaccctgccttcacaattcaacattctaataaccaaactaattagtttctttcatctcccatcaatatttttttc

SEQ ID NO: 18677 - DNA, 1136 bp, Arabidopsis thaliana landsberg
gaagaacggacctggggaataaggggcaaattctaagaaagagaaatgcatatatggactgcacaagaactagaggtaattattatacctcctcacacgcagaagttaccacatttaacctttctttgagttctgttatctgcacagtaacaacagaaccaagaatataaagttacatagacgctggtgaaaccaaaacgttttcctccaaagaatcagatacaacagaaccgccggaccttagtgccaaattgagtcttgaaggaaaatactctaagctttgcctcaattcgtggcaccttcattagctctagtaagtactgcgataaacaaaattgatggcagaagacaatgagttagctaagtaagctaattactaaccatatttatttatagtaggaaccaaaaacagtgcgagattgataacttcaacagacctgttcatactttcccaaggctgccttgtcaccagtgtaggtctacaacaaatcagtcaatcacgacaaagaacaagaactcttgtcaagaaaaagtgaataatgatgattacccaagaatagacaaaataaataaataaatataaagtaaataatgcaactactcaaaagtcaagaggtagccttaagaagctccatctcctcatttgttgggcaaaaatttataagtttctctatttgatcaacatctactacagactcatccattgccaggactgcagtctggacgatgcaaagaaaaaaatgtggactattatcattaagctatgaagcgtaatgacttcttacccaggtaattaatgtaggttttgtagcttaccatcatatcaggcagcggcatcgaaagattaataaccttgttattggctctcatatagtaggatctaacattaaaaaccctgtaactggctctcctaaggtcatgctggaaaaccataagagagactatactttcaaaagtctccaccagaaaagagcaagttaaaaaatatatgtgacgcaataaccaaatgtgttaagaatatttcacattaccagtcgaatttttttaggttttgctcaacaaagaaaagggtctctaattctgatatatcaagttctattgcactggcaaaaaaaaaataagaaatgatgacttgc

SEQ ID NO: 18678 - DNA, 583 bp, Arabidopsis thaliana landsberg
agaactcataaaaatctcatttaatctacctcttttatataaaaacataatttattataaccaattcgaccaataaaaaaatagatgattaaatataattggttaaagaatattaaatacatttattattggcataaaaaattgaaaacaacatttaaattgaaaaaaaataaaaacccttaaactacatttataataacagagggagtattatatataaaatcattaggtgtcttttaccttatgttattgttttactactattcatatagtatcatttaaaaaaaagaaggttttagtatttgttgcttagtgctgatgattgatattttactcacctgttctaacatgctcaattactcacattcatattgtttggtatcgcttttgttttattacactctttgtcacacaagcttttaattgttctactatccattaggattagttataatcagtactccgaatattatcgaatcatcacacacatgcattgacacattgttaatagctgcatgtaatgattattcaaacagaaaaaaaagtattgaatggtctaatagatatatccaaattatttttc

SEQ ID NO: 18679 - DNA, 826 bp, Arabidopsis thaliana landsberg
ggtggtggggacgtaggtggctacatggtagcaccagggagcaatggatctttttacatcataagaactaattttgaaagtgatcataaaggtaactttgataatttgcatggtagtggtcagggtaacaagtgacctccatatgatctgatatacataaatatgccatgtagatggttcttctaaccaagtctagtatctaatgaattaaaaaaaaagactttaagttttcctcatactactgtcatttcatatatggtactataaaagagttccaatatgggtctatatcatgcaagaagtgtacaattcagtgatttgaacattaagttggtacgacttatttagtagcaatttggttctctactggcatttttgggctctcaagttaatccatttcatttgtttagttttgatgaacatgtcatgatatttaataatcacatcatctcattgtcatgacaagataaagataattgggataccacactggaattaaatagtattaatctttactttcaaattacaagaaactagattcgtaccactactgattcgtgttcacacatgattacatgaatcaatgttttggccacggtgagacatagtcaattctaattggaggttaaggtttggtttattgaaacgaacatgtcttcccgctacttcgacctcatcaatgtttattttgttaaagagttttcattaaatagaaatacatagtaggaggaaacaatacataacaaaaaaaagtttcatgactaagttagttttttctgtaattgtttttttttgttcggttagaaagactctggccactccaaat

SEQ ID NO: 18680 - DNA, 695 bp, Arabidopsis thaliana landsberg
ttaatagatatatattgagcataatatatacgagcccaataaaacgtcattttgccttcttgaattggggcgagtttagatggtcacatgatcaaacataaaataagaatgacaataaatcaagacaaataagttgacgatgaaccccaagcaatcaagaagacaagagcttagaaactgtccatgtgtagtttttacctacgaccatccatcaaatatgtataccttttatctgtaatggacaattactaaaatataatttttgtaacaatgcctaaggaggagtatgtgatcgagagttttctggattttgccgttgacggctcagtcaaagggcctcctttgaaaggcttctaaagctttttgccttcgtagctttgctctttcgttttacaattgtcctcctcctcgagcaaaagatatgggacgaacaacaactaaagtccaataaacgtaagttagggtatcacgtgatcaaacattaatacaagaaataaagattaatgagtcagtgatgatccaacctatccatgtgtagtttttaccgacgactaccgaatatgtatacgttttatcagtaacggacaattattggacgattatttatataacaacgcgtttaaagtaaaaccgtacatggaaaaagacctaaagcgccatattaacattctttttactgaacccaatgaaacgta

SEQ ID NO: 18681 - DNA, 517 bp, Arabidopsis thaliana landsberg
tatcagggattatgttaagggaggaccgttggtggtgctctaagtgttttcttacaattgcaatgcatgaatattctaagtcgtggattttcgtaattgtgtgcgtgacatccataatatataagaaaacaataaacaataatttttacatatagttattaaaatataacaattattattacaacacataaaagaccaattagaatttatttttgagagaatatcaccttttatggtctagttattttgtaatctttatttgaaaaccgttcattgactaactttcattgtggtcaacatgttgattatcttcctaatcaatactggctaaccatttttattcttctactgaccttctttggttatttccccttgacataagtcagcaaactttatgatttgtttccctcgataccactctaatttcaaaattcagtggtagctcattccaattatgctcattttagtgtaattttttagaaaatatataaaaagtgattatagtattcaatttgac

SEQ ID NO: 18682 - DNA, 3066 bp, Arabidopsis thaliana landsberg
agtttgcagtatcacatcaaagtatgggatcccttccatcatatgatgcattaaaattgatagaatagaacataagtattcaaaaatttatttcttataagctcattaagttttttttttgtgtgttttagcttaacgaatcaaaacattatattacaatgaaagatataattttatccaactaaattaatattaaataaattattttatattttaaacttcaatggccttttaaatagctattattcagactaaatgattttataaaaaaataatacatgctaaatttaattgaccaataacacatataaaaacaaatttgtgaattttctttttgcttaaaacaaaaattagatatagacataaattagtatatgtaaatttgctttttattttttgtttttcttaaagggaaaataacaaagtttaaaaaatttctgatagatgtgtcatgtgacacaatcctatgagttactaattttgaaaaccatactttatataataagattagacgcttcttttacaacaaaatgatcccatatgttaacatcttcgatatggttatgagatcttggaagcaagaagccaaaaagcctattgtttattatcagtaattcatatacaacttagatagaaaaagatgaactgaatcacttgatgagaatgcatctcgttggtgctccttccgctccaaccaatcttaacggtaagcaatgaagcgtgtacattcctacctccacgtcatccagcttcagcgcttcgacagggattatatcctgaaaacatgtgtatctcacgtgttaagacgtagttcatctcccttttaagcctacctatctctctcactttcttgtccagtgaataccgctatattcaatcatatcccatggtttgacatccaaacatcacaggagaattggaaatgtttaggtacttgaatatttttttatagagaaagatatactaacccgtcctttaagtataaccctgtgtgtagcaggtagttcctcaaaagcagcaaatgaaagataatcaagccctggattccacaatgcagaataaccggtttcagaaaaaaatgtgtaatacaagctatcgatcatgaaaagctaagaaaccgaaattgtccatctcttaccaataagtttgatgtctgtattctcaaccaaccatttagccccatcggtcatgaacccagcaaaacttgaatcaaactctttcttaaacataagccgcctaatatatatatatcaaacacagagtgagtaagcttatgctctctagttgtttttaccaagattaaggtaataacacacactctcaatactgagactcttacttgtcagtgttggatgttctaaagagcacacgacgaactcctctttgtatatgaagtgattccattacctcagctaataaataataatccaacccaaaagcaaatcattagacaaaaagatcctaactttaaatttcgttacaaattcaacaactcaccagtaatgttcttatctctcggaacatcaaccaacaaagcaggacctatatagacaaaaaccccaatttcaaaactttatcactaacccaactaaaatcaataaacaccagattcaaaaattaccatttaggacttggagatcaagcgaatcagtatcaaaaccagcatcgtaataattatcccaaaagtgacctggagcatccacgtgagttccagagtgaacagatagtttcatctccgatacgttagcgaatgatccattcttcatactcgcggctaatcgcaggaacgtctttcccaatccttccgaagattcccaagctggaatctccggcgtgtaacgatggctgatgtcgtatatcttacctccttcgtagacctcacggcggattggtttgggatcgtcggcgaggagagaagaagagagggagagtacaacggcgaagaggaagagagggaaacctgcggaccgggtcattgtttcgggtcgccggttaacgggttcaatttttgatactagtgtttagtaatcaaatgattattctatggtttatataatggactcctttgacctttgacttttgacttttgagtttggcaaaaccgtctatattgactaaaaatagctgaaatgatttttattaaaacaatctgaatatcatcgaggataaaatagctgtccacatttcacaagcttcatcaaaatattgacgtcacgtttcttgattctcttaatcaaagtgttgatgtcacgtttttaacttgatgatagtaagggacaaattaagactcggtttaatcacaaaatgttgatgtcacgtttcttgcagaacgtataaaaatattcatagcttgatgttactatagaagctttatgatttgctttatagttaatatatactccattgttggccaattggtggagagattgtaaatttgtaataatggggaaatcgagttagcggtggtggacactggacaggcctagcccaacatacagggacatagtgattataccttttgccttccaaatttgtttttgttttaggtagcccatagtgatgggccggccctgattgtggaaggaacactatgaagacactgatccagagcctctcccttcttttttattgtagtgatcttcaatgcatttagcttacaaaagcaaaaggtcagagatttgcatatgaatttaattgactaaactccaaagtattgattttgaacaaagctatgcataagaaacttcttggttactgttttgtttcaaagaatctgatgatgtttgtaacagatgtgaaactgcaactttctaaaagtttatttttgttgtttaattttgattctaaaagtaaacgattaggtgaatttgtttgttaccgttgtgatagatttttaacacttgttttatttattaaaaaatgttttcaaacttctatttttgtattattactattaaaactttaaggatttttctgtttcaaataatattttggttatttttgttacaaatttttttgttatgttttcaaacttaatacatgttatagatcatgttttaaaaatac

SEQ ID NO: 18683 - DNA, 253 bp, Arabidopsis thaliana landsberg
agatacacttttcagctaactctccactctctttggaagtaaagaaatggcagacgacattgagaagtgccgcaggctgcagctcaaatggttcgtttccttgataagcaagtctgaaataggatctcttccattcaaagccaagaagacaaaaaatataatggttgtatgacatgttggttcggttccagatagtgtggctctctacatatttcttcagtccttattctttgactcttgtatctaaaaattt

SEQ ID NO: 18684 - DNA, 514 bp, Arabidopsis thaliana landsberg
acaggattacgatgaacatagagatttcaattatatatacacattacaatattatatatacattatatgtaagaaatttctttaaaatatatttctaatattttttttgcttaaatttgtatttattcttatttgatattaagttctaatattttattgtatcaaaaatttttggtgttgttttctaaacatgatattactttttacttgtaattgattcttaaaaaatattttctataatgaaaaaatcttaattttttttttaaaagttactaaattagaaaaatatctctataaattaattaattaattaattaatcgataaattaaaacctctataaattaatataattttttggtcccaacattattaatttataaaggttttaataaaagttttactgtaagtagaaagtggttcttggtttaggataaagtgcatacgttctgtgtacagtttggaattagttttatctttttcaaacattttagtgaatcatttggactatgatca

SEQ ID NO: 18685 - DNA, 3828 bp, Arabidopsis thaliana landsberg
cgtttgattagttagcaagaaagagagaggataatttagcccatcaatgttttttttccacgtaagtttggggtgattgatttgggtcataacaaaatccgcccatatctggtttcgtttcatagactcggcttggggtttgtttagtagggtgtcagattcacatctaaaatacaacagtcacaaatctcttatgttaaggcccatggtccaaggggtatacatattaggcccattagaaacacggaccagaaggtaaatgacgaaaacaccctttcaaaaggaaacagagaaggactgagactcagagaggaaaaggacaaaaagaatgggataaagagagaaggtgtgtcagaatttgaccagattagaccggtcggtacacagagtaaggacggctctctctgaaccagtgtagacacgtcttggcacatacttctcacatgtctctctccaaaatgttggatgctttttggtgtgaaagggagtgaagatttgcatgcttcttaactcctagcttctccatatccattctttacccgacaaccttcgcttctgtctcttcacaaaacgaatctcttctgtctcttttgactgtttttagcctccccaattttacaattactaccctctcttctttcctgtggaacaaatcatatttgtcacacactctctctctctaccttaaagatccatttgtcttgttcctcaagatcatgttaagtcagaattcacccgactattgttattctgtcttcatggtattgtctagatttttactttttatagctcctaaacaacataagatttataatctattattacaccgtaatgataaaacaaattgaaaacattgtcttaatcttgatgcatgctgagagataagataagaccataacaaaacttaaaattgataatcaagttggtttaacgtaaaactgttgagtacttttacttgatgttttaaatgtagtttttttgaggacctgaacgcattgattctgcatttatactggtattctattaaggacctgtagtgattggtagcacatctacacacaccatcaatctcttaggtccatataccatttaatccttctttttttggaaaagatgcacacaacaaattaggctaatgagccctcctaaacacttaacaatataatggctgtattattgggaactgctttacatcgataagctcaatagtctctactacatgtagcctactctcttcacagttcagtcttcacttcccgtagacacgtacttttgacataaaatttaatgtatttcttaaaacaaatattgcatgtagaaaccttttttaacttttaactcagaaattcgacgtgtataacaccataattaaaattaaaatttcaaaagcattgttagtcagcaaatgtaatcatatgatttgtctttctcttatttatcataagttattgacaattttggtttctttcaacattcactaataatgtctatgccatcaaaacgtgtgacagattatggatggagagattagagaatcgtggttttatttcaaaacagaaaatcttgaaagaagagccaccagctacgtataatgaagtaaagaaacagagcatatctattctctctctatgttcacaataaacccaacatactctgtcaaaaagcttcactctgttctccttccccatctctctctctctctatcctccataaaaggaacctcttactctatcacaaagttccaacctttaactctccaaagcttcaaaaactctcaactttcagataacctctcttctcaacaacatgccttctgaattcagtgaatctcgtcgggttcctaagattccccacggccaaggaggatctgttgcgattccgacggatcaacaagagcagctttcttgtcctcgctgtgaatcaaccaacaccaagttctgttactacaacaactacaacgtaaaccaacctcgccatttttgtaaagcttgtcgtcgttactggactcatggaggtactctccgtgacattcccgtcggtggtgtttcccgtaaaagctcaaaacgttcccggacttattcctctgccgctaccacctccggttgtcggaagccggaactttcccttacaagctacgcctgttctcttccctcagtcgtcttccaacggcggtatcacgacggcgaagggaattgcttcgtcgttctatggcggtttcagctctttgatcaactacaacgccgccgtgagcagaaatgggcctggtggcgggtttaatgggccagatgcttttggtcttgggcttggtcacgggtcgtattatgaggacgtcagatatgggcaaggaataacggtctggccgttttcaagtggcgctactgatgctgcaactactacaagccacattgctcaaatacccgccacgtggcagtttgaaggtcaagagagcaaagtcgggttcgtgtctggagactacgtagcgtgatagagactatcggatcagcttctacttcatcggagggtttcaatctatcttcttcttcttttagcttctctaccctaactttcagttttagttgatctggttcttatttagttaggttacttgtgaacgaaacttcaaatcagagaaacgtttgtttgtttgtttgtttttttggctctatttaatgtcaattccaactttagaaatcttggaaaacagaacagtccacgttttttaggaaatgcaagtctgaaatttatatacaacacatcacttatatacaacaaagcatagataaggtaacattatccatcgacgaggagagggtaacatattatatatttacacagaaaatgtaactaggaaagtgttgattggagttaggctgcaccaagaaacatcaaagtgtatatgtactaagttaagtggaaaatggaatttagccgagcattgatggatggccactgtgtagtatcctcttgaacatatccatcccaaaggcagagtccgatgagctgaaacaaaacttaactcatttcaacacttgtacaacaaagatataaagaacattcttcactcatctatgtctgtggggatcgctacacctaaagactaagatctctagaacacagtttgatatgtgaataaatgaagactgatgtaccttgggatagtgatctcaaaagggtagtagattacaccatcgttaatgggaggaacatgatccttcttctcattcacgaattttatgatttggaacaagacttcttgaagggattgctcaagcagtgtcctacgagaacttctctcctccgatgcctctacagttattgattagagcatgacaatcacttcacactcttataataataaaaagatgtaatttttggagatgagaacaggaaattgatcaatcgtacctccagggtccgtaactagtttagaatggtgagactttccgacagggggcttagtgggctgaagcacattcagattgatgtaccattgttcccagtacaaccgttcgattttggtgaaccaagaaggctgtttgcttttgacttcatagaacgatagacaaatcttggcaaaaagaaaaagagatcattaacagccacaaaggatgagacaatgaaaaggaataggtacaaccctatatgctgcagaaacgttcaatccttgcttgagcaaggtatggaatatgtggttcactgtcaatgaaatggaaatcaagtatttgctatcttgtatatacctgactctttttgtttgggtgtttctcaatccagttaatgaactgctcaatcttttcatcgattttcttctccacttcaatttcaccg

SEQ ID NO: 18686 - DNA, 2147 bp, Arabidopsis thaliana landsberg
  unsure (1)..(2147): unsure at all n locations
aaaaattcccaaaatattattaaagcctcnttttgtaaatcaaaacccatacttactaattctaaacacagtttcgtttttttatccttgtttcgaaggttttatcaaaaaccaaaatacacctttgaagttattttttttgcaactttaccctttatgttaagaaaatagaggtcaaataccataatctaaaaaaacacctccaatataatctttggacgtatatagaatttaaaaactgtataactttgtatataggttatcaagactacgtcgttttaaacattttttaaaaaagaaaaaaaaaattaatgttgaaaggtggtttcaaacttatatggacttactaatagaaaaattgctaagaatgcccttctaacactaccctatctaaattctgcccttttctgttgaccattttatccctattttgaaaatgttttaagattaaaaaaatgaaatattgatttttccgcctaaaatattctgaaaataaatttaacgccaaacacattttaaatatattttcccgtcaaaaacatattcaaaaaaacaaaagattctaaaattgtaaaacccttgtaaatcattttaaaaccttttccaagggttcactagagatttcaaaaatttttaaaaattatgaaagtgtttataagggtttttaaaagattttcaaatggtttacaagggttttaaaagatttacatgagttttgaaaagattttaaaaagatttgcaagggttttaaaaacctttgtaagagttcacaagagatttaaaatggttgaaaatttattaaagggtttacaagggtttttaaaatatttttaaatggtttacaagggtttttaaaacattttaaaacatttacaagggttttaaaactcttgtaaatctttttaaaaccttttataagggttcacaatacttttaaaagagttacagatgttttaaaatatttacaaattctttttaagagtaaaaaaagatttaaagactttataagagttttaaaaagattttaaaatgatttacaaagtgataataggtttttgagatcaattaatcctaaagcactatcatgtcgttgtagtactgaaggttgtcaatccaaaggagtgtgatgctaacaatcaagatgtgatcagaagtcactaagtcaagccaagcaataacaggttttggtttattctagcagtcctaagtgaacatgcagaaaacagaaaatcaaacacaaatagtaaaacactcgaccaacacagctcttggcagagcactgggtgaggtcgagtgacaggtcgagtaacagacagaaaataaaacacagatactcgactgcacagtctgttgccaaacaactgggtggtcgagtatgaggtcgagtaacaagaaagaattgcagaaactaagcgacagataacaagatgcagtaaacaacagtagagtaaacaaagaattcaatccgataaagaattaccgcggatagtaatgccattccatcagtgaaattgtgctgcacaacaaaaagagcaaaaaaaaatcttcattttctcagacgaatcatctcttggcaatctttcatcatcccgatcgaagctatctctttaatatttcaaaagggaacacgtacttacaacaccatcagagaacaagttgaggtaaccaaagactaggctcgaagaacgcgtctccacctgttctggtttgtccgattttccatcggaagtaatttctgttcctgaatctgatttatcagtagcgtcactagcagaagtctttctctgcaaatagataagtttactcagaaaccataacaagatgaatcctactcgggcttcaagtagaagctcaaagaatagatgtttgcatataacagaagaaatagaagctcgtagctgaaaaggtaccacatttaagtatgctaaacctctcattcacgcaagagactgataaacagaaattctaccaaaactaatgtgttccttgtttttgtactctgcttgcttcttgagttcaactcaaaactcatctgctgcaggtagaaatatttacatagaagtgtgttctcaccttacggagagatttatctgtagagccgccagagactttctctgatgaatttacaattgcatcagaagaagatt

SEQ ID NO: 18687 - DNA, 579 bp, Arabidopsis thaliana landsberg
ttatatatgcagctactaggaatagggtgggtcattttgcgaaaaaataatgcgccccttgctggagataggcgtcgtacagttatgaggcctcctcaagttcttcgtgaggggacaaagaagactgtctttgtcaacttcatggacctttgcaagacgtatgagctaactctttatcttcctcttcaaactttttcgtgtaaccataagtaatattaccatttaattttgatgacttttcgatgacatgtcttatctgcatataaaaaatcaggatgcatcgtcaaccagatcatgttatgcaatacttgcttgctgagttgggtactagtggttcgcttgatgggcagcaaaggttggttgttaagggaaggtttgcacctaagaattttgaaggaattttgcggcgatatatcagtaagtaactttcttcttagtctcaaaatttaagttgccataaaagtatatcagcttggagttgataacctcttgttttattatttctcagctgactacgtcatttgccttggttgcaagagcccagacaccattctctccaaggagaaccggctctttttt

SEQ ID NO: 18688 - DNA, 2451 bp, Arabidopsis thaliana landsberg
atatctaacacacacacacacacacacacacacacacacacacaaaagagttagttccgtacggcgattgagttggcggttgcaagaccaaggtcgttgtgacaatgaacactgaagacaacatcgtcaattccaggggtgtttgctttgagataggtcacgagttccgcgtattcatgtggcatgttgatccctaccgtatccgcgacgttcaccaccgtaacatcggcttttatggcttctccaagaatcttgcatagaaaatccttgtccgacctgaatcacactatattttgaaatccaataaatatatatttatatatgtatatatatatatatatatatgacatgatcaaatatgtaaaatgtcacaagtcgcacaaaatccataatatatctagtaacagctaaaaccgccttttctatcatgatctagacatatagtgtttgaaagatcttaacaatgttttagtgacaatctaaaaaccatcttatttgagtttttcacttttcctgaccaaattcttaacataacatttttcccacttatctattttttattttttgcaaaatccaaaaaccaaaatctaaaatccaaaaactatatataaaaaaaccactcacaaccattcatgccttttgttttataaattattcttgccaaaaatatacccaaacgtcaacgcaaacataagttactaacaaaattagttcggtaatacaaactaaacgaacataaaaccaaaccaaaaacgcaaagaaactcaagaagaagtgattgagattattttttgatatataaaggtttaaagatttggacctgccgccatcttcgcacccaaactggatgtcattgaagcccaagcttttagcaaacctaatactactcacggccatctcaatcacttcttcttgagtctttttcaacttatatttcatgtgaatgtcactagtagatgtgaatacgagtatccttggcctcttcgcgtacttcagcgcctcccaagtcgcctcaatgtctctatgtttgcatcgagctatggcgcatatcacagggacgtaggcagaagcctgacgcactcgaaactgagtaaattataatgacatttgactatatgaccataacataattaagaaaattcaaattttgatataaaccaaaagttgtgtagaactatggatcattcgttagctggcaacagtacaatggtccattactcctttgtatcttttctttcaatttctctgcaccttccctttctctttcactttaaagcattatttataacatacctctctctttttttccatctttattatttaaaattcatattcaaaatctaatttccatttttaataataataaatccactctgagagaggcatatatatagccccatcacactctcatatatctcacaaaccaatctaaacatcaaagacaaaaaccaaacctctttcactattacacttttcctcaaaaaaaagaaaaatgtattcgttagtgtttaaactctttctatttttgtctcttcttcaaatctctgtctctgctagaaacctagcttcacaagaaccaaaccagtttcaactactcaagtaccacaaaggagctcttctctccggcaaaatctccgttaacctaatctggtacggcaaattcaaaccatctcaaagagcaatcatctccgacttcattacctcactcacacacacttctcctacgtccaaaactctccaccaaccatctgttgccacgtggtggaaaaccacagaaaaatactacaaactcgcaacacccagcaaaaactcatcacctctgtctctaactctcgggaaacaaatcatcgacgagtcttgctctctaggaaaatctttaaccgataaaaagatccaaaccctagcttcgaaaggagaccaacgcaacgccatcaacgtcgttttgacttcagctgacgttacggttacaggatttggtatgagtcgttgcgggactcacggacacgctcgtggtttaggtaaacgtggctccaagtttgcttacatttgggttggaaactctgagacacaatgtcctggtcaatgcgcgtggcctttccacgcgccggtgtacggtccacagagtccaccactagtggcaccaaacaatgacgtgggactcgatgggatggttattaacttagctagtcttttagctggaaccgcaacgaacccttttggtaatggttactatcaaggtccacaaaacgcaccgcttgaagctgcgtctgcttgtcctggcgtttatggtaaaggagcttatcctggttacgctggagatttgcttgtggatactacaacgggaggtagttttaatgcgtatggtgcaaacggcaggaagtttttgcttcctgctctgtatgatcctacgacgtcggcttgctctactatggtctgaatactaaaaaaaag

SEQ ID NO: 18689 - DNA, 1250 bp, Arabidopsis thaliana landsberg
actactgctatgatcttgatgagttaccgtattgtatcttttgtattgtttcattgaagacacttagcggcacagactgtatcaagctctctcaacttccagaagctataggcaacttgagtagactagaagtgttgaggctgtgttcttctatgaatctctctgagctgcctgaagcgactgagggactcagcaacttgcggtttctggatatttctcattgcttaggattgagaaagttgcctcaagagattggcaaactgcagaatctgaaaaagatctcgatgagaaagtgttcgggatgcgagttgccggagtcagtgacgaatctagagaatctggaggtcaaatgcgatgaagaaactggattgttgtgggaaaggctgaagccaaaaatgagaaatttgagagttcaggaggaggaaatagagcataacctgaacttgcttcaaatgttttaagtgaaagaacgttatcgtagtagcttctgtggatcttgtaatgtttgttattcattattttcgttgttatatacattataatggctactgagtccaagtacagagaaaatgtcatgccaaagaattttgtgtaggtcaatcttttaaaaccatttaagagtactactaaatccttgatccttatctaacttgaatagatttgaacagagttattcaccaacatttttgacaaactataaatgtaatattcaatattcttaatgttaaaaatataatgttggtaaattctttgaaaatcctaaaatgtgaagtcaagtctcctttttcctttgctagctaaacttctgttctgggattcaaacaatggtttgtttgaaacttcaaagtaccgcgtgacttttccgttataaatttgatctaatggcttttgtgaagagtcacgttttttataatcaaagaaagagtcagtcaatagattaaaatttctctcaaattgcttggttttcatcttaattcataattctcctctcccttcataggaaccattatgaattcgacttcgattcaaagctttgatgacttgccccacaatcttcgagagtgtttcttggacatggcctcatttcttgaagaccaaaggataatagcttccactataattgacttatggtctgcatcatacggtaaagagggtatgaataacctccaagatcttgcctctcacaatctccttaaacttcttcctattgggtatgttactttccattcatctaccaattcttaacccta

SEQ ID NO: 18690 - DNA, 3230 bp, Arabidopsis thaliana landsberg
tatatcctctacggttaataaaagagtgagaaacattaatgcaataagataattttttctgaacatcgttactcttcgttatagcttcttccaacttatcccatctccggcattctatagcaatgcccatggcttgtaggtactttccatcactaatacatctgtcaaataggtaaccatttttttttttttttttttttttctcaacatcaactttcatttaccaaatgattacatccaattgaaggtacataacattcccctctatcaaattggacccaaatgcaatggtttgatctagtatcaccctgaaacactatcggatccagcgccacctgatcgaggaaccattgcatttttaaaccacaatgagatagataatactccacaaatcagaatattatcatctctttgaccacctacacagactctaagcgacatgagaacaactactaaaacggaagagaccaaaacctagtctgaagtacaaagtaaatccatactattagtccctattgatcagaatgtaatccatgtcccaatagcattaccgcccggaggcgcatcatcagaaaggctcaaaatccccggctttcgttgtttcggtcttaaaccaaaagcggaccatatatccgactgacccgaccaatgatacaaggcaaaccagcaaggctagagcttttcccgagctaaccaatgaacatcaggctactaatcgattaaagataacacagtggagcccggattagtaagacctcacataaacggtgcattgccagaacgatctcgccgcacatgccttgttgcctcgctccatcgccggactggaccagacattgagacggttcactagatctccggattatctcggccaccggcgaccacaactccatccccacgcctgaaagactctgactgcgactctgcctctgttcttccgtcggcttggttctccttggggatacagggatcgaaacagctgctcggagcagctccgaactccaccagtctcccggataaggatcgagccgagatctctctcctccagctactgcctccgcatcgtcacaccgtcgtcgtttagcttcaccttagccgccggagaaaggagcaatgagtcgaccttatttctacactaatagacaagacaacgaaaaggagaaaggggggaagccctctcacaccgccggcagaagccacgggcggcggagaggcggcggcggctcagatctagggttttctctcggggtctctcgcttttctctcttgaaatttcaatttaatttagagagagatgattttaataggtaaccatttatggactgaacaactaaaaaacacacgaaataacaattaaaaaaaaaaaaaaaaaaaaaaaaaaattgggcatcccatacttttccaacatttgttcaacaatagcctccagtctatggtcaatgttaactcgactgcctttgatatgagactagcatactcacctattgctttggttgaaatgataaaaattgaagcgtctgatcagtaaacattcagtatcaaacatttattaacattcaaaccttaacatgtcttcacataatttcttcttagtcctagtttttgctaattcttgcattgaatcaggttggtatggtcttcaattatattcatactagaggtggcagctcgaagagtatgaaaataaccagattcatctagcatagcaaacaaagatctagctccaagggcataggacaacgaattgttaagctcactcttgtaacagaaaaccttttacattcccaatttctggaattcaaataacattcgctattttttggaaaattcatcaacagctatatgatctgttttcattgacaaagatgcttattgtgaatggtgttgagtgtaacaaacaggtaaaacgaatagctaaacacttatgttacattttgaatccttactacttcatcagtgactcaactgctttgtgtaaagcactactacaatttgaacctccgcgacgtctaaacagtgagtgaggtccgttccatacggaattgtggttgttgtcattatggaagagagtttcacagagacttataagctgcgggtttctgacttggaactttacttgcatcttcattctccattctttacgctctaactccagccgtttctgcaataacgaaacaacacaattttctcaatcgtgcttattggcttattcaaacacattattaagctttctgacgatattgctctgatgtatatagcaaaagataagtaaataccttttgctcttgaagtcgtttttccttctcttcttcctcattctgagtcgattttggaccttcaagggaagctaaaacaaccaatttctctgcagcactattcacaggctcatcgccagtctcttccattgatctatcaatcgactgagtcttgtcctctacattagctttggttttattttcactctccacttcgacgttttcctcttcctccacctcttgtttgttttcaatcactctttgtgtttttgacaccggactatctaggtccacgatttctgttttttcttgttcaggtttcttgtcaacatcaatatccatgtcctcacccatgtttactgatgaattatccacagacggacttcccgcaggtgaagactccttcaagaaagagatattacagtgttacttgatacaaagtttacacattgcacataaacacttacacacctagagatatatgggtgcgacattgtaagcaaacacattactaacctcttgagctccagcatctcgttcacgttctcttttacgacgcttcaaaacacatatcgcacacatgcaatcactcttgtggtgccttctgcaaacgaaaatgatgactatcaaataaaactgatcccactccccagttttggagagcagatgcaagatgtatgaactaggctgctgaatatattttggcgaagagaaaactaaataaaggtacaatatatctgcttttttaaccattgactaagctaaagttaaagcagatcttgttacagtagctttgataacctcttggctaatttaaaccaagaaaagtttcagcgacatacccatggcgtttatgactcttctgctctgtggatgcctttccaccatcttctgtattttctgctggtacaaaaagagaccaaataagctaaatcgtacgcacaattacacaggccaaaatgcatagctaacata

SEQ ID NO: 18691 - DNA, 469 bp, Arabidopsis thaliana landsberg
aaccgaaaaaaactttggattatgggttaaccagcaagtctaggtcaggcgcgaaacactggttttaactcatactaataatgtttgagacaagacaatgacattggtttttttgatgtctcacaaattttaagggaaaaatcctaaaaaagactcaaaataaatataatttggacgtttaatacccaatatttttttgttggaaaaaaatatctcatctgataataaaatacttaatatataaattattgatagaatcaaactcacgttaatagtcgctaagggaagtaacgttgccatttaacgtcgttaaatttaaccatttgaatatatattagatgttttacggtttacacaatgatatatatgtggtccagaggctaactatattcacttctacacatgacaccagggttcgacaacctgacaagtttttctttaaatgctttttttttttggcctttgtccc

SEQ ID NO: 18692 - DNA, 948 bp, Arabidopsis thaliana landsberg
gcttccattcatttttggttatggaaggtttgattttattattatatatctgtggtctcttaatcccttatatacagcttaaagctggcaaagaacaagacatctatcctattaatgggagttggaacttcaagaacaaggtccttaactatcctctgtcttctcaaacaagttttgttttgaaaacttgtgacactgatcatcaaactttcatctacagacattttttaagccagccacagttactagatgggctgttgtgaacttctctgctcgctgtgacccgcaaaagattattgatgatttgaccagatgtggaaagatgaaaggaattgtaagcttacttttcgtcatcaggaccattggttactacaataaagaacactaataacaaaaccctctcttggtttttttgttttgttttcattaccagaacgtagattctccataccatgtcgtctttgaagaaaatcctcagtttaaggatgccactggttctgtaagagttgataagatgtttcaacatttacaatcaacactcggcgaagttcctccaaaattccttctatgcatactcgaaaagaaaaactctgatgtttatggtaacactaagcacttaacctttcctgaatcatatagtatacacctttttttttttttctcatatggaaaattttatcacttaggtccttggaaaaagaaaaatcttgttcaatgtggaattgtgaatcagtgtattgttcctcctcaaaacttaaatgatcagtatctcacaaatcttctactaaagataaatgccaaggtgatgatctcttcttgaatcaatctttgtagtttctgatataataatcttatagttaatctctgccatttctgtatagcttggtggattgaattcagttttggatatggagctgtcaggaacaatgcctctggtaatgagagttc

SEQ ID NO: 18693 - DNA, 1792 bp, Arabidopsis thaliana landsberg
gaagaaaaggcggcctaaccaggagaagtgataaatctcaataccttgtatgttttccttgtgcagcagctctgtctggggtccaagcaaaacctccggaatcacagtaataccatttatcagatactatagaaacaaaagaattcactagtggaaactatagaaagaaaaacaaatgtaaaagaattactataaggatgactaactatttcaggcaaaactcaatcaatcacaaaagaaactatatatgccctaacgcagataagaaccacggacaaactctaaaacatactaaagtagacaaattcatccaattttaaacaatagacaaataaagatgcaaaaggttcacagaaattatcgttttgctttcacataactcccaataaacaaccattgtaccttctcctgtgtgccattaaagcattgaaagatgttaaggagtgtctttaagcattggtcgatgtcctggagaaaaacaacatcaggcccttgagagaccagaagagataataaagcatctcactatccacaaatgatattcagagagcttccatacgattaaagaaaaattattcagaatgaccctctgcttattaagatgaaaagtttaaaaacatagacttctacaatgagtaaagtcgcaaatgattacacagcagtataaagaaagaaagcgccattgtcttacaatagagaaccagtaaagtcccctgagaatcgtcggtaatgagaactccacccatgtcgacattgtaaccaaagctctctcaggcagcagagggaaggtagagaaaattcaaagattagatccttcaatggtaattaagatatttaatgtacagatatctaggacaacagcatttcctgatataacagagagggaaaatggcaatgtggtttcacttgccagtgatgaatgggtgagctaatgcctgtgacacaatcagtctcctttcgggatcaaggatgaacattttgtacaagagatccctgaaatgagctaagatcttgggatcctcaccagggtaacctttaatgatggaaccaaaatctttcggcttcacgttgacgatcattctttttatcagctgaaaaggaaaagtaactaatttactcaccatcaattggttttcaaactacgaagtgcctgagaaatagacggactagtttttttacctttccactaacggtgtcttcctctgtagcataaaagttcaagtcatgatcaaagtgctgatcaataaatgctccctgttaaaccaaataacagaaacattagaacatgcattaaaaactgcttctcttaaacatacaactatatctccaccatacatatggatttgcctaaggaaagttatcatttggaagacattttgatcagtgatcaggtgacattcacaacacccaatctagtttaatgctaaccttgcgaagcatctttttagggaagggacctttcagttccatatgaaggcgtaacatatcattgtttgtggcgccagggaaaagaacttttccactataaagctcatacagacagcagccaacagaccatatatccaacggatggtcataggtgagccccagaactgcaatggaaagaatagaagcttcagtcacatattcttcaccaatgaaaagtcctctttacaacccaaaatatgatacttactaatttcaggggatctgtaaaagcgactaacaagatacggtgtaacttcgtttttgcctgcaaacattgcattaccaaaatcacaaagctttaagacatttttcccctcattgacct

SEQ ID NO: 18694 - DNA, 1407 bp, Arabidopsis thaliana landsberg
ttattttgggacaggatattttacgacccttttttagcgatcgttttatatcgcgtaataagagttataaccttgtttgcgattattttgggactaatatgagggttgcaaagggcaggttgtcttatatatgaatcaataatgaaaatacataattgagcttaatagagtttttttttgcacaataactatcaaatgccaaaacactatttaagtattttgagttgattaatgacgtttcactttttaatcatatatttaagtaggtctgttaacgacgggaagttaggacataaatcttatttcccaaatttgttttcatgaatctaacctcaccacaatgtatttgggacgaattctaatgtgattcataacactgcaatcgaagcgaatctctaaactttatctttacgatatatcaacgccattcctgcaggtccggtcatatgattccattgattctatccactttaccgcatgtaatttggatcatttatggaagtaatatacagtttttcttgtatgagtcaataacgaatagttttatttatactaacaggattgacgatacatacatgcagtaccacatttacaattaaaaaaaaaatctttatcatttacgcatatatatgtataaccacggcgaacaacattaaaaatctgtaaatttagttttaagggaaaataatttttttaaaaatacttattatttttatcacccacacgaagccaatgaagttttgatttctgttttaggaaaccttcttccaactctacaacatgatcccaatccctgtaagccttagcttcctcctccatcagagctgaagaaggattaacaagggtggccaactgcttatcacaaagaattttatgagcctcctctaccctgtgtgagtttagctaggaaatgctattcatgagatacgttgtccgaatggttccatagctacatcgcaagaagacattaagtccgaagctgtaaggttttttgaggatttcatgactcgtaaacaggtggactttgaggatattcccaaggatcaaattggagacttgttggagtttcggtgctctgtttcagaacatgatgatttggtgaatcagttttcagaggaggagatccaagcggtcctattaagatggcgggtaataaatcacctggcccggatgggcttacagctgagttcttaaaccaaacttggttcattgtaggaatttcatcacagcgatccaatccttctttcttttgagcttcttacccaaaagggttaatactactattctagcccttattccgaagaagaatggtgcttctaagatgaaagactatcgccccatctcctgttgcaatgttctttataaggatatatctgtcggattaagcttgaaggagaagcacacttg

SEQ ID NO: 18695 - DNA, 550 bp, Arabidopsis thaliana landsberg
gggtgcgatagtaactaaataaaactaaaccaaaataaatataatatattaacattaaaagaaagaaaaatacaatatattaatcaaaaaactcaaaataattcaaaaaacaaaaaaaatgatgccataaaatactcaaagaattacattagctaatgaatggataaaaggatagatcatacttacgtttgattcttgattttgattttaatcagtttgggtggatgccagaattgagagaatagagatacaatatattgattagggttttctaataagatatataaaggtttagattatagtgattagggtttgagtgaaatttagaattattttaattaatttaatttttttttaacctaatcggtaccgcccgcaaccgcaaacgcttgtgggaaagagcttttgaaatctggcgatttcgagcggtccaaggcggtatttagcggtttctatgattggttgcaatcgctaacaaccggctacacccgcaaacacagcgtttgcgggtggtagagggagaaccaatcaaccattagtggatagagga

SEQ ID NO: 18696 - DNA, 1457 bp, Arabidopsis thaliana landsberg
aggctgctggtcaagccatggccagaacccagactggtcatcaattccacagaacatgttactgatactgttctcttctttcaccattctctgttctgacgatgaattctgaaaaaactgcatcgttgtagttgtcggtggatggcctagggcgaattggctatcgatctccggtggcctgatgtcaccagaaatgttctcacttctgtcactacatgatccttctgtttctttgttcagattgattgattctattggttctctgcttttcaatgccattacctgcataatttacacaaactatttaagaaagaacgtaaaattgcaaaatgattccaaattatgttttgacctaaaacaaatatattccaaattatgaattcgaaactaaaagaataacatcaataaaaaacaaaaaagagcattgtttttataaaattcaactaaaaaagattcatattttatgaaatatatgatttaaaaaacagagtatttaagattaaaaaagaaacagagtacttttgtgttatgaagtttctgcttttacctgagcttgaagcttttgattttgagtttgaagaacttcgttctcatctctgagactttcgaattgacgcttaagcatgtcatagtctttctcaagctgcttggttttggatcgagctcttctgttttggaaccatatagcaatttgtctaggttgcaatcccaaggcacgagctagctctaattttcgatctgattcaagtttattaccaagctcaaagtccttctctagtgccttcaattgttccatgttcaatctcctcttcttctctcccatcttagatccatcgtctgaatattcttcatctccgttcatatctagattacaaaacccttgcacgttgttcattggagatcttttacctagaaaccctaaaaacagagaagatcttgagaagtagaaaaaaaaaggattagaaattttgaacaaaggtgttaattgagatgatgtaccatggaagtcttgaagaagttgagggtgatcttcttcttcttggtgatggttttggagactgaaattttcagggaagaaagctaagccattattattacaagacatgtctcttgttggttgttttcttcttctcctctccaccaccttgtcttggttcaaagtacagaaagaaaactaaataaagaagaagaaggatggtggtgaaatgaattagaagactgagtatacaccacttataggctaaatactagctagattagaaaatttggttttattttgtttattatatgagtatataaaataggagacaagactcaaagccgatgagacagagaggtagacatgggatgattatagtctttggaggggtggaatatgggcttttgtatgttttggaaaatccctaattttactacgttgtatccgttttggtagattacggatatgtgctatgtag

SEQ ID NO: 18697 - DNA, 757 bp, Arabidopsis thaliana landsberg
aatatttttagtatgatttgtctacaaaaataaaaaaggaaataacattaaatattaaatgataactgaatatttttcatcaatatatttattttgaatataaatcgaaatattttgtattattcaatttgttagagattaaataaaaacaaattaacataaatcaaataccattaattgaaaaatacaaaatattttaacaataaaatttaagtaataatatttatgttataaatatattccgatattttcccatttaccaactatatcaaattaagtacataaccaaaacattatgcgacataccttctatccaatattttgtttttgatcaaatcgtaatatgttttgagatacacgatcttatttgtttttcctttaatatattatatatacgttaaattattagaaaaaacgcaaatgcaaaattatagttaaaggaaaaaatataaatttattccaataatagaataccaaatgttgtgattccgataaacaagcggatcttggattaaaaaaacacaaatccaatcaataaatgaataactacccaatattttttgtaaatcgtttaataaagtttcaataacaaatcaaactacttaattcaaaatcctatataatctaaactaccatcatttaaatttaaaatatagcatattcagcaaatacttttttggattttagatttgtaaatatttagaaaattattctagcattaatttacatattttctattttaattaaaaatttaaaa

SEQ ID NO: 18698 - DNA, 646 bp, Arabidopsis thaliana landsberg
tgtagcactttgtacattgtactgcatgtatcgattaacctcagttgatacctcgtattggttggagtgaaggggtgtccatatcctttgggttcggttcattaaacagactgatacttgacaaattataactacaagtctataatggtaaacacttggacttgatattcaatataaaatcaaactgaaaatcaaaaacttatgaggtttatactgatacaacatcgaaaatcacttcatgaaaaacattgaaaccaaaaatttccgaattctttggacaatctctggcacataactcaggttaaaccacatctaagtagaaaagactttggtttaggtggtaagctccatgatggcagagacaatatctccatctgcagccttgagagccttcacagcatttggcctagacactcctgcttgagtcatcaccaactcaatgtcctttggctcaacaccttcctcgtcaacctcctcatcatcctgaaccactgcagcgctcgatgactcaccctttgagatcacattgctgagatctggtgccttgaattgctctgctgcttgcgactggatctgagagctcaaatcctcgatcttcgcctctccaaagatcacatatgtgtctgatgctggactcttgaacaca

SEQ ID NO: 18699 - DNA, 1507 bp, Arabidopsis thaliana landsberg
taataccatttccattggagttttttataagagtttctcgcaataaaaaaaaataaaagtaatgaaaatgacggagatagagtgtagaagttaattctgagatattctttacaatccataatgacatttcttttttcactattggttcaaatttttaacaatttattttttaaaatcaaataatcaaattataatataatattaattttttttgtttaagaaattttgtgggtttctcatagatggagatgccctaaaacatacgagaaaacaaaagataacctctcgcaaaaaaaaaatttgaaaacaaaagataatattatcatgatgcattattatattggacctaaaacgagattatcaaacaaaatagattggtggataaagcttgtgcatgttaataggctataatcttaaattcttataaggaatataactttttgaaatacattttttggtaaaaactttaattttaaatttttctttggaatataacattgggctattaaatttaatagtggtgaaagattcaaggcaagaatggcaccggatatgaggagattttcatatttacgtgcctaattaataatgtgaaactgattagccaattaagaaataatctgtattggggatttctttttttttgtttaagtaattaagaataaacaaaaagagagaaagcaaagagacacacatgcaagcacgtgatgagtgcatgtctcgcagagtctcacgccatgcacatttcatcatatcaacttcgttgactccttctcagtatctctttacctttttcctcttatcaattcaaattattcaatacatgttttaatttaaatgggctataatgaagtttatcagcccaataaggcccaattatagattggtttatttctcaaaatttacaagttgctgttatattggcccgtttttaagcccattaagaatcacatcatcaagaaatccaaaatctgaaaagtatgtggctatgtggaagcagaggctggcgcgtgccttatctgcttctctctctccagtggtctcaaatctctctgtgtgatcccacttgtcatcctcctccacaacatatagcttgaaaccaaaaccctctagcgttttcggctaaagctttcgctgactactacaacaatggcgtcctcatccctttcccctgctactcaggtttcactcttgatcattcgaactgaaacaattgggtctctttgtcacaggaatttgggtttttgaaagtttggttttttatttggtggcagcttggttctagcagaagtgctttgatggccatgtcaagtgggttgtttgtgaagccaccgaagatgaatcatcaaatggttagaaaagagaagatcggagtcccaattgcttgtctagcgtggagtattccagccgacagagttccagatatggaaaagaggaagaccttgaatcttcttcctcttggggctcttttctacctactggctacatgcttgccccttacgctacc

SEQ ID NO: 18700 - DNA, 1031 bp, Arabidopsis thaliana landsberg
catagttatttttgagtgaataattaatctgatgtgcatagaaaccattatagaaaatcggaattaatctcataagatgaagtgtttttggcttttgtgctaatcaaaagtttcatatattttctctaatgatttatagactcaaaaacattgttcctgtggcggtgaagatagtgcagccgggtaaaacatctgctgtaagcattcaggacaaacaacagtttcaaaaggaggttctggtactatcctcgatgaaacatgaaaacattgtcagggtaaaaatgaaaataataaatcatttgatgtttcaaacaaaaataaataatttggtgttttataatattaatgttacgataatgagtaataaatattttggtgttttcaacattaattgtacagtttgttggagcttgcatagagccacaattgatgatagttaccgaactcgtaagaggtggtactcttcagaggttcatgttgaactctcgtccgagtcctcttgatctcaaggtgtcactaagctttgctttggacatttctcgagccatggagtatttgcactcaaaaggcatcattcaccgtgacctaaatccaagtaaatatactccattttacacatcatcatgtcttgtagcatcatgtcttgtagatagtgaaacaaattaattgtttgttatccgtgtttgagtagggaatgttttggtaactggtgatatgaaacatgtgaagttggctgattttggacttgcaagagaaaagactcttggtggcatgacttgtgaggcgggcacgtaccgttggatggctccagaggtaatgattctttctagactaaatatttgactagaacatatcatgattaatgattgtatgttttgtattcacaggtatgcagccgtgagccactccgaattggggagaaaaaacactacgaccagaaaatcgatgtgtatagcttcgcattgattttctggtcctgctcacaaacaaaacaccttttagtgagatacccagcatttctattccctatt

SEQ ID NO: 18701 - DNA, 283 bp, Arabidopsis thaliana landsberg
actctgtgatttatccgttaataagtacgattaagagtaaaacgacgtcgtttgcaattgaaacaaatttccccaattcagaaataagaaaccctagatcctcaaatctcttcttcttttcttcttcgaattcactcctgtattttgaaatcaaagtgaattacaaggcacaaagttcatgctttaaagcactgcaaatggcgaagtcatgatttatatggcatttttcctgtttttgtttcaattgcaaacgacgtcgttttgctcttaaacggtcttatta

SEQ ID NO: 18702 - DNA, 723 bp, Arabidopsis thaliana landsberg
aattagtgaacaccaacgtcaaaaaagactaatgttaatggtgtttttgatttatggtttatgtgcgagtgaaactaggtgattcggtccttatgatcatcttctgtcagtgctctagctgattcattacttattttcttgattttgataggtgagtgaactggagtcgcagattgatagctttgaagctgagttggaaggactgtctgtcaaaaaaggaaagacaagaccgcccagattggtaaaatctgataaaatatgcattggtatgcaaaatgctgtaatttcttctctcgtggtgagtcatgtcatttggcttgttgaccccctttcagactcatcttgagacatctattacaagacacaaggatcacataataaagttggaactgatcttgaggcttctggacaatgatgaattaagtccagaacaagtaaatgacgtcaaagattttctggatgattatgttgaacgaaatcaggtctgctatatctgaatcctggaatattttgcttatgtgttataccctgggtttcgaacattaaaatacacttatattatcttgtactgtgtttaactttcttctatgtaggatgattttgatgaattcagtgatgtcgatgagctctatagcacgttgccactagatgaagtggagggtcttgaagatctagttaccgctggcccacttgtcaaggtgactttttgttacaatatctcta

SEQ ID NO: 18703 - DNA, 766 bp, Arabidopsis thaliana landsberg
  unsure (1)..(766): unsure at all n locations
agcacccaggagatctgtacattcagggtaagtttagatcaatataaggcatatatcgtaactaccctcaaatatgttgtctctaagaattaattgataaggtaaatgaacatagacctaccgactaacaggtcaatatcgaaagtcccctcccatatgttgtcgaaggaagtgaaattgttgaactgnnnnnnnnnnnnnnnnnnnnnnnnnnnnnnnnnnnnnnnnnnnnnnngtaaatcccatatttagccgtcgtagtcttgactggatcagaattaggtataaccttgaagttagttaacccgatccacttattttcaacttgtcgaagtagaaggaagaaaagcttcggtggattgtaacgtccatcctcatcctctattcagaaactcaaaaattgttagtatcaggaacatgcaaaaaaaaaaaaaaaaattttttatcaccgtttcatcatctatgataactcttaattcgaatgaatcgcccctttggaaaattttgtactttttcaagacaatgactcgtacagtccaaccggtgatgagaggggagagctcgttgagaagatggtagttgaacatttcttttttttgtttcagtgattttatggtcaattaatgggttaagcaactttcttaaatatcatctcacataaccaataaatcaatcgtttagaataacaaccggctagtaataactacacgaattaaccggatatccgttaagtatcacgacataatggatcaaaaattatttttaa

SEQ ID NO: 18704 - DNA, 591 bp, Arabidopsis thaliana landsberg
  unsure (1)..(591): unsure at all n locations
tgattcttcctcaccttccacatctggcgttgagtccacatctttgaagcgccaagagcgtaagaagtatagtaagatgcctcttcgctatcctcgcatttctaaacgcactcctctactttctgtacccctaggcaaaccaccatattttgatggtgaacattattgtatgtggagtgataaaacgaggcaccatctaacctcactccacgaaagtatatgggatattgttgagtttggagcgcaagaccgacaggtgggcgacgaggactacgactccgatgaggccacccaaataagacatttcaactcccaagccacctctatacgtctcgcctccttgtgtcgagaggagtacaacaaggtgcaagggttgaaaagtgccaaagaaatttgggacgtcctcaaaacgacgcatgaaggggacgaggtgacaaaattacnnnnnnnnnnnnnnnnnnnnnnnnnnnnngtcgattcgtcctcaacataggagaggagcacaagcaatgtacaccagcttaagactgttcacgaagtcgcaactcaggacgacaagtggatgacatgaatggtcaaggtatctagatc

SEQ ID NO: 18705 - DNA, 401 bp, Arabidopsis thaliana landsberg
  unsure (1)..(401): unsure at all n locations
ggcgatacgaagatgttatgaatgtttgtatgaaggataattattattgaatacagagtttgaaatatatacacatacaactattgctaggctatcctaagaagattaattacatgatctaatttacataaatagaagatatgattgatcaaatcattcgatatgattgatccttaatatgccccctcaagatggaggggcttggcgtaannnnnnnnnnnnnnnnnnnnnnnnnnnnnnnnnnnnnnnnnnnnggatcggttagcgcatgaggcaactgatcttttgcagaaacatgaaccacccatagcgctcccatttgaactcgatttctaagaaagtgattgtccatagcagtgtggtacattcttgactgaaaaactgagattgcacacaaatat

SEQ ID NO: 18706 - DNA, 291 bp, Arabidopsis thaliana landsberg
aaatcaagttcaggattatttcgattgcaggtatttttcattattttatttcagtttattggagacatacatagtagactatttttaagaagagtcttaacgaaaaataactcaaatatcgttttagcagatacgtatttgcatgtgaagcgatgtggaggattaaaggctatcctattcattatcgacaaacatcagttactaaacttacgttccatgagaaaggcaagcaacctgtatatgtcaaggaaggtgagactgctgaatctgttttgaatagcgagaataatg

SEQ ID NO: 18707 - DNA, 1922 bp, Arabidopsis thaliana landsberg
  unsure (1)..(1922): unsure at all n locations
aattgaatgggttcnatattgtaagngccgtaaatttgaaagaaaacattaaaatggggtgtcacaaacgaaaattgagtgggttcaatattattcacgttgtaaacttttaagaaaaaatcgaaattatatggggggtcaattgaaccccctttcttctacataggtacgccactgaatttaggaatgctgttttaacatccatttgatgaatttctagatcatatatctaatcgaagtgattctagtcacaggagaatgcatatcaaagaaatcaagcccttcttttttacgaaaccctttcgccactagtctcactttatatttttcaatcgtaccatccggtctcaacttctttgtgaagatccatttctgtccaattagtttattaccaggtggtaaatcaaccaattcccatgtatgatttctcaaaatgtattcaactttactctgaatcgcctctttccaataaggtgcatccgatgattcaattgcagccttatatgtttgaggtttgtattcactcaagtacgtcctaaagtctttgcaaaaatctgttacaactcttgctcttttacttcttcttggttcattttcttcttcttgaacctttgaggcacattcattgtcctcatgtacccgtttagtacttgattccctagactctttgtatggaaacacactttcaaagaactcaacctcattatattcaatgatcgtatttacctttacctcagcattattagattattggtataacccgcttttcaccgattttatctatgttttaggtattggattttgagtctttatgttatttctcgagtctttttagtgtcttttcaggtattctatgcaatgagacaacaatggagataaagagacattttggagcaaaagctaaggaaaaggaagctaaggacaattttggttcaggaatcagcgaggagtgtcgatcgacaccagttttggtgtcgatcgacaccagtttcggcccaacaaaaaccatagacgctttcaagtttacagaagctcaagtttgccccaaaagacttccctatttgcattattagtccctggacgtttgtagggtctatatatattgtttttagacctaagtttcttttatcaagtcttttagcaagttctttgcaaaccctattgtaagagacataaagctattcatccattgttattcagagtttcattcagatctatatacagtgaagagatcccttctttccgcttctctatttactgtgtttatgctttttatctcaaatatgttgtttgcttcatccaatatgtctgagtaatctgcttgttaggaataggatttctcattaggtattcatatggtttagtagattgaccccttgctaggttatctgtagaattcttcatctttaattgtgcttaatgctagatctagagtaattaactagatcatgaatccaaacaatagatatgcccgccataggtatttgtagttggatctattatttgatgagtctggtttatatgtgtgtaataagaatcggcctagctactaagattaacaattgaactcgttaagaatgcatatttaggttgatagtctctcggcttctccggtcactattgtggatgtcggattcgcacactcaagtatttatttgttttgtgggagagattattcttgaggacaaatatacttgaaaatagatagatgattatagagaaaactatgagtattgtcaaagaaggtgtatagctcgtttgcaccaagaaatgtgtgtgtctttacatggtctttgacccacaatttatacccaaagaatacatttaatacctatttactcataatcattctactttaaatgtatctgtttttagtctttgaatttacttatttgaacgttaaaaccgagtccactccgggc

SEQ ID NO: 18708 - DNA, 1196 bp, Arabidopsis thaliana landsberg
agattgtcgccggcgaaggaggtagagagattaaacgatgaacaaaatttgaaattaaaattattttcatttggtaggctttctatatgaagcccaatggcccttgaaaaatgatatcaacataaaatatggagatgcggggtatcgatccccgtgcctctcgcatgctaagcgagcgctctaccatctgagctacatccccattgtgatgcatactgattcgttttactacaaagcgtgtctttgccaaatttgtcggaacatcatcgaaggtggttaattaactgctgtctgaagatctatgaatcctcgtactgtgccgtacgtgtcttttgccgctgaaactcgggacttcccctcttatggttaaaactttaaaaaaaacaggtacagtttttctcattactacataactcgtttcaataagcgtgcaatttatagcaactgaatttgaggttttaagaaaaatagacaagcacacaaactgttcgatgaaatgtgtcttagaaagtttctcctctttcacccttgtgtctcgtctctcttcctagttgtttcgtttccgtgtgattacatcttgttttattgaacacagaaaccttgaatttgtagcaaacgaagagttgatagctttgaggatgtcgttttgctatccatcttcacaaagaaaactggcaatgacggtggcattttttgcctcaggggctgctcttttcgccattggaatccatttttcgtatctcaacgttgctcctcagcaagctcgtactaaagcccgtaatgattttgtcaaagaacgcctcaggcagaaacaaggcaagtgatttcagatttacattgagattccttaaagaaacaatgtcataagaaattactgtaactggtttcagatacaaagttttggtcctaatatcattggagaattgtgatcattgtcttaccttttcggagcgaaattaagaacgtgatatacaaatgtaattgatttgaagtagtaaagtctaaagtaaagatcgtattcaataaagcaaaaagtacacaactctttttctcttcaaattggctcttgcaaaaagcctttcataaaacatgtctcacaaagtacaacaaaagcgggaaaattttacatctccatagagagagcctaagacacaagaaaggaaaaataataagacgagattagaacttccttggtt

SEQ ID NO: 18709 - DNA, 1416 bp, Arabidopsis thaliana landsberg
gtacaggcaagagataaacgtgcaagatttattacgattttagaggaacttatattctgggaaatgaaccataatataccattaaattttaaaggccatttcacgaaatatctcaaaaatcatatagagaatcaagactcatgactcaggagtgttacttagtaatgtaagttcacaacgtaagcgagagatcatcgtaggatttatatggttctacaatataatgaatagtataacccatctaattttctttttagtttgcttatgtgtatacataacaacttcacataaagaaagcttataagcattcaaacattcgaacattataaatggtattatatttattcaatcattctcatggttacatttatttgataaattatagtgataacaaaaactttttttcttcttcttaaggactatcttcccatttaaaacagtaaggcaaatgtctcccatcacgaacaatacgacaaatatggccgttgtcaccatattttcctacttcccatatacattctttacaaactggaaaacgtccatctggattatcatctctgtatactttaaaaatattaaagtaatgagatccgccattatgccaagtaaagtgacaacgaaattttgtatttttccaaaagttgacatgaaagctgaaatcccatgtatcattccaaggaatatggaccatcccaaaatcatcttcactggatctacaatgtacattcaaaatttctctgttttttaccttgatgcggattacaacatgttttttggctagaggtaagtagccgtcaggtccgaacttggtgcttctacgggagcattaggaaaattcaatgcagacacaaaaagaataaaaatagaaaagatcataaataacattggaaaatgagatttattattaaaagtcatgactaggtaaattatgtaggtgtggttagatagaacttagagacaccctatttatagagataagaacatgtcaatatatttgagagtgaagttgactaacattcatgtaacgttaaatacatgtacttactctatgttagtattcaactcaacgacataattttttagtgttttccttttgagttatagatttattagttttaataagaaataaatatgtgtttggtaaaaaatatttttagttatgtcttatatattataatttacaatatttggaaaaatagttaatctttttgactgtcgcaaaaaaaaaaaaaaatctttttgatgctttcactttgtaaaactattaaagatcgcaaagtcttatttttattaaatttacataagacccatgaaattgtttagtttacacaaaacacaaattactgatttgggtgaaaagatgacaaatatattcaacggactttgatctatatgttttgcagttgggctttacac

SEQ ID NO: 18710 - DNA, 2243 bp, Arabidopsis thaliana landsberg
acacaaactccacatggaatcagaatctgcagctccacctggaatatttgtctcctcaccgtatttccaggcgcctacagggaacgtcattaacccttatgaagtcttcctatcgacataacaatttttcccaaagttgacttgtttctctgctgttcttccttccagcgtacaatatcgatagtggagttacctggagctgtgtcgtcctccttacgatgttgaggagatcgtagcaagcatgaaagtcctctccatctattgcttgagtcataacatctgttggttcaattgtttttagtatcttgtttaggacaacatctcctttggataccaaatctgtgatgatctgaaatcttgtgtccataagttcggttcccgattccttcccttctgtagttaagctcattaatctgaaatgagatgtagttggtaccaactactgtagcttcattcattttgaaagttttagcttccttttcctgactttcttgtaacagagctagaactcccttagctttatctctgttaaccctcattccctgaatccttgaagctttttccaactctttcatttcaactttaacgagtcccctttcttaatgatactttctggcatcgtaatcctttcatccttaattttactatcacacaacatccactccttgttgtgatctctcaacagtggctggttatgagaaggtccttcacttttctcagatttaacctcctctaaacaatctgattcttctgttgaggattcatctcctccttgaactgattattcctttgttccaaagccatatggagtaggtccttaaattaaattcacgctgaaagtcaccttccttgacttcttcttcctcactccaactacagccttgacaacactttttccaccattttcagcatgtggtacactcttttcagccttaacaaccgtgccttcaagatagtaaagcccttcgtgatatttcccagatatcactttcttaccatctttgtagaaaatcatggaaaaaattatagaagaataatatcttttattttatacgttatacatgtgaagcatggaacaacattattacaatccactttcatatggaattcgactttctttcagccaagtttctccatctaagagcttggctacagtgaattctgtagcctctttaggatctttcataactttaaatcctgaccacttcacccttctgctagtcacagctcctggacccctgttttgatattcgcggtagtggagagttgatagaccagtttctccttcccaaggagtccagccagcgggatcaactaaatcaccgatgaaagattgcagaactgcgactgttgaaaatatcctccaaggtcttccaagatacgttttaacggttgtcgtgtctagatccgagcttgcagtaatgttgcatttttgaatcgtgaagcccgagtaaatgtccttaaatgcgcgtgactgagcggttatgacattgctctaccccatcttaggttgtcttgctacaatctggcagaattgaaagaccgccaccgcgttcccacaaatgaaatctacagtgccggtaataaagcactctctataaaactggcggtcactgtgaggatacaaggcatcctgatatccctcgacacgacatctataaatgacggacatatcaccactcacacggagggcaacagctggtccttttgccggcccggccgtgtttcgaaagcacatgtctactccgatgaatccattaccattagaagcttcaaatatatttttagaataattagtaatgtctttaagaatgttatagtttggtataaagaagagaaaactataaattattcaagaagagaatacaaattcttaccaacagttgcggtgttgaacgttcttctaacattgctagcacttaaattgcccgtgatgatggttaaatcttgaccatcacctataagagttaaattgggtttcgtattctcaatgacgacgatttcatcataaatgcctgtctttatatagatgacgaatttcttttggctgtgttgaggtgcgctgcaatggccgcattcactgtgctgtactttccggtcccatccttcgcgaccacaacatcagcaatcttctttagagcctgctttataagaaacggaaaaaattctataagcagtagaaagaaagaaaaaaaaggataaaaggtttgtcaagagttgcaaacatatcgatcgaattgtgt

SEQ ID NO: 18711 - DNA, 815 bp, Arabidopsis thaliana landsberg
ataactcacgtgtggcaactgtgagcatgtgagaagtctggtcaacatcattgcttttggcagcaagtgagtaactattaagaggaaattatttgtatgagataaagatactgaataaagaaaatgaatttcctgggtatttttgttaagcacagagaaggataagagataaactgacttggataatgcagatttcaactctgggacagattttaagcactgcaccgtggagttcatgtaacacgtgttgccaagattgacaaggccagcactgtaaccctgaaatcaattgtaatgtttgttagttgggaaggatacataaattttctgaatatacagtacaaacaaaaccagttttcacaatgcctaacaaaaatttgggtctatcttctgttaccggaactctatgaaacgtgcattttctctagggtccaaacattgtaaaagttaacaacaacgattacacacgtgcacactcataatcagcagtcaaaagtaaataccagattagtggctagcgcttcttcaggtagatcctctgcaaaaacaatggccttctcaggagctttcactatctcatcagcagttcccatcatcatcaatttttgaccctagaatgaacaaaaaatcaacaaccatcatttcaacaaagcagttcatgtaaaagaaagtgctaatgaatgcaaaaaaagagagagagagagagagctttacatctctcacaccaatagcagcccaatctccatcatcctgcatcaattgaaacagataagactttatcatcaacatcaataaacaatgtaggacacacagat

SEQ ID NO: 18712 - DNA, 636 bp, Arabidopsis thaliana landsberg
aaaaataactgggcgttaatcggacgttgtgtatggatctaacgattaatcggaaaattaaattaaaattgggaattagttggaattagttttaaggttattttaatgtttttaaaacatattaatttaatattattttcaaaaattatagtaaatacataaactgtatttaaaaacaaaatatatgatttttattaaaattttgaacttaaattattgtaaaagatcacaaactctaaaaataaatgactaaataacaaaaaaaattgtttcatacttacaataaaaaaatacttaggaatatgtaagattagacaaggattaaaaggaaagaaatcaaattaaatggaaaacaataaaataactgatttttaagcgattagtcattaatcaaagcgaataagatggatctaacgattaagcgaggattagtcgggttaggtggagattcttagaacggagcttttttactatataaattttaatattatatatatatatatatatttattctttttgtgataaaacagttttatggcaaaaacaaaccacacttaggttaagaattttacttccttaaattttcaaatatagatatttaactcaatctaataaaacataataattttcatgatt

SEQ ID NO: 18713 - DNA, 1833 bp, Arabidopsis thaliana landsberg
  unsure (1)..(1833): unsure at all n locations
aatttttccaagtgaaatcatcctattaaataaaatataatttttaaaatcagtaactcataacattgtaccatatataaagtttatcgaccatatattaaaatgtgtcaaaaaaaaaaactttttctaaaaaaaaaaaaaccctcatttcttgatcatttattatctcatctccttccacatatctcaaatctcaaatattatattgcttagttttaagttttgggaaattggagtagataaccataaaaaaacaacaaattaaataaataaccataacaaaaaaagactacgatattctgtatataatatgtaatatatacacttatacccccaattatttactgtctttttcctccatcttctcaaagccaccgtcactgttccgacgaccaaatctcacagctgaccaatctctcctccgtccaacaatattgctgttagatttctgaaaattgaaacttgagataatttcatttcgtttaatgatttttgtttggttccatgtatagtatcttagagtttagtttttttagatcaataggtgtttgtaattatctttttgccaccggcaccaccattattgtcgtcaccatcgtcactggtaccgccattgttgtcgtcaccatcaccatcgctaccgccactgtnnnnnnnnnnnnnnnnnnnnccacagttgtttcactatcaccaccggcaccaccactgttatcatcaccatcaacatcggcaccggcactgttgtcgtcaccatcaccatcacttatgcgactatgcgtttcagaattatggcaaattggaaagtaaggaaataatgcagggatacacttgtaattatttagggattttgtttacttgctcaattatctaaattatatggctatattctttatttttgttccaaatatggttatacagctaattcacccttaagtttttctgttgttgttgtagtatgagtttaaaataaatctgcactgtctattttttattagcatcttataaatagtaactctctcaccatcttccactatatttttatatttatatatatatcttacgttgttatatgggttgaaaatcaaagaaatcatcattacaagaatttgattctaaatttattttagaaagtatgacatatatttaacattgtttttaatttttgatttacttttaacaccatacaagattatacttattatttttaatttatatatttttaattttaatttacatatgtaaaacaattaaatttcttattttatttgctaatcgtcttatacttttaattaaagatatttaaaaaaaaaaatctatataaccacgattatatgaccaattatatacaaatttatttttagtactatatttttaagttatgaaatatgcttagttttgcaaaagatctttttttaattaataaaagtttttttttttaaaggactgtaatcttaaaatggtagcagcaaatataatagcaaaacataaaagaaaaaagaaggggggagagaggatgcggcgaccacagaatcgaaacgagtggagacaggcagtaataaacactttggtctttttttatccacttattaaagaaatgggtaatggtagtcgtgtatagaatcgagagagaggtgtgtatagaaacgagaggcgaagattgcatcgaacggcgaaattgggcctacagtaatcccaaattctaatccttatcctcttctctctcttttttattctccttcttcttcaatctcttagtcttctcgactcctcccagcgcttcaatatctcccaagacccaaccatcggagggagggggcgagatgatgggattga

SEQ ID NO: 18714 - DNA, 1940 bp, Arabidopsis thaliana landsberg
atgagttgtgtgtgtggattctagcggatgttgagaaacaggaatggtcgaaacatgcctacacttggaccgatgaaaagttcttccgtcgtttggtatccatcgctggagtgactgcttcgggtgaaatagtgttttcgatgcgcaagtgtaatcctaaacaaccgttttatgtgttttacttcaatcccgaaaggaacagtctccaacgtgttgaaattcaaggttttggtgaagccgttacgaaatcttgtgacgtttgcacctttgtaaaccacgtagaggatctcaatgtttacgatttaaaacaactcaagtcagtccatcctccattggtcgagccagaatattatgattcagattaagagtcagactgagaagggacaaggagaagaagactgacaagtgcaaggataaggagatagagacgagccaggtgaaagcaatgggcatgccattttatgctcttacttatgcgttttttttttaaatcaacataatctatgtttactgtttttttttttctcttttgaacgagctttatatgtatccttcattttgtttggtctcaagaacaaggtgttgcagtttctcttagttctctgtcttaatctgagtatctattctttgaatttcagcatggtttcttctggatgagatctgtcctctgttctgtttcaatatcttgttgtgtttgtcggttgtgtgtgatgggactaattttcatgatgacactttggactaaatacttaaatgggatttgtacaaaatcgttcactcacttgaagaaaacattccttgaattctaccattcctggtttctattagtctcagtcttcatgtttaaagtatgcaacttcttgttagcttagttttgaaacttttggttctctgtaacaaagggtcttgtaagctgtctttgaaagagggaacattctcgttaacagtctttatgggtcttatgctttgttgcttctctaagttttttgtttgaacttgtgaatggcgaatagatgagatctgtcctctgttcttaacatcttattgattttgtcatttggtttaagaaatgggaccaataggcccaggaattaggtccattaaaagcccagtaataatggcgccaaaatcaagtgaagtccccgcctaattcatctcttctcactaaaaaagcgtcgaaacctctcactccgtctctcaatcaattctccgatcagccatggcttctgattcttctctcggcaacaccaacgacggtactatctctctccctctctctaaatctgaaactgcttcataattttgacgaatctcactacctcaggtcctccttctcccggagaaaacgtttcaagccctatcgaaaacacatactcttcccccgccgcacttcaccgtcgccggcgaggaagatcctctactcccacgcaattcgcaactcctccaccaccgccttcacgtctcgcatcatccaattccactcctccaacatctcgtccttccgccgccagatctaaaggaagaaatggacacggaggtggcggtggtggcggtggtggcggagacccagggacgccaatgtccactgacgagccactgccttcttccgatgacggtgaagaagacggaggcgacgatactactccgactttcgtttggggaactaacatcagtgtgcaagatgttaaatctgcgattgaaatgtttgttaagcatttcagagaagctagagagaatagtgatgatttgtttagagaagggaagtatatggtttcgataaggaaggtgattgagattgaaggagaatggattgatgttgatgcgtttgatgtgtttgattatgatcctgatttgtataacaagatggttcgttatcctttggaagttctcgctatcttcgatattgtgctgatggatattgtttccacgattaatcgttt

SEQ ID NO: 18715 - DNA, 564 bp, Arabidopsis thaliana landsberg
  unsure (1)..(564): unsure at all n locations
actttgaacccgctaactactctttttaaaaccaataacaaactatcaaatttatctaattacgtcatattaactgattttagttgaagatcctttctagcaaatatggatttgagctcaaaaatatcggcaaatatgaatatattcttaaacaaaagttaagtcaaagctcaaaccaatctgtttttgagctgttgttagataaggttgcgaaagtatgctctttggttggaaagaattggaaaatggattgagcaagtaaatggattgacaagcaagtaagtgatcaactctccagtcctcaatcaaagcaagcggagacagatatgaaaaaggtcttcaactctggtttgcgacaagaagctgatttcttaaaaaccgtgtgcaaaatgttttaagctttatatatcaaacccacaatgcacttgatgtacaaacgatattttttgttttaaatataatttaacattacattaanaaaagtagaaaatggaaaaaaatatactttgaacttctactcaaaattataaagcacaaaagttcatagtttacaaacaagtcgat

SEQ ID NO: 18716 - DNA, 599 bp, Arabidopsis thaliana landsberg
gtagcaaaagtataattagcgttacgagataacaacactcgttcgccatgagtttgagactttgtgtgcatctcgtttaatgggatatgtccatgaatggaaaaaggcatggaagcaatacaaggagaagcctcaatggatgctaaactctatttgaaaacgagaaaacatcaagagaagcaaaaccaactccaaaaataagaagaccgatcgtggtggcttaagatagctaagcacacatgtgggtcagtaccatatgtccagagaagaaaatagatggaaattttattatttgcatacgatcaattcagtttctttcaaattcaatcaaagttttctataatgacttgtttgtatttcaaaattgtttagcatgataaggtgacaagagagctcccaaatatggttacttttatgaaagcaactcataagagaaagtctaatggtgtatttgtgtgcaaaaaagctgagttgatcgcaaaaaaatgtcggaacatggagcaccaaattctcagtcaaagagataatgacgatgatgacactttggagactaaccatcttacaccaaaagaatttgatgccatttacccaggggtaaa

SEQ ID NO: 18717 - DNA, 2508 bp, Arabidopsis thaliana landsberg
cccaattttttgctaaattttttgttgaagtcttatattaagctaggattgtgacttaaaatatgaataaaactcatattgttggcttaaaaaacgaattaggatgtttgtatttagtaggaacatagtgttatgaaaccacatctgataaacacatgattttaaagtgttttaaaaactattctagcttcaaaaccagtttctcattcatcccgaatctttttttccatcacatatatagtaaattcatgatagaattttaatttaacctaaatatatatagttcatagttggttatgttcaatcgattagaagggttctgttggatccgaattcgagacctaggaactacaccatgatacatttggggaaaatatgatatacgttagtaggtcaaacacaaatattatctaagattagcctccggccagaaaattatggactttgtatgtgagggagaattgagaagcgattgctaagattaataaatatggggcttgttggtagagtagatctataaaaggggtgatagagaaacgagtggaaacgcatgaagcacgttataaaattgaataattgaagattcaaccatattctttgataattggtgggcatttttattttattatttgttgtcaaatctctatataaagaaaaaaaattgttttaacgttttcggtttaatgtttgacgcatatatgtgggaacagttttgggcgacgtggtagcttcccctcctcgtttcccccaaaagccaatgcttaaaatgacgagaataccctctccaaaaaaacatgtgctcctaagtcctgaactagttctgattcttttcttttagctatatagggaagtgagacttgcgagggtgagtatgtgacatcaaaatggaaaacactaagctacataaccgttggactaaaatggtaataaaaagaagcagaacagaagtaggtgaataaaactgagaatggaaacaagaaacaactgaagaaatcggatttatatacgtttttgatcatattctttggttcaaactctataaataagtttcttggcttctttcttataagaagaatcgactacactttaagttaaaagaccacaagcaatacacagttacaagaagaaagaaaagtagttccaagtactctctctactttaagttataagatcacaagcaatacatagtatttaataattaacacaagagtcgagcttggactttcttctttcttgggccttcttctattccgattcatcccattgacaaacccaaagcgttggatactcaaatgctcattcgtaaacacgtatcctcattagctttttctttcccattttgcttgaatgtaactaattaatttggtatttttttaattagtaagtgtagtatgtcaatattgtacaactagatgatactgatccattagagtaacactaaagttaccaaagtttcatacaactccaacgacaagcaaggttaggcctttccatccaatattataatctaagaaggagcgattgcccttgatctgacccaacttgcgagtggaaaatctaatgcttatttgttcattcgttttctgagattctatagcaaataatagtcagtcatcactagaaaatgctcaaacaactaatatgattcatacacatttcatatcatatgcttggcaatattggaccgaacttcatgatttttctgtccatgaatgcaaatgtgttgtgatctctgagttacatctcaaaatgtgaacttgacatcatattctcgttcaaaaaaggaagataagacaaaacatttaagaaacatttcacaatcatagggggcaaaagatcaaaatttaaaatttcggacgagagtggaaactatcaatctttaaggggatgatttggcaaaagtgttgtttttatttttcttttactgttttcgttttatcatctttcaacgtctttctctcccgacggccaaaaaccccaattttgccaaatccaattttacacccagaaaccctaattttccttactttgatttgattttgtgatggacgattatacaagagagatgatggatctcaagactttggtcactcgaaccctagagaagaaaggtgtcctcgctaagatccgggtaaattccctctacttctctaccatacattattcgcagagatttttgttaggaaatgagaacagagaagtgattggtttgaaatacatacattactctttttctagggttcctgctattcagatcgaaatgctcgatattgttaattgcctatgcatctggaatcttgctgatagtttatttgtgtttgtaggctgagctccgtgcaagtgtgtttgaagcaattgaagaagaggatagagtgatagagaacaatgaaggaccgcctccagctctgttgggaagctgtaatgatcgtgcaaggaagcttcatgcttctccttgaggttttgtcttcacaagctttttgcttttatccttttaaatctttcctctat

SEQ ID NO: 18718 - DNA, 371 bp, Arabidopsis thaliana landsberg
tagaacacgaatgacaataacatgaggcagtagtggaggtcgatgatactaaagatgctgaaaatgtatctcgtaatgaacatgtgtatgaaggtgtggatatatatctgataagggtgatgaatatgttgaggtgcaacatgttgtagaacctactcaatttaaaaaggaatgagaagacggtatgggtttgagtctgcttcaaaactttccaaataggacgatgaaacaaaagacgatcaacgcagttgtgtcaattgttattatttgtcaatcatagcatttgattttgtatctgaagttcttgattggacaactatgtaatactaaattttcccttatgtaatactatgtcttgtttatgtggaaaa

SEQ ID NO: 18719 - DNA, 1045 bp, Arabidopsis thaliana landsberg
tcaatgcatgacaaaaaagccttactactgagagaccaaaccttgtcagttatgttatgtatatgatcaaggaaagtaggtcggttgggatggcgcgcaatgttcacacgttgtatcggagtaagatgcgtgtaaagatctttcagtgcctgacattaaaatggcgggggtcagtaagaagtctttcccaaacaaaattgtagctatacattaacatcaaatttgaatggtgggtctccctcaactatataaattgaaaaccaacctatactagcatttttacctgtctatacttgttctccaaagtgataatctgctcagtgaaatccaaccccgtttcattcgccatcttcctcacctgcatcacaagaaccaatgttatgagaaacttcacaccatacaactgctaggggaaatcaaactaagatgcaaacagatgataagtattcacattcgtacatcaacaatcttcttctccaattcgactagtggcttctcgaaatccaaagtgacaggcttttgagtatcccccaatggtttgaactcggccaggtaagacaagactcctcctttcacattcgggtcaggatttgcaggccatggatgctcaaatttcttccctttcttgagccgagatgtcaccgccaagtccttcctcctgatggtagtaaacactgctcttcctaaggttttcaatggtaccccattaacaccattgctcgaactacgcaagtaatctgaagcagaagcagaagaagctcctcctaaagctagtgatgaatgcgatattgaagccattttttgcgttgagttcttcaattacttgaatggatccactccaaacagatctttattctataacactgacagaaaccaaaaccaacacaaattagatcaaaagcaatcgtcgatcactgaatccacgagagattaaataaaattgaagaagaacacaaattggtcagatttgttccactgcccatttcgtgtctcagaaataaaacaagcaaatctttgaaacccatcaacaacaaaacaaaaccca

SEQ ID NO: 18720 - DNA, 919 bp, Arabidopsis thaliana landsberg
  unsure (1)..(919): unsure at all n locations
ttgcatcctatgattctatgatataccgaaccgattcgattaaccagtagttacgagaagttatttgtttcaactaactatctattgatttgatgtaactagtttggtcctctgcgtataaaaggaacattacagaagagattaaatgataggcaattgataattgagacggttcaagaaaagatttagcaaccaacaaccttaacaaattttcatttacgtaactataattatagatcttgctatttttccattttatggcgtcttcttattacgaaactcatactattcagtcacataatctcatttactggactataatgggctttattgtaatgggctttattgtaagacatgagcccacaaatttggaaagtaataagcttcagctcagctaaagagagtctaaaaaccaaagggaaaaatgtcattaaaatccccaacttattgaaaaagttgatttaaatctttaaatgtcgtcaaaacgaaataagatatcaaatttatgttgacttttcaaataaatatcaaatttacattaattttcgaaataaataccaaacttgcgttaacttggccatttagtcatgatgttaaatgagttaacaaatctcgttaatagagttaattttctgttaacatacatgtcaattgaaaacgatattgtttccaataacaataatcaatgtcattttgttgtaactattgaactaaattaccaaaatttaatcttaggtccccaaatcgaacaaaatctctaactctagggggttatcttaggttttcttcttgattcctccgtttatcnnnnnnnnnnnnnnnnnnaattggtgaagccaacattcaacaacacttgacattntaanttgaaaataacataaaaagtagatatttgattcataaaattttaaattcatgc

SEQ ID NO: 18721 - DNA, 236 bp, Arabidopsis thaliana landsberg
taaaacgactagctaagttaaaatgtcacaactgactcataagaaaagaaaagatgaagttagttactgactcccccatacttatatgacattgtccccaatgttattaagctagagaaatcgaaggaaaaataatcaaaagttaaaagttagagaaacgtgagttgccacctaagagtggtgtcgatcgataccatgttggtgtcaatcgacactttggtcgtcttgcttagcta

SEQ ID NO: 18722 - DNA, 1739 bp, Arabidopsis thaliana landsberg
agaaactcatggatccggttggcttctcctgtatcactgtatatattaaaaagttcagcccttgaatgagagattgcagttttaacgggctgatccaccaatatcatgctcgaattctgaggaaaatgatgatcaagaatatacaatgatcactgggttttgatgatctccatcatatatatcattatacacttttgtattaccttagtccatgaatatgtagtagagaccaaggcaaggaagagttccattgtaaacatcgagcttcacattcacaggccctgcttatatgtacatctatacagttacaacgagtaatcagagacgcaaaagaacaagtttaaagatgtttttgatttcaccattctcaaaaagaaggccagagatggaagagcagccaggtcctccacttagccagagaagaagagggtcttcttttggattcctctcagacttgatgaagtagtagaacagttgcacttcctcttcctcaccaacaccaatataccttcatacacaagaaacagtatactatgtcttttagattatctccaaacacagatttaatctcacaaagagattgaaaacaaacccggtttcgagctcaaagggaagagacccttcaaaaccaggaagaaacttgacgatagaggcagaatcaacatgctgctgaatcaagaagacaagatgaagaagcagaagcagcgacttcaaaacagaggaaatgtagttagccatttcttttttctttttaagtttctgattagaaatgtaagcaactaggatatgctttgaaaactattgcatttttatactaaaacccaaaacaaaattcgcctaccaactatatatcattcaattctggctagatgaccaaccttgtcgcattcttttatcggaaaatctcgcaaccttgatcctcacacctcgtagataatacaaagttatttgttcatcatcctcgtttttcacgatcacgattatataagcttattgaggcataatcaacatggatctgacccaagaatacaaggtaaattaacagaagcagtgacttcagaacagagtaaacgttgttgtttgccatttcctatttcagtttctgattagcaatgtcattaaggacaacaattactgcatcttttatacacaaaaaagtcgtttattaaaactctcttatctttcggttttggtatatttttttaatggatcaaaatattaaaatgtcgcaaccttgtataaaattactaaacaatcgtcctcacttcacgcgatcataaaaagacaattattcctatattttaatttaaacattttagtgagaaacaatacataaaattttaattttgctctataattgtgtctgacttaaaacgcagaccagatatcttcaatgatctgaatccattttttacaacagcaaaaaaaagttaaacgtaaagaagaagagtacatttgtttcttagatattcttcaagatcactttaaaacaaggttaaaataaaaattagtatatctgtaacactctataagctagatgtatgcaaatatgcaaggaaggatcaggccagaactatacttcccgcttagggccatctacttcagttgtcaagtgtaaacaaacaatacctcaatggctaacaagattgattaagcgaagattcatcagcgaggcatctcttcgacttcttttcaagaagcgtaagcactactcgatggctgcgataatctggatgcca

SEQ ID NO: 18723 - DNA, 1416 bp, Arabidopsis thaliana landsberg
gtcagaagtgttggttactttgacaaaaacgcatcgtttcaaagatttttttggcgtagccggaaagaacacgtcatcaccattaagcaaaatcccaaagagatagtatttgctacttcggcttcgccttgagggtctcctcctcagctttttgagtccccggattgctcatggccgtccccgggttcttctcttccatggcgcttctccgtaatctctctctctctctgaatttcaccttttcaatttgattctgaacttttgataaattgaatttgaacaaatacttgcagggcattgtcctgtatcgaacacagaggacggaggaggaagcttcttccatgtcgctcctcgccgaacttttcgtcctcacctcctcaacactagttctgggtactttccattaccaataattctgttgtgtgtgattcaaagttgagatttttttctgcttttcaaagtaaattggatttaagtgttgttggtgttgaatacttgatgcattagattactgtcttgtagcaaaatgataaagatgccaatgtttttggaagagactcatcatggcacatgatttatcagattttgaatggacttgtatgcatattactaggtgtggatttcttaagtgttatagtgactatattacaagaaaatacctgcggaggaataggactcaagctatagcagagtatttgggttcagcttcagatcctaagaagccaactgggaagtcaagttatcatccttcagaagatatcagagcatatgtgccagagaagaatcctggagattctaggctttcacctcctgaaactgctagaaccatcattgaggtattattatatatggcatcttccagtcaacatttcattagtaaaacaatcctaggactgatgtcttaatgtaaattatagttatatgttagtgtgaagagttctacttgctaccttattgtaggtttcttcattatttatctatcagaaattccagtttgactctacctgtttgtttttccggagttggttttgcggatctgacatttcccgtagtcttgttcaggtgaacaaaaaaggaaccctgatgctctcaggtttacttggtattggagttcatgagaatattctctggccggatataccttatgtcacagatcagcatggaagtatgaattcttatttttgtttttgctttgtatttattcagttggcttatagctatctataatttaattgaattacccttatgatctgcagatatatattttcaagtaaaggaaaatgaggacataatgcagactgttgttacatctgataatacttatgtggtatgttgtctttttcagataaaaagtcttgttacatacataacctttatagaccatttattaaagaatggatacattagcatgtagcc

SEQ ID NO: 18724 - DNA, 230 bp, Arabidopsis thaliana landsberg
tttcgacatgattacatattgaactaattggccaacatttcttttctttgccgcaacgatgctggcgtagcttaaagatataagattaacgttgacctgttacttagtttgtggttttcttggtagatttgatacaacagttgtgatatacgaaatgcaaatatactatctgcctggtgttgaataaaagttgtgacactggctactattccttttgctcaggggcttgc

SEQ ID NO: 18725 - DNA, 618 bp, Arabidopsis thaliana landsberg
  unsure (1)..(618): unsure at all n locations
attttagttccgagcttatcttacaacatttgtttaattttaaaccttttttttggtttgttaaataatatttaacaattaaccccactatttttatctcatatttttctatgtttcaaattacatattaataacacttatcaaataaatttaagttaaaataattataaaatacaaacaaaattatgtttgttgaaatccattttttaaaatgtttaaaaattaaacaaaaatgtatgtgaagataattaaaagagttacagtaaaatataacttctttttttatgtgcaaatcaaatgaaacaaggatctttttataaagaaatttttttgattaattttgattttaaattcataaaaaaataaattactttattatacaataaaaaaacttaaatatttagggtgaaatataaaaatcttcacaatttaatatctagtgaaaagaagacacgtgtcgcaagtgacacccatttatttgtgttcaacatgttgaatattttcaactatagttaatccacaaaagattttttactttttcaacacccttattgtaagagttccaacagttgaataaacccccgatgcacatangtctaatataaaacataaaaattc

SEQ ID NO: 18726 - DNA, 360 bp, Arabidopsis thaliana landsberg
ctaccacgcaaagttagaggcttaaacacatttactaaaaagtaaaaatttaggtacgaaagttccataacttctcaccttctctgtagtcgaagaatctgaggattgataaatgttttaaacaaagaagcacaacaagcgtaagaaaggcgcagaagatctctcgaagataagatcccaagatttggagaactattccgattctctaaccatgttcaaaggtgaaaattaaaaagaagacaagaacacctgaatattctttgataaatgtacttcttttcacatctctaggccagccagtaacttcgattcaagaactcaatcatcccaagagatcaaagagatttacacaagatgaac

SEQ ID NO: 18727 - DNA, 466 bp, Arabidopsis thaliana landsberg
  unsure (1)..(466): unsure at all n locations
aacaaaaggcgttcggtttgtgtggtgcataacccgataagacggagtagattcctattatctgttacacttatcatctctacttcccttgggaaggcagcatttacaccaggactttcttaaatccgtcaatctcttcacagcagcnnnnnnnnnnnnnnnnnnnnctcctttgtaaactttcccaaagcctccttgaccaagtacattcttttcgctgaagttatctgtcgctaactggagctctctccatgcaaaccttttcaactgtccaaatgcaattctcctggccacttcacctgaaaaatagtaaagttccacaaatctgcatatcaatacatcataacataccgaaatacgaaatacgaaagaaaggttttcctgtagggtatattacagacctgcaacatccacaaacacatcacgtctatattctttatgcctatccttgcagaacagaaacaac

SEQ ID NO: 18728 - DNA, 572 bp, Arabidopsis thaliana landsberg
ttgttagatccatcaaaaggaaggggcaacttccggtgactgaaaaaaagatgcaagtacaaattctttatcatataataataagagctagcaacgggtgggcttattgagtttttttagagtttttaagccaatcagaaggctctatttcgtaccgagtcgcataaagagcgcgttgagcgagtgaaagcgattctgggggtaaacccttttccaattcatgcttttttttatcgacgcacatctttccaaattctccatcgcgtgactcttttagtttttttccacaaaaccaatgaaaccgaaccgaaatcagttttaatttcaaaaccaatgcaaaccaaaccgaatcagcaaatagtgtgaagcaacaattctggacagaaattttcttaacatcttaacaacgggaaaaagagaaaacaccacaactcaaaatcacaaagaacaatctactgcttcagttaaacatgaaaaacgattagacttaccagttgaaaatctgaaagcatgaatttcgttgtgagctcttcgtggttgcctcggccttttattatctttcttattttctc

SEQ ID NO: 18729 - DNA, 709 bp, Arabidopsis thaliana landsberg
tcaagtgggtaaagagcttgatccatgatttggataaagtagtcaatcctaaagctctcctcgggtgataatatcacacttccctccatattctctgattcttcgccataatgtctttttcttttaatcacccgctttgcttttttggcaaatataggatcaatctccaaaggaactacaatttctttagcttccacttttgctttcatgaagccttactctctatattttctaaaatatgaaaccaaccccttgagttgagaaatcggtacatcgatgttcatgtcttctgactgtaaactcttagtcatgatgttaacaacagatagaagattgtaccaaataaccatggaaactaggaactcaaaacttccaattccctgtgtttcacttgttgcaaaacattcagcgtcgctctgctctttcggatcatcactattttcagctatgtacattaacgcattcatgattttagaagcctgaaatcgtattgcctttacactttcaacatggctctcccaatgagtctgtgataaaggcttaagagttaggccacccacatgatcctcaaatagtttccatcgcttaactgaagatgaaaagaagcaataagtacgatgtataatccccaaaaatgatatagcctttgaagaagtggttgccatatcacaaagtgcaagattcaaactgtgacaactacatggtgtat

SEQ ID NO: 18730 - DNA, 928 bp, Arabidopsis thaliana landsberg
cttcgtgtttgtgaattgtgtgtttgagttgagtttttttgctggtgtctataggttacttgcagagtctcctgagagggggctactcctccagaccactgtatcatcatctacaacaactggtaatgcatttgaatcgacatttcttttgtgttttactgagattggagtttcttgtttcctgatatagcaaatttgttgctgcattgaaaaatcgaatttcaaaatttgggaagtgagaatgttgctagtgggagactatatctgttatccatgtgaattaggcgaagagactcatcttttggaactatgcgtctctagtcaacttagggacctgtactttagggtatgaaatttcaatttgggtatgttttcaggggatctctacctcgagacaattgcaggcgagtgcagagcctgtatcatcacctttgtcatctccagctctgttgggtagtggaaaagaagaagagcagaagattatcccaaagcgtcagaaagttcaggctgtcctcaagtctataaagcaggtgtcttctttaactcctagaatagttttacttttcagatgatctgctccatttcgtttaatatttttccatctcaatctagttatataatgtgcccaaccctgcttgttttcagagtcctaagaaggtcaacctggttgcagcactagtccgtggcatgcgtgttaaagatgctttgatccaattgcaggtcacagtccaacgagctgcacaaactgtgtaccgggtaatctctgagatccgagtttacaaacaaatcactgttggatttcgagtgtctagtctaatctcctctccaggcatttgataactttcctcatctaaccatacccagcatacaacttgttttgttaataaaatgaaaaaaggagttaaatacattatactgcaggttatcc

SEQ ID NO: 18731 - DNA, 262 bp, Arabidopsis thaliana landsberg
  unsure (1)..(262): unsure at all n locations
taaagaataaacataaattagcaaaaaaaaaaactcatcttgtnttttaaaaatttaaaccaaatcagttttagttttactatctttttattcagtttgataataatccttttttatccttttttcctgagactaatttttgataataatcagtcagcttaacattgaaagtccgagcataaatggctaatgggataatcatggaaaaaaatttagaaaagttaaatcaaatcaaatttatttactaggcttagttaggttt

SEQ ID NO: 18732 - DNA, 965 bp, Arabidopsis thaliana landsberg
agcctacgcgcatagccaccttccatgatacgagcaaaagaagatgcatgagagtacttatttcctttaaaacagtcatatatatccggatgtgcatcaagatgaagaatgtccacaggccctccaagcttctcagaaaccgctctcacaacaggataagatatggaatggtctccacctaagaccaacggacgcaatggttcctgacacaacaaacaaatgctcagttacttggacttttagattcattgaccttaaaccagtatgtcaaaagtcaaaacagaaaacttttagcccctaggtacataaaaatgatctagtaagtatcacaaaagactaaatacatgaagtggcgtaacactagagctgtcaaatagctttacctcttccatcaccaacttcacagattcacttatgacattcatcagtctatcatcatcaaccccacaatctctaatctcttgtaccggaacatccccaacatcagttagaacccgtggatccttcaactccttccctgcaattcattcaacagatcaatatcaaaagacaaacaagtctaccaaacacaaaggtcaaaaccaatcatcaatgactgtataaaccatagaacagcacaagcaaggtgatccaataacaacagaaaccataattcagaatcaagactgttgctatacaaagcatgaaactttaaaagtttctaatgaaacccatgttaccttcttcagtggcagagtttgtgctaccacaccaaatagcttctcgaatacgaggaggagcaaaagcaggaccttgaagaaaagaagagttgtgaccaagtggtacaccaagaagagatgttgaagctttagctccacctaaaagacgcactaactctccctacacagacaataatcacataaacagacatgaacacaaacattaatacatgacacagcttctacaaaatagcgcctactttgagt

SEQ ID NO: 18733 - DNA, 501 bp, Arabidopsis thaliana landsberg
tatcgaagagaagaagaaacgaaccatgtactcggtggtgatgaaaggatcgttaacagcgacgagctcaacatcatccctctgaagaacaactctagcaaccaaacgaccgattcttccgaaaccttcacgaagattcaaaactcagcttctacagatccaaatcacttaaacctaacaaaaaaacttatggaattcgataagaaaaacactcaccgttgattccgattctgatcttcttgtcagctacacaaatcaaaagagaaaatcaaaaacacgatcagattcaaaaatgatcaacaacgaaaacaataaatcgaagaatcgcagatcaacaagagcgagaagcttacccatttttcgaaattgagatcgagagagatttagatgatatcgagagagaagagaatgtgaaaatagtgagtgagggtttgggtttggtgaggctttagggttatttaaaagagaagaagaacgtgatgatgaaaattgaaaatatga

SEQ ID NO: 18734 - DNA, 1875 bp, Arabidopsis thaliana landsberg
aagaatcataaaaaaattcatagtttatagaaaatggtttagacatatcttatcatacatatattcttaacccgaatccggatgttgttcacgacgataacgcgtagcaatttcacaaccacgatggtaaaggttgactggaaatttgacacattctttgggggcttttactgccgcaagctggaattctgtcttttatcatatctttatagtttatatatttgcttccttctcctaatccgctgaacaatgataatataatcaattactgaaacaaagaaaagacgggtaagactctttttatgaccagccattgttaaaaaaaaacaatgtttttgaatctttttgatctttttctttgacactatattttgtaaattgaattggtaattattagtttgtgtatctttgaattataacaagagaaagtatttctaaatacagaagaccagtgcataatgtgtgtgcaagagtttagtagttattttaattcttcctttccccacaccattcgtccataactccgtattcttcttcattgttctaaagagaaaacaagaaacgtttaacggtttaagcactttaaacgagtacattgataataaagcttgcatgattctcttacacaacatacacatacttacttactactttcttacacacttacacacacaagcatgcttttaaacacataactaactctagactcttgcaagccactctactacttacatattcttgcatactactctccttaagatagaaccatagttgggcttaaccaagtagcccaacgtctccttaagacaaaacagcaagcccgatctcctttgttgacttgtgtcttcctcctcttaatcgttgactcctctcttcacgtctccaacgtgtcttcgtctttgcttctgctctgttcttcttttgctttgcttctcatcttcatcacactgattcatcttttcttgttgcaggtttgagcacaggctcaaacgctaacagttactttgtttgttgaattcatagtttactagtccatgtagcttagtgtgttggatcaatacatgatcatatcaatatttaaaacgttaaggtttttgttaacgtgaaggctttgtttttgttcgtcctcaaggttgtaatcagatttgcttctttgttctcctcattaagaatttcatgcttagatactgtaactggtttccttagatttcatcgcaggtttttgtagttcagacatagatctattgccataaggcttacttgattgattgtctgtttaatttactttatagtttgtttacaaatcgttggcctttcactctatctatctaaaagatcactaattttaaatatctctcaaactttgttgcagaggctatgttacaaccaggaggcactcccgccaagattgtctgtttgactcaagtggttacagctgatgaccttagagacgatgcagaatatgcagacataatggaggacatgagccaagaaggtggtaaattcggtaagcaattcgtttttttttttactattgtatgttctgacattataccattagcacatagccatatactcaggcttttacatagtccaatatgaacttttgataatttgttgttgtgtcatgtgtgtgcaggtaacttggtgaacattgtgatcccgaggcctaatccaaatcatgatcctacaccaggagttggaaaggtttgattttcaattctcagatacaaatgtctaccaaaattcatatataaattgcatactctaatgataatatttaatgcaggttttcttagagtatgcggatgtggatggctcatcaaacgccagatcagggatgaatggaagaaaatttggaggaaaccaagtagt

SEQ ID NO: 18735 - DNA, 250 bp, Arabidopsis thaliana landsberg
cactgacgattacaccgagagctacaagagtacatccgagtatttggtttacgctatatctcctcccgagaaaaataatggagaagaaaatttgccagacaagaaatgtctacaaaggaacagttgagtatgtattagcacgattatcatgaaaacatggttccaagttttaagggcaaaaccattggtcagcaaaatccaacctttaaacccagaagtttccaataccggaggtagaaattttaactaa

SEQ ID NO: 18736 - DNA, 1675 bp, Arabidopsis thaliana landsberg
tgtgagcacatgctattgtaaaaccgtgatgttattatgaaatagagactcttataaggcaaatgactgatacaaattaaagacgtgtttacaaaataagtcttagcatgagtaaacatgcatgttttattgaaatctttaacagcaaaaaaaatacaaaaactatcactagatcctagtgatattaactttgagaccatgttgcatacgaaaaagaacagaaggaactggttcggttttgtgcccttcaacgaccttgatgtcatagttttgtatgatttccgcagccactgtcttcatctgtaagaacgttaactttttccccaagcaagctcttggaccggcgttaaacgccaagaacttatatgaaggttcatgttttaaccttccactgtctgaaatccatctctctggtctgaaatcttctgcgtcatctccccaaacagatttcatcctccctaatgcatacatagatatgacaatcttccatttctcatctactctatgcccacttggaagtacgtctggctttgccggtgacttgtggttaaatggaactggtgggtataaccttagcgtctcacacacggcaccgtgtagatacacgagcttttctaaatctgcgggatcaaacctcggcatcttcttgttaacctcttgtcggatcttgtttattgcctcagggttcttggacataagccagaagaaccaagtgagtgctgaacttgttgtatctcttgccgctatcaagaaacccaaaatagtgtctttgatgaatctatcatcacttggttccaagtacttatatttggtcgtgtccatagtcatgtagtatgtcaacacgtctatggcctctcctcttgagggatgatgagtcccatgactattgatctcctctcgtttagccgttatgatcttctcgagtagttgatcgaataccgctagacctcttttcaatcttttctctactcctaccccaatcaaatattggagcctccacaagaaaaccggcttaacatgtctatagaaaaccccgtccgaaacaccatcgaccgcgtcaccgaactcaaccttaggcatttcaacggataaacattttggatcatacccggccatcaaaatcaaagatgtatcaaacaagtatctttggaacaaatcttgcaagtcgacaaggatatttttatcagctgcattttcaagaataggaacaagcccttgccttaatttacttatactcgtactcacccagaacatttggaaatcttgattactaaaaatggcatgagacgagttcctcatatcctcccacaaacccgagtcaacgttaaatattgaatcacccacgacttcgaagatcttcttgaactccattcctttggggtagttagcaaaatttgagcttagaatgtagtggatattcaccggatcaacagtaagcaagatgtccatcccactaagacatggacctttgaaacaaaacgtcatatcggtcgcctcaagaacctcggtgatccagtcgtagatacgaggcacttggaggagtagacccggaagcatcccaaggaccggccagttcgtgagtaaaggcttgggagttttcttgtggagtaataaacattggaagaaaatgaagaaaacaaatgctgtgaagatttcaagtaaacctatgactatc

SEQ ID NO: 18737 - DNA, 566 bp, Arabidopsis thaliana landsberg
  unsure (1)..(566): unsure at all n locations
caaacatgtataaacattggaacacatctttaaaaatacataatactacataagggataatgaattcaaagtataacataaactataacctacattaactttgtttgaaaataggttactatttctcctaagtgttatttacaagtacataaacatagttcaacatattttattgtgacataaaatttagtacagagatgaacttatgtaatgcatattattaatctcacaagtttaaacaagtctaaatctctaaggttcccctttatttatttattaattaaataaaactacatctatattagttcatattcaatcataaaaattagaatgtgcagacagtaagtgaaactattttatttaaccagagaataattctatgaacattttgcaatttgaatcactaaatttggagttcatatgcaaaagttatgaaataaacaagtttaggagttcanaatatgaaattagggctaattctgtgattaaataaaagtccagggctaagtcttcnagattacaggggtctgcgcgcgaaaaccagggcnggcgggttgatttcaata

SEQ ID NO: 18738 - DNA, 574 bp, Arabidopsis thaliana landsberg
  unsure (1)..(574): unsure at all n locations
gctgtatgaagagcccgaacatctccaaattgctaaaaaatataaatttatcatcaatgaggagagaagactactgaaatggctaataccgtgtcttgccataatttcggaacctgtaaccagaaacgcaggtgaaattacgtaccttaaaaaggacccccagctcgcaatcttcaatgctgctatccacattcctaacaaaaagtattctggataaaatttctccttgaggatgctcagcaacagtcgaaacattgctgcctctcttgccatctctttgactgacagaggagaaaacatctccatctagttccatgccaccaacactgctgaataggtcacaatcatccaaatcatctccaccattggcacgagacttatggacaccctcaccaaccacttctgcaaaaagatcatcctcatcaggaagaagatttccaatagtttgcgcctccatttcttctaaggactctgaaggttcttcctnnnnnnnnnnnnnnnnnnnnnnnnnnnnnnnnnnnnnnnnnnnnnnnnnnncanaaacaagggaagtcattagaaaaccaacaataac

SEQ ID NO: 18739 - DNA, 1229 bp, Arabidopsis thaliana landsberg
  unsure (1)..(1229): unsure at all n locations
cgttgaggttctagttttatattcaatcatacacaagacatttagtcatatttcactccgaaacgctaaccaagattcttcttacttctctaagtatcatagtatattagatcctaaacactaaacctaaactctacaccctaaatcccaaaacctaaaatccaacccctaaaccctaaccccctgaaccctaaatcctaaacccaaaaccgtaaaccctaaaatataaactcttaaccctaaacccttaaacctaaatcctaaaccatatatcccaaactttaggggggtgggggtattgaagcaaagaatgttatagaatctaatagaatggaattaaagacataaatatagatttgcaagtacatataaagattttttaaaatctttctttcaaattctacgaatattctacaacaatttaatagaattgaaaagaaatttcaatataattaaaaagatatatttacaaaattattctacgactgagatgattaatcattggtaagtaaaatgctgctgtagagtttaatgatctctttgtctactgggtttcttcaaatttctgatcgttgggattcgtgcaagtcgagagagtctacttggttgaaactttctagggtttgatttgagttgcccatttggatttgaagttttgttggtaagttttaccctttgagatatgctcgtctgatagtatagggctttcgagtgttatgaaaaattcgccttttcgtcttctttgttacatcgtggaacaatttgcttctaggcttaaccgttttggatttgtatgttgtagttgctgatttggttttcatttccttcagctaaatcttcgtaatacttggatcccgaatgattaatcatctcagtttgattggcagaagtgacggtggcaacagatttggatgccaccgctggtcaccgtagcggtggctttcgtcgtggcattacnnnnnnnnnnnnnnnnnnnnnnnnnnnnagacttgtccgcaacggatgatcggtggatggggttgagttgagtaaacgaatgttgcagaaaattagatgctacgtgggatcattgaagattcctatccacgctttattctttggacgattatttgctgttacctcaaggacgatattttaagtaaacattgcttccactcacaatcagaccaatagctttgacccgaagaagcgaaattctgctccgtctgcgacgtccattattcaagcat

SEQ ID NO: 18740 - DNA, 434 bp, Arabidopsis thaliana landsberg
tacccacacgatctcatcaaaaataagtttaataattattgtgtcatcattacttcttgtttaaattagtccaatttctcctcaaaaagatggcaaagtgcctaatccctgaaaagtgcctcaaaagtaataaaattctttaaaagtgtttaaacgtgtcatattcccttatcattttagtcctttaatttttctatattcaaaatatttcaacaatttttgactcgtaatctacagattaaaaataaagagacttatctatctcttcgtaatgcattgattgatcacatatgagagcattacgaaaataattttattgagtaatttgtaatttataagttaatttatgtatttttaattcttatttatatgcatttcaattataaatgcattgtcttgtctttttttcattcccctttccttcacccttcttc

SEQ ID NO: 18741 - DNA, 1049 bp, Arabidopsis thaliana landsberg
  unsure (1)..(1049): unsure at all n locations
aatttaatgtataatcaagaacggtgattattttctctttaaagaaaggattttctcttgataaaaaaaaatatacaagtgtttgtgtatgtggccaaaaaaaatccgaatgcggtaatcttggcagttgtttcatttcgttctactattttttttcttcagccaccacttctatcttttgataatttcctctttacctacttctcatgcatgcgtaccttcctttgtcagaaattttgtttggagcccgaatccactaagtacaaaccattagacaacatctcctacgttacatctaaaagagttaacgtgatgagttgaatttactacataaatgatgatttgtgtagacatatagaaaactcttctccatagtttcgtgaatcaattggaagtttattttgaaattattaacaagtcaggtgaaaataatattaacacaagcactatactctatacaccttagtaacgattaactacaaaggctttgggtaagtaattaggattggtgacaagacttacatacggcactatttgtaacaaatatatattgaagtctccaattttagattctataacgagtcaaaagacaacttgagtcttgaactacaacaaatcaacaatagtaaaagaaaataaaagtcgtcaacattataacttccgcataatttatataataacgtccatttcaataattttagtttggggatacaagagttcgaaaacagaaacccgttattaaagcaaaataacattttataagttctatgaagagttctttttaaagctaaagttaaaagatacatgtgccaacacttgggtcggaagatataatgtaaccagtattgccgaagctacaagcagcatatgtgtgaccttgactcctgtagtatctggtcatggcaaacgcagcatggtctagtaaagtattagggtaatagcaaaatccaccgggttggatcggtgcacaatccacatgattgcaaagcaagttaatgtttgattgtaactgctcagttgtggaagtaggcatcgncgtgcaccatgtt

SEQ ID NO: 18742 - DNA, 733 bp, Arabidopsis thaliana landsberg
ctttcaaacgaccagtgcatgttatattagctgacatacacaaagtcagaagtgccgaaaaaaaaaaacagtctgaagacatttttggaaatattaatatttatttttcttaatatttgatttagtaatttaatttgtttcaaaaagaatttgaatcttacatattccattttgctatacactttaactatttatttcataataataaactatattttaattctactcactccatcttttcgatgatatttgaattttaaatagtatctcgcacatttttctataattattttagtactttattttaaaaaaatcaaaccttacacattccatttgcaatacaactacaatttaactatctatttaatcataataaacatgattttgattttacaaacttcatcttaatgaataaatgctaaaacattatgttaaagtaatatgtatatcatatcatatctttttttatctgaactaatatttaaatagttaaaaataacaaaaacaaaaatcaacaaacaaacagaaaaactttaccaatagaaggacgttgaagcaattgtggtgtttttttttttttttggtgagaagatatgagactatctatttgtttatattgatgtgtgtattttgaatcctttttttttcaggattaataattgcttgtaaaatttccataacgattgtagtttatataataagaatggataatttcttaattccatttaatttt

SEQ ID NO: 18743 - DNA, 1695 bp, Arabidopsis thaliana landsberg
  unsure (1)..(1695): unsure at all n locations
gcttgtttataagttcaattcatcagtgtgtgtaggtttctcagcctcggaagggatggctcttctacgctttgttggaagcttgttcataaagttcaattcatcagtgtgtgtcggtttctcagcctcnnnnnnnnnnnnnnnnnnnnnnnnnnnnnnnnnnntgttcataaagttcaattcatcagtgtgtgtaggtttctcagcctcggaagggatggttcttctagcctttggtggaataatggttatcttaagcttcacagggatggttctgctagcctcgggacgggcggttctgttacccttagccttgtgaggaattgttgatttggccgcaggcaggaggatggcccttaaaccaagaagcagattccggtgatctttcgtgagttcgtccactcttgcaatgacactatcggcatcgagtctacaaagaaattagtaacatcagaatcagttacatggtgtgttgttgtgtagattgagacatgaaattaagagaaaatcaaatgtacatggagaaaataatccacacctacgagctttataatcattcaagagcttgagaaactcggcatattttgcaggctcatcatgaaatgcttccttcacagaatctatgtatgaacgtgcatcatcgagagttttctctagtggtacactttttccaaacatggttcgagatttccttaactctttgttcgcattaggagggatggttctatcaaccttggataagacgagaaacttcttgtgcaccttctttaccgacttcttcccctcatcaatctttttcgtcattgggggaaatacaagactatcaaggcactgcagatatatatagatttgcttaatacaaaacacaagctaggaaaagaggaaatgtcaaaatgatatttccataggagtattcatcatctttagcgattctataccttaagcttcttcttcctatgattctcacgattagcacgtttctttttggcatcaacagactcatggcgttgctcaaccttgggagggatggttatctcagcctcgggaaagaagatttttgaaccaagatgcagcttggggttcccactaataagttcgttgattcttgcagtgatcctatctttctcaactctacaaagagaactaacaacatcagaaaaaaaatcgacaagatgcttgttttgttgtgtagactcgcagttgaatttaagaccaaaaccaaacataacaatacatacctatcatcacgaacttcattcaagcgcattttaaactcgtcaaattttgcaggttcatcatgaaattcttccttcacagattcaatgtatgaaacagcatcagccatagtaggctcctgtgatacacttcttccaaccatggctaaaccctccaaggaaaaaaaacaaagaaattgtgtttagtaaaacagatcaaatcaaatcattgaatctaaacctattaacactttttcttttactatataagtttcaaaatccttgaagaaacagaaagaaccaaatatcaatctcattactcaacagttacatgtatttgtcaaaaccctaatcaaatacaacattggattcgaagcgtcaatgtcactctcaacgatatataagtcaaaaaattaagaaaacgtcaggggaatttcatatacagcagcaacgagccaagaactcgatagtaactaaaccc

SEQ ID NO: 18744 - DNA, 3719 bp, Arabidopsis thaliana landsberg
  unsure (1)..(3719): unsure at all n locations
taacttcgttaactcaattttggcaattatgaatgtagtaacaaaaatgcaagtgatgatcagttctttgccaaaatggagttaaagttgttagctttcctcctacataacaatctagtatctaaatctttgccttagaattcatatatctaaatttcaaaaacactcaagtatcaaaaaattctatgatgatcatcaattgagttaaagttgttagctttgccaccaaaataatctggtatcgtaaggcatgaaaactaaactgataatagctctgccttaggttgcaaatatctaatacaaaaccaaaaacaacaacattcaatcaccaactaactaaacaagtgttagataaaaatggattgcagcatgacaagtgaaaaccaaaccaattgttgcagtttcagtgaacctttccttgtaagtagttttgccacaactgagttaaagttgttagctttccactcaaagaatctatcttaaattcctgacacttggttcaaacaaccaataacacaagattgcaattatcaactaaactaaaacaagtgttaaatagaaatgaactgattctcaaaattaggaaccttttctcgtgtggaaaccagtaggtttgcagtttttgcccttgtagaagtctctaggagctcgttttggggagaggatatcannnnnnnnnnnnnnnnnnnnnnnnnnnnnnntttcaatccccattaacaatcctcctatcgtcgtcattctccaacaatgtattagactgatatcagtcgttgatcttaaaaaaaaaaaggagctgatagaagagtgcaaatctcagagaggtcaaattaggggtttttgttcaagtgaggttgtaggttgaagacactgtaaacgatgtcgtatagggggtaaaattcggaaaattgttgttttcaggaaactatctgactctaaacaaatgaaactgaaaatataggggtcatatttacaaattagttatcttcgatttacgcacgtattatatgtttgttgtagatgtttattttctaagtattgcataacgcataatgttttcttgtatgattgtatcaagctattctactatgtgaacatccaattatcaagtgaatatatattccaccgcataaacatgttatcaattattttgtatatcgtttcgtgaaaatatcaaaccaaatctaccatttttagaatagcacaaaaaaggattaaggataatagaagaacagagtcctaacttaaagcttagtgaggaagcttcacactcgtattatcgtcaataaaacaaagacgagatacaaatgactcttcacactactattattgtttatcttgtgatgattcctttcctatcaaaatgtctgcagcaacttcactctcttgttgacttttatcttgtgatgattccttcctttccactatatcggctgcagtttcccactcctctaggcctttatcgtctgttgcttccataagtttccacacttccattatatgtccaccttgctttgccttgagtttgagcagtgcagctacccactcctctcgacctttaccagctaaaaacgaccctaacagtctaaggcccaaaggaagaaagcctgcgagatggacagcacgaactgcgagctcttcgaaatcagaaggtggataaggctgcttgaaagcaaaatgagagaagacttgaagagcttcatcatatcttaaagatctgacttcgtacacatccatcactccggcgtcaacaagcaaattcttgttctggctaataagaatgactctgcttcctggagcaaaccagttagcatattcaatgatccacttcccttgttccatgttgttcacatcatcagcgataaggagaattttccggtgtttacgccttgcttcggtaatttcatgtccatcgtgatatgagcttattattaccgttggatcttcttctccttcaaactttagaagcttgtctttcatgttttcaacattatctaggaaaacatgtgtctgaaagtttacaaagatctctgcataaatgtaccttgcaagtgttgtcttcccaacaccagcactaccccaaatgccaattgtacgaacctctttgttaacttctaaagccaacaagtcataaaccactttcatgtgacgatccattgcaacaagggcattcgaatcgtttgatccggagtagaacacgacaagagatatgtcacgagcaatttggttgagtagatctgactgatccattcctgcaagattttgagataatggatactcagcggcaaggttggtcaatttggtaagtgcagttctccaacttggcgccttctccggatgttgtctgcatatttcttccacattaaaagataaatctgtaagaaaaatgggtatgaccatgagtgaacctttttcctgaaactcgagtatcactaagagctcttctaggaagccaacggagcaaggtttcgtcgtagaggtcataacaaccgcgactctcgactcttccaaagccttgagtgtccgttgaccaattggtccgaatctcttctccaagcatctgtaggataaaaaagttctaatgccatttcgaatcaaaatattttgaaaatatccatggctagtctggcagcagaaactcaggaagacatccacctcccttccaagcaacaaagaagcagcagaagatgaagaagcagaagacattgctttggttaaaaacactaattctgcagctggactcgaacaacgaaaagctacacatgtgaaacagctttacaacaaacacaccacttataaaaaaaacactagtagctaatgtgaaaacaaacaagacaaaaaagacaaaaactttacgtagaaatatataaataaacagaacaatgatagatttcaaagtatttaaaagttcttaatagatatctatcaaaatgacagcatacaaagtagcatttggtttattctttatatttttttgccgaacaaaatcaaagattcactgctccaagacatgatccacttgcttgatagattaatttcttatattttccttgtttatgcatcaaaccaacattaaagaaacgacatctctcttatcttttgatctttcaggattcaaatgatcatcttggaacagagcgttgaaacagagtatctttgagcctcttctaagccaaggtctttgacaatggcttcctcatccgcatctcgtgcatccaactatgatgtcttcttaagtttccgtggggaagacactcgacattctatcgtcagccatttgtacgaagcacttaccagcagaggaattgctaccttcaaagacgacaaaaggcttgagctaggtgatcacatttctgaagaactccaaagagccattgagggttcagattttgttgtcgtggttctctcagagaactaccctacttctaggtggtgcttaatggagctccaatcgataatggagcttcagatggagggaagacttggtgtctttcccgtcttctacagagtagaaccctctgcagtgaggtatcagctaggaagtttcgatctagaagggtaccaacgtgatcccaaatggctgatatggttccaagtggagcaagctcttaactgattgcgatcttcaggcgtggatcgggcaatggtatgtattttctcgcacaagctgaatttattacatatcataacttagtactgtgtcttttcgatatacatgatga

SEQ ID NO: 18745 - DNA, 1353 bp, Arabidopsis thaliana landsberg
ttttttggcatttgaaaagatggtcctgtattttttaattttgttgagcaagttgaaaatgatatataattccaaccattacgtgacacattatcagtaatagttgttttacacacaaaagtcttttcctacaatttaaaaatgtgaaaatatattagaaatattttaacattatataaatttaatactaaaattcataagttggaaaataattatttgcatgaagttctattacctcaaggatgtcagatgcaataaactcccaaatatcattaactaatgtagcagttctcaaagtactattatatggttttatatacaaatcaatatcatgctttaagagtactaatattaagccgacaaaaaaaaacattacttcgctttaatgatataatattaaagctgcattatttttgagatacgtaggaccccaagcgaagaagcagagatatgatgataacaataaggcatgatatgatgatgatgttcatcatgatactgatgatgatgatttattaattattatgatatgatcattattttatcagcctcacgagcgcgtggattctaccaattggtcgttgtttttttaatcctctcaatcagtcaacggtcaacgatcgagaaagccgctttcgtaatgaaagccacattacaaaaagccaattacaaatgtcaaatgaaaacagatcaaaacgttataaattatagtaaatgctaattttaaattaagtaaataataaataaattaaaatttgaaaataaatcatcaaatattaaatatatttaatatttgaattcatatatatttgatccattttaatatccttagaccctagtcatggcttatcctaactttttcattaatttttttttaactatttagataaaattaaaaaaatattcataaaatacctttttcaaaaaaaacgtaacatgatcgaaggcaaagttcaaatagaatttggttccaacagatgctgacaaacaaattgtaccttgatatattttgataagaacacttgtcatgataagaacaatgttatcgttgcttcccatccatggtatttttcttccaattattctgcttgttttgcccatatggtggcttaaatttccattctactatatatatataattaaaagaatgattattaggctaaataaacgtacatcttattatataatcaaaagtcttagtttcttattactaaactaaagagattattaaagtaaagagagaaagagttcgggaaaaattacgtacctttctaataataaagttaggataactctttttaggatggtctttctctgttctttttggtcaaggaggatggatctattatgtgt

SEQ ID NO: 18746 - DNA, 1461 bp, Arabidopsis thaliana landsberg
taaagggtgtaaagcctgttgatcttgacgtggttgtgttatggctccacaccactttgattaactcgtctggccactttcccctgggctgattgaagattgacttcattattcctgtcattatgatcccattggctctttcaacaagtccatttgactctgggtgtcggactgatgcaaaatgtatcttcgtgccgatttgattacaaaattctctgaaggcttcagaatcaaactgtgttccattatccacagtgatagccttcgcactccgaagcgacaaacaatgttttgccagaaaaacttttgaatagtaaatgaagttattgtagctaatggcttcgctcgatccacttggaaaaatattccacagcaactacaacatatttcagattgccttgagccggtggtaatgggcccagcaaatcgaggccccacctttgcaatggccagatgggttgtattagctgtgtcaaagacgaaggttgtttttgatctcttgcacatttctgacaaccttcgcacttttgaactaattccgctgcatccgaagctgccttcggccaataaaacccttgacggaaaacttttccaagtaacggcctagatccaatgtgagatccacacaggcatgcatgtatctctttcatcaactctatgccttcggttctagataaacacttgagtagcggacacaaactccatgcttgtacaactccccttctatcatgacatatggacgagctcttgcctctatcctcctgttataagtttcgtcatctaaaaggaatttaccctgaaggtaagagatgatctcagttctccaatcttcgctataaacaggagatatattgaggactgctctttcaagaagttccaccgaaggcctgtttattgtttcgaagaatacatccgaacgtacagggcagccccatgtgctgctgacattagctagcaaatcagcatgctcattttgtcctcgagggatatttttgacagaaaatccttcgaaggaagcttcaactcttcgaaccatatccagatatttttcaagcttcggatctttagccttgcaactcttgtcgatatgacccgaaacaacctgggaatcagttttaagaatggcccttctgattcccattgcttttagcttccgaagacccaaaagcagggcttcgtactcagtaatattgtttgtacaactgaaatcgagtcttgccgcataacaagttttaactttggatggcgagaccaacacagcagctgctcctgccccgaaggttccccaagacccatcgcaaaacactgtccatacttcggcatccttatttgtttcttcatcctgagcccctggcgtccaatcagcaatgaagtctgctaacgcctgggactggatcgaagatctatgcacaaaatcaatgcccaattcattgagctctgcagcccattttccaatccgcc

SEQ ID NO: 18747 - DNA, 698 bp, Arabidopsis thaliana landsberg
cctaaaccttgttatataacaggtaaagagagatacaaaaagtttgagcctttatcatgttttgagtctaaaagcttgtattgattagtgcttttgtgggttttgaatgttttagggatgaatgttcttgccacccggttaggtactttgcgattctatcgatgcagagatctggtagtggctggtttgagactttgttaaacaatcatactaacataagctccaacggggagatattttctgtgaaagataggagggctaatgtttccaccattttcgagactcttgacaaagtctataatctagactggttgagtagtgcctctaagaacgagtgcacttccgctgttggcttcaagtggatgcttaatcaggtaaagtgattgttattcacggacactgtgacatatctttagtctttcttactcatatgttttcgactcgtctctgtttccatttgagtgcttgaacaaagagattgctatattccatccttatctgttggtcactgttgcttataactaactacttgtgaatttaaagtgataagatcttgttctgttttctagataagagcagcaacgttttcgttttacaaaagatgtgtgttgagaataggacaatttctcaataatgtgtttgcttttgctatatactttgtaaagttgataaacacgttgcagggattggtcttagag

SEQ ID NO: 18748 - DNA, 2074 bp, Arabidopsis thaliana landsberg
agctccgagtgttacttaaatgtttgtgtggctccaataaaaaagttaataccaatcatgaatcatcaatatcgttacaaaatcagtaatcagtttcacccactccgagtgttagtgaaatgtttgtgtggctccattaaaaaagttaataccaatcaccaatatcgttacaaaatttgtaatcagtttcacccacttcttttcgtcttgttactcgatatagcctcacctttcaagtgtctaatataacactttttaacaaaatattacaaaacaagaaaaattatagtaattagattaatcatatgtaatctattacatatagtaatttgtattagtatcgtttattgtgttaccattcaaacggtataatctatataattattagcaaaacaaaatatagttttagtaattaataaaattaatataatgatagtgatattcagaatgtggtatctaatcatgtaaaaatatataataataaaattagataaagaagaaattggtaaaaaataattaatgagatataaaaggaaaacaagctgatacaagcatttcacccaaaaaaaacaagctgatacaagcaaaaaagaattagtaactttgagctattgccatatgtgtggacatttaagatttcttgtattttagaaatcttatatatttccacaatatatttactactttcctttattatttgtgttaatctcccgaacattattatttcaatactatctgaaaaacacatttttttttataaaatttgatgacgtaggcgagtggttctttgtttttactatgtaggcacgactttggtaacacctactaattaactgccaaattttaagttttgagaagtcggaagagttcaaaccagttttaggtttcgatatgtctacatagttcaaagatgatgtagagtggaggttctttctgcaatagttcaatccgtatcgtaggggaggaaagatagttttcatttagcaaagaaagtgaaaactaaggcaatgcaaaagtagcaaagacgctcgtcatgcggtacacgtggcaatcttgtcttcaaaacgcaacgtttttattcacatatttggtttttttgcatcactctcgtttacccccaaaaaaaaaaaatatctggcccgacgaagaaaaagtagataggcacacaaaatagatagaaataaagcgagaataggaaaaaaaaaaatagaaagagaaaacgcttagtatctccggcgacttgaacccaaacctgaggatcaaattagggcacaaagccctctcggagagaagccatgggaagaaaaaaactagaaatcaagcgaattgagaacaaaagtagccgacaagtcaccttctccaaacgtcgcaacggtctcatcgagaaagctcgtcagctttctgttctctgtgacgcatccgtcgctcttctcgtcgtctccgcctccggcaagctctacagcttctcctccggcgataagtacgccttttccttacctgggttttcatttattcccccttttatcttctgttttgtgctcttttacttttctgagaaaataaaaataaaaaaacaattaatataccgtttggtttttttccggcggatctcttgttgtttctcggttctgtgtttgtttgtgtttttttctgcgaccatgatagatacatgagataaccaaatttaaggaagaacaatgtcgtgaagaagctttttagcttctgacttttgttcatttctctctctatttcttaaaaaaaaaaattctgcatggatttcattatttccttggaaaaaaattgcatgtccttcacgatttgtttgatacgatctgatgcgtgctcgatgttgttgagtgaagtttcaagccatctttgattgtttcttacctttagagattccttaagtttttgtagagttaattatatatcacaagactaatgattaatgtctcttttcagagtgattaaaattcattggatctctcggatttgtatgcaatgcactttcgggagatctatagagttggtatggggttaatgctgaacaatgtatatatccacattgtgcagc

SEQ ID NO: 18749 - DNA, 625 bp, Arabidopsis thaliana landsberg
  unsure (1)..(625): unsure at all n locations
gaggagttcatngaatattggatttacgaaggatttatcaaggaaacagagatgaagatggaagtaacaaccatggtcatactataattggttcgttagttcgtgcgcatctcttgctggatggtcaattcacatcgatggtgaaaatgcatgatgttttacgcgagatggctctttggatagggtctaaagttgagaaagagaaaagaaattttgtgtgtcaattctggtgcacagttatgccaggtaccaaatgacattgaatnnnnnnnnnnnnnnnnnnnnnngtgagttcttttggtttatgcaagcccttgtcgtcttggatcaagcatagaagaattagtagatttcaagggagctactattgctcatttgaggaagctagaatcccttgaagtaactaatatgcatgcattaaaaacacatttgaatcctctggattttccaaacgtgagacgatgtgttgtgaaaaatgttgaaaacagcccaaacctgccactgagttctgagaaacgagcatgaataatggatgcaggggccagggatttggagaagaagacattttaaaccaaaggatggtctctcactttcaagtttgaatgataaaggcagtcacatgtgt

SEQ ID NO: 18750 - DNA, 1455 bp, Arabidopsis thaliana landsberg
gcaactttcaaaagtgcaaaaacaagaccactttttcgtaataagatagtagcaaaaaagcacgactattccataaaactgtccacgtccctccagaaaactccccccacatgcgatttgccacgtgtccccactcaactacacacaaagccattttaaatcaaattattaatcaaacttaaaaaacgtaatcgtgtgctgatgatgatgatgacactgtcactgcctcaaaaacctctataaattagtcctcttcaccgaatccttgtaaatcattactgtacttttctctcttaacggtttctttattattcttcccattctacccctcttcttccttctaattccccctcaaatgccactgtcttctcactaaactccaaaacccaccggaaaaaatgattacgtggcacgacttgtacaccgtcctcaccgccgtggtaccactttacgtagctatgattctcgcctacggatccgtacagtggtggaagatattctcaccagaccagtgctccggcatcaaccgcttcgtcgctatcttcgccgtccctctcctctccttccacttcatctccaccaacgatccttacgccatgaatttccgcttcgtcgccgccgacacgcttcaaaaaatcatcatgctcgtcttacttgctctatgggctaacctaaccaagaacggtagcttggagtggatgatcacaatcttctctctcagcactctcccaaacactcttgtcatggggatccctctgttgatcgccatgtacggaacctacgcaggttctctaatggtccaagtcgtcgtcctccagtgtatcatctggtacacgcttctcctttttctcttcgagtttcgtggcgccaagatgctcatcatggagcagttccctgagacggctgcttccattgtttctttcaaagtcgaatccgacgtcgtttcgctcgacggccatgattttcttgagaccgatgcagagataggtgacgacgggaagcttcacgtcaccgtgagaaaatccaacgcttcacgtcgttcgttctgcggcccgaacatgactccacggccgtcaaatctcaccggagctgagatttatagtctcagcaccactcctagaggctctaatttcaaccactctgatttttacaacatgatgggtttccccggtggtcgtctctccaatttcggtccggcggatatgtactccgttcaatcatctagaggtccaactcctcgaccttcaaacttcgaggagaattgcgccatggcatcctccccgagattcgggtattaccctggaggaggagccgggtcttatccggctccgaatccagagttctcttcaaccaccacatctaccgccaataaaagcgtcaataaaaacccgaaagacgttaatacgaatcagcagacgactctgtcgacgggcggcaagtcaaactgtcctgacg

SEQ ID NO: 18751 - DNA, 3246 bp, Arabidopsis thaliana landsberg
  unsure (1)..(3246): unsure at all n locations
acgaaccagcgttcaaggacaaaagtattttctggctaactccctcctcctcgctctgctcgtttcctcctttacggcggaccagaaaaccaccgccgaagactattttggatctggacttttgttcactcttggaaactcttcaacatggacttcgttgatggcaagagttctctctcttggaccatcagatgtaccatcctcaatgaaaacatcgacgacgcacggtgattccttattcagagtgacaaatccttctcaaaaacccatgttttatttgttcaccgcctccgccgcaaataatgtcaatagctttctaccaacgaatcttattacatcgagggagcataattcatcgcaaatctatccttctgctttgatcaactgctgcactctctttccaccttggtcagcaatcacgaaattagggtttcacctaaagggatttgtccctagattcggcacattaacacgtgtgaagcccaagcccaacaacggtatattcaggtctgtttcaatttgtactttgataatctctggtcgacattatgcnnnnnnnnnnnnnnnnnnnnnnntgagaactaattcatcttcgttgatatggattaacaagtatcttttgagaactctggcttatgattcataaaaccaatttgttggatgaatgaatgctatcatggaagatctatgcctaagtttccctctataataataccatctaacattttcaagtatcatccaacttccaccatgactaagtttcggatcatgttctttgaagaagattttgcttgtcacaagagagatctgagttgtgtcacaaagcaatctgtatccgactataaacccatagtctctcgaatcctagatgatgctctactccctatagagcttctcgtgccggcgagaatcacagctttgatttcttcatcaacatcactatgtcgatgcacactgaccaccatgttttccatcgatttgttcgtggaagatcgttcgactaaccgtgatctcacatgtgataaaacgcaatctagtctttgtctcaaatctctcgtggaatcattgttgatttactttatctattttgttttgacattgaggaatgcctttctttttgttgtcttaaacctttggagctttgccttttatcgccttgtagttggattatttgaatgagtgaataaatataagaggaatatttccttattaatcagataaagtatcaattcctaatttctgctactctacttgattcttattttactctacatagaaatataagaaagattttttttaagaaatacaatctaagcaattttccttactattttcactttaattctccaaagaaaaaaatatagaaatacatacctaatatagttcttcctaacatatttcttctaaatatacacctaaacaaaatctaatgcaaccaaatattttcaaagttgctttcaattttatatcatagatgatgtgatcatggaaagcacaaaggacttggaatttgatcaagagcttgtagccgaggaagagctgaagcagatgagcagcttgaacctgaagagcattttgaagcagaaaatgtacttatagcggagaaagagtatgggaaagatgttatcttaacctcattggttttgatacatgatcatcaaatgggcatgtgtctcatttgtactctttttcccttgtcaagttttgtcccaatgggtttttttcataaggtttttaatgaggcaaatgattcacattcaaatcacccatttgatgatccaaaccatggtataactttcagaagttggtctcaaggaatatctatcaagtccaagtcattttatgcccattacaagcccaagaagagcccaaaccaagtggttaatttatggtcaagaggagtgacgaaaatggaagtttaagggtcatctttaaagtcaaagagtcttttctattcaaattctatctttaatattatgttgtgtttctaggcagccttggagtatgttccaagacttgtctctttctcttcttttcttcttctctttataaactcatgtaatctcttatgagaacccatctatctttttatcaaaaactctcttttaaaaatagatcatagatccatttttgtatgtcgaattttgatcttttctcaacttatcaaaaggcttttccgcatccttttgtggcgtcattcaatccatcatctcgtctttgagtcgtgtgtcgtctctatttcgagaatatccactccagatcttccaagtgccgaaattgggattgattcctcaccaggatcatatcatctaacaacaattgtcttgccaggataggtatgttattcagtaaatggcagattagtaaataatattaaggttgctgactaactcaaacagaaactaactagtaacagtcctctccgccttgtgcttaggtcaagacgaggtggcacactactactcagacctggacagaccgctgtgtatggcaccaatgaacacccccaaaataagtagagtcaacaacattgttaggggggagattgttgcaactgaggcacaagttaatgagttaaatacccatgttcgccggaggttggcagatatatatttgaaagaaacactagtgccaacagttttgtatgatagggacgccccaccatatttcgacgaccctggagaagaaggtaacacatgttaggatattatatttattagcatctatatgttagagtatctgataattgtggattaaaaatattatcctataagtcgggtatttatccagtaaaccttaacatatctctatctctgtaaatttcagattacttgcatcgagctctaaagtacgcagactatgaaggggtcgatatcttcatcggaagattgttcaagaacaaagaagcctgtgcagcaaatctagctattcatgcgattaggcaaaagtttaacttcattactgtcaaatcttgccccaacattgtactcgcggtgtgtgtgagtcatacatgtccgtggcgggtttatgcgaccaaactggaggacagtgaaaggttcgagataaagtgtgcaacccagcaacacacctgcagcgtagacgctagaggagatatccacaaacaagtgtcaacagcagtgatagggcaactcatgagaacaaagtaccttggtgttggaaaaggaacgacgacacgaactgagattaagtaaagaatgttaagggatgagttcagccttaacgtct

SEQ ID NO: 18752 - DNA, 680 bp, Arabidopsis thaliana landsberg
tatctcaccgccacctttatccgccctaaaatttgcataaaacttgtaagtaggaccacgtccctgccataactcacaattaaatttagttttcaaaacactatcatgaaaacgaaattcgtagatttgtactccaggtctcaaatagtggtagcctaggtcgtcgtcttttgatgtacaatgaatcttgagaacgtttttcacaccaagagaattcttaaaaactacagaatttttttctctgaacttcgcattactcaatcctgcacataacacaataataataaaagaaaacgaaaaacaattcattgtttcttagatttacttgttcttttgttttaggggctatatatatataagataaaagatgtttagaaaagaaaaaaagaagaagataaaagatgatattttggtgctattttgggaaaactcattcaacgttcaacttttacgaggtgtatgtttcttaaattgacttgaattataattgagacaaaaaaactgaaaaagagatatgtttcttaaattgacttgaattctaattcagacaaaaaaagagatatgtttcttaaattatgtttcttaattgacaggttgtacagttgattcttcagttagaatttcttccattaattggcaaattattggttttgtggacgaataagatttattgtaaagac

SEQ ID NO: 18753 - DNA, 179 bp, Arabidopsis thaliana landsberg
atcaaggaaaataggttgacgtttaaacgccttagattgggtgttccaagcttttttaaacgctttagatggatcaacgtcgtcgtcaactacgacccccattgaataaagatcgaaattcatcatagcgatcatcatggactcctcttctcttgttgctcttttactaatgtacaact

SEQ ID NO: 18754 - DNA, 1675 bp, Arabidopsis thaliana landsberg
gggaggatccctctctcaatctatgttctacagagagtctgcagcccacttttgttgacaaaaggagaaaccaacacatcttattttcaataataaacactatttaatttttcaacaaaaaaacactcctttgactaagaattagtgaattaccacatgtgatgcaattctagaatacgtggtaacagagattatttacactatgttttatctacctttccggctttgagcaacaattgcaacaacgatgatgaccgttgagttccaaaactggttccttttcatatattaaggagagaatcatatctttgattattttattcgaaatcttatacaagctagtgcactacgtgtctctcatgtctcaactcatgatcagttagcagacgcattgacgaaaccactaccacgtaccagttttcaagctgcatgttccaagattggagtgacaagagtccctccatcttgagggagcgtattaaggagagaatcatatctttgattattccaatcatacctttgatttctcatatcattcgattactacaatcatggatttatttatgtatagtacatattctcatttatgtctattgtaataccctagctaacatctcctctgtatataagttctcactctgtattaataaagagatatcacttctgcaaacgtttataccaaggagaagaagtgtgagatgagaaaggttaccaagtgaagttgggatgtcaccaaccaaattgttatcagtgaggtcaagagatgtggtatgcaaaagatttcctagtgaagatgggatttgaccactgaaatgattttcagaaaggtcaagagtggtgagattagaaaggttttgaagtgaagataggatctgaccactaaaatgattatttgagaggtcaagaaaacaaaggttttgaagcctaaagatattacttttggaattgacatggccatggaggcagctggagctaaggttcagctctatcacattcccaaacttggcatcacacgtgatacgatcccaattacaacaatcgctgttattcctccatgactctgtcgtcggatgagggcttacacggctattattgcgatagcaataatcattagaggaaggcttcccaatctcaaactcgttcttgagttcgagaagtgcatccctttgttcgggaagacacaagtgcctagtaggagctgcaaccacgtccgcaaaattgtgaatgaatgagaggagaaaagaaagtgtaacagggatgatgatactcgttggattccaagagcctgtcatccttctctatgcttaattagcattcttgaatatcgattatgaaaaagaaaatatagagatttcgatggtaggtagataatttaattcgcacccatctgtttaattcacataatagaagacttatattaagatactagggaattctgttaaacgcaaagaataaaagactaagtcaagttgaatagtcaatttccacacatttttgtcgtactataaaatatacgtgcagaaattgaaaaggttgcttgtccagaaactgagaaatccatgaaaaagaatggaaaataaagagtaactctaccccttggttccttgaataagcgataaaaagtaaaaacaaaaaagaaggcggaagttttgatggcaagtgtaaactgtgtaaa

SEQ ID NO: 18755 - DNA, 526 bp, Arabidopsis thaliana landsberg
tgattatgtgcatagatcctcgatccagtcccagacgttagcagacttcatcgctgactggacgccaggggctcatggaagaagaagcaaataaagatgtcgaatcttggacagtgttctgcaacggttcctggggaaccttcggggtaggtgcagctgctgtcttggttgcaccttccaaagtcagaacatgctatgcagtaaaacttgatttcagctacacaaataatattgccgaatacgaagccttgcttttggggcttcagaagttaaaggcaatggggataagaagggtggtccttaaaactgattcccaagttatttctggccatgttgacaagagttgtagagcaagagacccgaagcttgagaaatacctggatacagttcgaaggcttgaagcttctttcgaagggttttctgtcaagaatattccacgaggagaaaatgagcacgctgatctgctagccaagtcagcggcacaggggctgccgttactttcggaagtattctttgagacaataag

SEQ ID NO: 18756 - DNA, 576 bp, Arabidopsis thaliana landsberg
acgattacctcctagggatgaattggttagataagtaccaagcagttatcagttgtgacaagaggacaattaagttggtgtccccactatgagaagaagtggtagctgagttagtctcacctgagccaagaaaaggaggttgtcatcagatggctattgatagcaaggaggcagattcactcgagactatcaaggttgtgttagaatttccgaaggtgttccaaaaagacttaccaggtatgccacctgagcggaaagttgagtttgccatagagcttcttcctggcaccgcccccatttctgaaagagcttacagggtatctagacccgagttggttgagctccagaagcaaatagatgagctgttagagaaaggttatattagaccaagcacctcaccttgggccgcccctgtccaattcttggagaagaaagatggcactaggaggatgtgcatcggttatcgagctctgaatgaggtcatgatcaagaacaagtaccccttgcccagaatagaagatctgttcgaccagatgagaggagcagcgtgttctctaatatagatctgaggtcatt

SEQ ID NO: 18757 - DNA, 763 bp, Arabidopsis thaliana landsberg
  unsure (1)..(763): unsure at all n locations
cctgacaatagataattagctgctaagtacttagttttttcaaatttcgatccggattaatcagcatgtgcgttgttctgggatcctatcagatataccaaatctatgaatctcagtacgattaaacacacaagtgtaggggatatataatacactttgatccaataatgatagggtcttgtttgtaatatgtccgttgaatcctccactgtaaaagctaatattctgttgtctttggcagctcaagagatgaaatagtactcaccctgagattatttatcaagagggtaatgttcttcaaagcattaaattcattttatcactctcgttacaatctctagaagaccaattttaagtatacaaagacttcaagcttaagcaatggctgattatttttggtttgatatttcgttgcaggctctgcagggaggaaaaaagggttttaagattggtgaaatatgttgttgtatttgagcagaagctctgaagctagtgaggaaagagtaaaggaaaaggaatatgtaaagaggcgcgagaagacataaatgaggttcctcgatctgtgttcttcatcgctcaaaatatgaaataaattgagttttgttgtctgtgtggatagattagcgtgaaacagaggttttttaaaagtaaacggtctaaacggtcttttgtgagaaagcccttgtagaagggaaacccattattcatgaaaaaaaaatcaatctttgaaaatataaaagccccacttagttgcntttctctc

SEQ ID NO: 18758 - DNA, 826 bp, Arabidopsis thaliana landsberg
ccccaccatattactctccttctccaaggttgagtacaaatctcctcctccaccgtatgtttattgttctccacctccaccaccatattactctccttctccaaaggttgagtacaaatcccctccaccaccgtatgtctacagctccccaccaccacccacgtattattctccttctccaaaggttgaatacaaatctccaccacctccatatgtctacaactctccacctccaccggcgtattactctccatctccaaaggttgagtacaaatctccacctccaccatatgtctacagttctccaccaccaccatcatactctccttctccaaaagctgaatacaaatctcctcctcccccatccttatattactaaattgatttattaaagtcataaataagatcaccaagtctcatttgatgtcccgtctattttcttcttcttgggcttgaatggttttatctgatgtcagatgaactctctggttattaaaattttatttgcatttttgtttgtttttctttccattgtgtaaaatttgtttcaatcttgaaatgtatcagttacaattatatacattgtttctttatctaaagaatactaatttacctaattaatactctctctttcttattaatctgaatttagaaaacaagttgttacaaacatacaattttttatgtatttctattagttattaatgatgaattctaagcaaaataaaagaatattactggtttataataatgaaaaatgattaattaccaaaaagtgatttatttataatcaattaacatatttgcttatttgtttaaaaaaaaa

SEQ ID NO: 18759 - DNA, 973 bp, Arabidopsis thaliana landsberg
agcatcggacctacaatattgttctcactgttaacaagaatcattgtaatcccttctgatctctgggtgtaatgatacttagcgcaaaaaagacagctgttctggcatagagatccggcttcacacacgatccacattgcttctgttgcatataacacacttttccttggagagtttatgcagccggactgggacatgtttcatatacgttaaattgattcaacatcaacaaaatttctgaacttgtgaatgaatctatttgtttctcactgcagagtttgcacgcagcagctcgagcagttggaggatgtgccatttatgtcaagtaatcataaggttcactaacattttacaaacaaattatcatagtaaaatgagctgcaagttaataactctagatccattcaaacttgttaaacagcgacaaaccgggacaacatgacttcaaccttttaagaaagctagtacttcgagacggttccatactcagagcaaagcttcccggaagaccaaccagtgattgcttcttcagtgatccagtcagagacaataaaaggtatctcgttttcctttacttggaagagaagaaagcttaaatcttaactaactgttgtattatactttgcaagtcttctgaaaatatggaacctgaacgaattcactggcgttattggagttttcaactgccaaggcgctggatggtgtaagaacgagaagagatacctaatccatgaccaagaacctgggaccatttctggttgtgtccgaaccaatgatgttcattatcttcataaagtagcagcctttgaatggacaggagattccattgtctattctcatctcagaggtagtacgcaaactcaaacatcagtctaaattactctgattatactaaaaccttcacttttttttttcttttctatcaggagagttagtgtatctccaaaagatacatctttaccagtgacattga

SEQ ID NO: 18760 - DNA, 471 bp, Arabidopsis thaliana landsberg
gtacatggatcgatggacgagtatggcatggttatttgtggagagtggttttgttcttcgaatgtatgttttgaaatcggagatatataaccaacgtgtctgattggatgtaccaattcatgagggaataacattggttacgttgaacgaagcaattctgcaggagtttggcgtcaagggtgttaatcctctgttaagttactctgtaccgaataaaaacatgtttgcaacaaaggataagactccaccggttctggttacaagcgaggttggacttcaatactatttaaagacccttagagaaaacatgggtctaaacttgtttgtgaagtttgaagagaaggttgatacaccaaatttgagttgtgaaacactaggaggtagtgcaaaacggaaagttgaaagtttgtatgatacagctagtggttcgagaaatgctgacacaggttctggggatatatcttttggtgt

SEQ ID NO: 18761 - DNA, 1095 bp, Arabidopsis thaliana landsberg
cttttagtattcaataattcttttttgttttacaattagtaatttactatattactcctatttacatttttaaaaaatatatatattattttttagttttaggatcgccatctattgcatatatttatgagagggccttgtgcaaaaaaactcttaaagccgtccatttttgcaactttatcttccacgtctagaaaatgcaaaataatcctatgaaatgcaaaataataggcaatatagaccatttttgcaactttacatatattgtcaacattatagatgatctcctcatgatcacatacatttgattttgaaaattctgaagctataggtgaactactcatttcgagggcttgaatttgatatattatttatcaaaattttaaaatttgacaatatctaaaaagaattatactgcgtattattttggatttgatatgattattttgcaaaatgaagggtatagttgcaaaaatggatgagtttgagagttttttgtgtacataacccttttttacaaccacaaattaattaaaaattaactctggttgttatataattttcttttaatttgtatatttttatttttattttcagaaaaacgatataattttttatttatcaaaacctaatcaatagatattacgataatgccagttactaacattgaaatcatgttttatttaataagattttaaataccttaaacacaagagctcacctttctttgtcttaatctcctaccgggttaacataaccaagaaactatattagttgtcacacaaaagtttctgcttcatctgaaacaaatatctttgcaatccaactgatgaaaccaaaggaactcaaaatgtagcatcatccaaacttttctgaagcaaaagtgacaagttaaaagcagaatgacattggctacattttatactaaaggttaatatagaaagaaggaaatagagaatcgtgataacaaacagcaacaagtcagactatgtttgattcttaaacattgctaatacaacagcttccaatgaacgaaacagaagccttgccctgtgttttataggttcctggacattaataaaatctttcaaatat

SEQ ID NO: 18762 - DNA, 571 bp, Arabidopsis thaliana landsberg
aagtgttcttgagtattattaataaattcagtatgttagaagagaaaccaaatttttaaaatcttgattggtatgaaaatgattcttggagaacataaaccaaaaactctttctaaaacttcaaaacattcaaggcctttgtatcaagatgtttagatggattgattgtttgggctcttaggctctctgccatcaacatgggctgcatttttttgttggaccaagttttctctacttgaatttgggccataaattgtccctgttttattttgattccttagtattttttgttgacaaaggaacacgtatcacgagttaatgacactgacatgcatctttagtagtattaaaatatcaaatttaataataaacatacagcgatacaaaactgagtcacacacaataaagagccagtctatatgaattaataatttattaattgattacctatctatgcatctggtgatgtttgtgatcgactccttcatcattctttgttcaatatttctccaagtcatcaaaattatcgccgtcaaatcaaatcataaatctttgcttctccaatttgtag

SEQ ID NO: 18763 - DNA, 784 bp, Arabidopsis thaliana landsberg
cccaacccgatgcccgaaccgaaaaatttgggttaggacaggttagggttttaggtaattacctcattggataaaatttagtaaatccgtagataccgagtcggtccaaggattactcgttacctaaacaggctacccgaaaacccaaacataaatttaatatccaaaatgttaattatatttaatcttaatataatctaattatctaagattataattataaatctaaatatgtaaattaattttagacctaaatatccctaacaactaaactatttaaaaattatttgttatgtttgtcaaaatttagtaaaatatattcaaatatgattaactttattaaaaataacaaattttaatgggttttttttgtttgggtacccactatctacatagaatatacttgtttctatttattttggatatttttaggacctgaaactttttacccaagccaacccaaacccgattggatccgatccggatcagaaccgaatatttagaattacccttattgggtaattagtgtgtgctaccacattatattacattgaactcactgccttttttagtatatttttttctcttgaaaacaataagacaatttgttcagttgttgttctgatcaccagaagaatcacaaatcagttcttttacttcaagaactcggttcaagttatatggaacagatgaagccaaattatatttaaacaaagactatttaagaaaaagaaaaaaaatgcattatacttatttctacctttttggataaatattaattttt

SEQ ID NO: 18764 - DNA, 3442 bp, Arabidopsis thaliana landsberg
  unsure (1)..(3442): unsure at all n locations
gaactattgcagttttaatcttagatttttatgttaataagctcatttgagcataaaccattcatgttttagaaatgtctttagtcgggtgtccttgaatgaaccaaactttgcattgttgctttgctgcgtggattgatcttgaccctgttataataaataataatatgaaggaaccagcaacgccatggagaacaacctatttatctaaggaaaagctcactaagttcattgatcatcatcaagttcgaaatagattaagcaaaatcaagatttgaggatcctccaggtttgtagacggctgactacggatttggtttggtgcaagagaccatgctttggactttccttatgtttttcattctctttccctcttcaattgattctaaatctttatatatagaaagatgcatgtaaaggcaggataacgtttttgatgcgattatgcatttttcttactaatcattcatttactttgcatattattagacgagaatttatgttaatattgagttgtactttttggtcttttatatgtatatcgtagatacatgttctaggttaaatcctttgtataaatacagctctaggagcttgagaagaaatcagagaaaacttttccaaatttgtgtgtttctctacacatattgattaccaaacgtaaaaagaaattctgcaggatttaagttttcacctaagaatataaataacaactccttatgtgaaaaataagtatatagctgtttattttatttttccattggaaaaatcacgtttcactatctcttgtgtgtgacgagagtgacgcgtcttagtgttgattcactagaacaagtgagattgaagtatacattcaaattagaagtcatggagatttccttgaaagaacctctctctctaattttatctaaagtttttaaacgatgaatttggttttaatctttcgctgagtattttattattattcatagtacgcatttcttaacaaatttatgaaaaatacatgactaaaccattttaaaaaatagttaataacctaacaaagacgataagtcaaaacaatatgcatcccatgtcaggataaagttaaccaaattttaaaattgttgacatgaaaactgtttactagttttgcttcttagatgatgttttgagatagtggaaaacaaaagagtcaagcaagaaatgggtagcttgcaaaatacgaaatgaaattacaagctttcacgcttgaaacaaatcttataagttttgttcggattaaacaattatttcatatgtgtaagatctaagacggaatcaggctacatgaatgtatgattggcaagtcggcaactaataaagtcaacggaaaaatctttgggaaaatcaaatttgaaattaaggtgctcatgacatcttagcatgtctttattagaataaatggaagcaaatgtttaaaaaagaaaaaaaaaagaaagaaaaaaactattttaactacaatgaaaatagttaatttgggctaaacatctcaatgtaataatatctgtctagtaaaattatcatagtaatttgaaaatttactctaatgcccttttctcaatgtccttttgtaactgtaccctttttcccattttcatttctaccctttctaatacttttctcccgaaattacccttaatgagctacccacagacctaattcatttcttcactctctctcttcttcctccatcggaaattgtgaatgccgttgaatcccatgccgtcggaaatagtgagtttactcgccgtgaaaacccatcttcgccgtcgtaagtagagctgtgtgtcgccgtcgaatctcttgcgtttcccatgtttgattttataatgttagcttaaatctttattttcgaattggtttattcaatttttgttgttgattatgtgaattcgttatttgaatcctgattcaatcgacagtttgacatttgcttcagcttcgaatttgaattttgtttgagatgtgatgattgaatttgtttctaaaatccttgtacattcgttatactgttctaaaatccttttgaattcgttatactgtttcgtgatagatttgcttatgtgaattcgttttactatttcgtaatagattttggttctgatttagtgtttacctcttttacatatgctttcgagatagatcttagccacttacgctttaaaacgatttgtaaaccatgttaaccacttttcaaagcttttaaaatcccttgtaaattattctattctacttacttacgctttaaaacgatttgtaaaccatgtaaaccacttttcaaagcttttaaaatcccttgtaaattattctatgctacttacttatgctttaaaacgatttgggaaccatgttaaccacttttcaaaacttttaaaatcccttgtaaattccagcattttcctttgatacagaaaggagccaatatgcacttggtttcttcctctattatcagcttactgatttcttcagactgaaactgaaatccctctttgttatccaaaaactccatgtatgactcatcaatcacatttaagaaagacgatccaacaaatacaactgatttgtttttgaataattctggattgctttccttcctcgttttcatcaactccaaagctgcatcaacatgctaaacacaacaaaaataaaaattatcatattagaaaacccctttaaaaacgattgtaaaaaatgcaaaccctttttaaaataccttgtaaatcattatacgccacatacttatgctttttaacgattgtaaatcaagttaaacacttttaaaagcttttaaaatcccttgtaaatcattctatgtcactaagttctgcttctaaaacgattgttaatcaattaaaccctttttaatagcttttaaaaaatcccttgtaaatcaatccttaccactttctaatccgttaaaaacgattgcaagtcatgtaaatcctttttaaaataccttgtaaatcatttttaccactttctaatctttttaaattgtttataaaccatgtatccctttttaaaatccctttgtaaataacttaatgatgctttaaaaactatatgtaattcatgggttaccaattttacaaggatttttagacataccgttgctgttattgctttccctggcgtctctagggttgtaaaccactttgtatctacaatatttcccgcgattgatagtggcctacaacaacaaaacagtcaacaatgatgcttcttccattattaaaaaaaacttactatcttactaacaaaactcacttgtttttccttgacttcttccattcagccaatttctcannnnnnnnnnnnnnnnnnnnnnnnnnnngatgcaaaattggatgcttcttcttctcagttgtgaaaggtgcttgggtatgaatggaaggaaccgtaccccgcttactctttcttt

SEQ ID NO: 18765 - DNA, 5700 bp, Arabidopsis thaliana landsberg
tatgtcttccttggctttgagcaggatgagatcttattgggaacttgcttgtcgagaaatcggatcatccttgttgttattggttgtagattaggatcttctcgcattggtaactcaatctgttgttatacctctgttcgtgtttccagttgagggaaagctgtagaattataatcacattcattaatatcttctcactttttagttattcttctctccgttcaatcataagattcttatgagaattctcgtaagtatagagcaatctttggtttttacgtttatcaatttttacaatgagctagctataaacaaatctgttaaatcatataataacatggtacaaagttacaccaagctgtaaaagatagaaaggtataatgttagaaaagttagcttaattcgtctcatgtcgtactacttggcttatgtgtgtcacgttacttcacgtatactacaaatatgttttgtattagttgtagtctttgataaaaattgtaaaaaaatgaagttgtaggccaacatcacttaattagaaaatataaaagttggtaatacgatcgtgcgtgccacagccaaagttgcacgctcatataaatgatcatgttatagttgtcaaataatgtaaaatataagtagacaaataatcgtcgtgaattacaacaattaattcaagctcacatatctaaaagcaaaaaaaaaaaaaaaaaaaaaaataacgattgagtttcaaactcaaacattaacattaaaaagtagttttcctttcaaaaaactttttgtaataggctttaccacttaatttccatggagggcatttgtcaccagccttgaaatgcattcttaatacctgattatcatatgaggcacaataaaaagaacaatatacttgggtgaggtaataaatcttaataatgaatgaaccagggcaacgactatgacagtagttgcaaaatggtcgtgtagatctattgttaggtagcaattcaaattgtccggctgttcctccttctttggcattccttatatctccaagtacacacaaagtatgcaatgtgacaccgcaatcgtaacaagtgtagaaccaattctttggatttattcttctttcgcaaatatgacaccaatatctgccgcttgcatttacttcaccatagcaaagagtaagtggatgatcatcataccttggaagcattaccgttggtggcatagtagcacaacgaaaatccaaaaagtaattacatttgatacaacccaggaagactgcagcacggtcgctgtcgcagctcatgcaagttttatcgttaacttcttcttcttttatgtagagtaagggatgatcatgacttccatggataaaaggcaaagtaatcgaactgcattgtatgtcaaaatttgcatcgatagttttcatagagtagaagaatcctccgaaaataacttgatgacaagctctgcatgtatggtcatcgttgatagcgctttggaagcaaagagtgagaggttctgggctcagaaaatgtcgtatcttctttgaaatattagcacacgtttcgtggagaacgaaactgcaagatgattctgaacagttgtagaatgtgtcggtaccgatgggacaaacacatgctacacacaagatgctcttcttcaaagtaataccatctttgctcaagttatgttcatgagtgaaatgagtgatggtgttatcatcattcctcttaaatggctcaatatcttcaacttcttcaagtactccatcaagctctcttccatcccatacatctttccttgttgcacacagtgaatgcatagcataattaggacaaagagagcatgaataagccccatatgaccaatcaatttcttcccaacaaactccacatctccattctcctggaccaagaggatacttgtacgaaacgcggtggtcatggtggttgacatgaatgatacgaggtaatttagcacactcttgatggaagatcatgaaatcgcattgaacacatgcatagggagcacggtcgcctttcatcccacaagcatcacaaacaaaggagatcaatcttggcatgagtgtgagtgtatgctcatggaccttcatatttgaaagagcaactggtatgggttctcgaatcgcacaacgcatattcaagttgaacttacaaatatcacaatgatatagtaagttcccagtggcatctccacatatatgacattttaagtttgtgtaatctggagctccattgctgagaagcttaagagggtgtctgacatgagaagggtgagtaatctctggtgagtcaaatacggaggcacatccctcatgaatcatgaacctgcaacgagggcaacaatagtctatgccgctggtattacaaaagtcgcaaggcatattagctccgcgatcaaccttgattagagggtggtcgtgccacggcaatttcagaggggatcgagcacatatgtaatcaattatgcaatcaatatccacattgagtttacaatcagagcaatgataaagaagacgcttggtctttttaccgcagagatgacatttttggtcggtgtgatcaggagctccagtcgtaagaagcttgagacaatgtccatcatgagaagggtggtcgaatatctcttgtatgtcgaacataaatacacatttcctgtgaacagtaaacttgcattcaccgcatgagatgacatccccaaacgatcgatcgcaagcatcacattccaaaccatcacgatgtttaatgattgatacgtgatgctcgtgtccttcaaagtacaaactcattgtttgcagaggtggagagaatgcaagttagtgtttgggtaatagcactttggtttcttgtaataattgatcaataaagtatttcctctgtatactcttagttattatatcaatgccacttgttattatattatcatagaaattaacactgacgtcgacaaatctgtagtaattaatacgagtaatacaaatagtgggcacgttgtcagtctttgtttaatttcaacgctaatagatcgattgtccactccggttttgttgtcatgttatctctgctcttctaactttcaaaagacaagttttaattaaataacagaaaatatactatatactagtattatataatatttgatcattgaagggaacaaaattatgatagctaagattgaggtattgaatggcaacggtgccgtgaccaaactcgcatgtcaccatttaatagcaagacgattatagcaggtatgataaccgatttcagatttagattgctcaggcaataaaacatttcacaggtcagattaaaatatttttataatgaacgattgaattttgatgaattatttggtagttagagaagttttagaatattcggttagtgacccgttcgatctgaattcttttacaggtgagttctaactctttttctaattattacttaactgtattaggagaaagatataaaaagagaatagttcaactattttaacgtatgaattttggatatgattctagtgatggtataatattttgttgagattggtatcatcctactctgattttagttttgaactaatgagtaatctatggagtcgtcaacataaccaacaaatatactaatatagcgtggataaaattaatatattaatatcaatatgatgattaagatatatatcgtaaactaagaatctattaggtcttgtgaattactatctaaaataaaatagtatttgtaattaaagtttatcaaaagggaacaaattgtaacccttttaaaatatttatatcatcttactaacaatattgagatacaatataaaacttgtattttatataaatttataaaaaacaggtgcaacatttctttgacttttagatttcaaagtcgaaattatatatatcgattatagggttgtaactttaccttccaacttttctttttgaaaaatcaggtgcaaaataaaaatgttgagaaacttggaagaaattggtaaattctcaaagtgaaacaagggacatgaactcttcatctgattccaaagcttccataaactctggaacaagacatacctccaaatctatacttccccctccttctcttcccgggtaagcagatacctttccatcgaacttatgcgcatagccacttctaagcgtcactccttttcccatcccaaattcacaaccatacttattaaacctcggcgagcttcccatcataacgctcatcggttcaaatagccgatcaatatggtaaatataaggagactttagccattgatcaatcatttgagataccttttcactcgtatgttcagctactgcttgatgcactttcaaagcagcaaatccaagatcattctccaatagttcaccagcttttgcagccgttctcaaagcagagaggcagtttccgaagtaatccttgtgaagcggtggatacattcttcctctgttgtcagcagcaactctacaacttgtttctcgatcgagaggtaatctcctcgcccttgttatgcatctccatataaccgcggttagcgattggaaagatgagatggatgttgttccacatatttggttgacctttgttttaagcaattttatggtttctgatgagaaacagaacattctctccttgaggattggagattcgtaggttctgataaattcatctggatggctatatggaaggctgaatagaggaccgtatccttcagggatgtaacgctttaagactggtggattcttaagacacaagtcatcgtttttgttgctctcttgtccttggaagatttcggaccaagcggtaaagaacttccagaatgcagtaccgtctcccatcgcatggttcatagatagtcctatgaaaattccatctaccaattctgtcacctacacaaacacaagtgagcctatccgtttaatttggcaaacagaaccatatatctgagaatctaaatctgaactaaaactgcatgttgaagccgaaaatactcaatgttcggtaatacaaatgcatgtcagatattgaccatacaagtttctgaaaccgtattaaaccaaaccgaagtatttaatttagtttccatatatggtatatctaactaaatctataaacctaaaaatcctccaaaaagggatgataacaaacctggactgataagaggctcatggtgtgtccatcatggttcacagctttgtgatggtcaaagaaagattgaacaaccaaaggaacatagttggatccaacaatatctcttacacttagatccgatttggcatggataaatccagctccgggactgtcattacaatccacaaacacagagtaggatctcggattatcggtttttaaagtcgagagacgacccgcgagcggataaaaatggacaagggtttcagctagagaatctctaagcttttgtagccaagtctccatgaaatcttttgttttggttgcatcatcagatttgagaaagagaagaccattttggaggtaatgcatagagagcatcacaagatccaacggtgataaatggtatggctctttccatttttcagggatggttttgggtttaacaaagcattgagaaacgatttttacttccgataaagtagaatccatataaagaacaagagtgtctctactttggttctgtttctttgtttttcttcttctcctc

SEQ ID NO: 18766 - DNA, 733 bp, Arabidopsis thaliana landsberg
tttggtctttgaaatacatgtaaataaaagtgtgatatttacaggtgttactatcggtgtacctatgcaaaagaccaaaactgcaatgctagaaagcgggtgcagatgatccaagataaccctccagtgtacagaactacttatttgggaaaacatgtgtgtaatgcttttgcagttcataatgatacgtatggttctgaaatgataaaattcgaccaagttgtatctgaatcggttatgcctcaactcgcaacaattgacgaacaagcaattatcatggaggacgaagccatagaccatatcatgaaccaagaatgtgatattaatgatttttctgtggatgatgacccattttgggctagtcaatttcctccattttcatcggaagacatgatgttttttgaaaacattgctaatcttgattagaaccctttccaagtttttttaatgttcccatgagggagattgatcaattcttcatttcttttcaggttcatgttttgtaattatagattcatatgtataactttttttttttcgtgtaaagttttaacgagtgatgtatttcaaaatgagaaaagaaaaggagaaaataatatctatctttgtaaaattcctaagagatataataattaagtagcccaaacgatgtgaaatgtcgcttaaatattaacatactttaattatttataggtattaccggaatatgattattttgtgacttataataaat

SEQ ID NO: 18767 - DNA, 3022 bp, Arabidopsis thaliana landsberg
ctgcaggtcgactctagaggatcccccatgatttttgcacttattacagagcagagtcctttgcatctttaccgcgcggtacttgttcgctatcggtctctcgcccgtatttagcctgagacggaagcaatcaacggtacaaagctgccaatggtgatccacaagtctttcaactcttctctttcatacttgggcttagatcccgttccactggggaagccaaacaatccttccaagcgcttgattgataacctatactcatgaccatacacagaaaatcgcaagaatcccaatccttcacaatcgcaagaatcccaatcccaatccttcacaataccttggtagagctgtacttgcagcgtggagaggaattgtattgtctcatctttatacgctacatacggataagccatcagagtgtccagatgacaactttggtccaggtgctgaacatcttccaacaatccgagttgtgcaagtgaggtcgagcacggatacctcgtgctacagaactcattcagcttgaaaagcctacatatcctcagcaggcaatacgtcgggcttttgcagaagtttggtagctctgcgagtatgctcaggcatgtactcatctttcagatcttcgtctataagctcatacctctctgtcatcgctctcttccctcgggctatcttagcttttcttctgaagctttcatattctctttgttttctctcaggccttgacgatgacgactctgtgtcatccatgttgtagtcaggatcaacagaagaactgccactgtaattgctcatgattcccctgtagaaatctagaactcaaagctcaaatgtcaataggttagtctcaaagatagcaatgaagccaaaattgttatcaatatgcaatgaaatagaccctattggtcgagtacaatcttgtactcgagtaacctgagctgttcctgagttacacttactcgaattgaatcgattcgagtagtaaccgttggttgagtaaactctctgaagtcgagtggttggttgcagatgtcgagtacttctttggtgaggtggaattggtagggacggaaccacaagtcgatggtcgagctctgctactcgattctggcggcgcagaggtcgagtaatttttggaggtctagtaaactgattggtcgattaaatcttggtgaggtgtagtggtaagcggtcaagtgatattggctgaggcggctgagatattctgtcacgcggaggtcgattgagctacgagactgggaatcgaagtcgagtaacttcttttgaaagagacggcggttgatgtagatgaattggtcgagtatagcaaaggaatcgagtgaagtggtctggatcgagtgacggaggaaatgaattggtgacggcggcgcggaggtcgagtgattcctggaggtcgagtgaagtggtctggatcgagtagctctttggacggtgattcgtggtgtagagaaattggagtgtcggtggtgagatgaagagaggtaggttgagtggaatcggtgaagtcgagtgaagtttcgaaaagagtggttgaggttgagttttagattctccctcgagcttatatcaacgcgtggtccacactctgttgactgagaaaatttgcagaaaatctactgtaaactgcaggaaatccctgcaagtctctgtagcttctgttggtcgagtaaaatgatgatttaaaagttttggggttttaaacatcacacatactcgaccaatgtactcgagtgcaaggtctccaggtgcaacagaagattttcaaaattttgtactccaacggggtatacactcgatctccaggtcttctgtagagtaaaagttttgaatttttactctatctccacattgttccttcgttcctgagaaccacaaacacaaccaagataaataaaaaataacaagaaaataaaaaatttatttacagagatagtcatgggacttcctcccaagtgagcttgtttaaagtcattagcttgactcctttactcctttaatcatcaagaagttcctggagatgaaccgatgtcacctctgaaaggatttgatctgctaagtatttcttgagtctttgaccatttaccgtgaagtcttcactcttaccagctagagtgactgctccataaggacggacctcagtgatacaaaaggggccagaccatctggatttgagttttcctggaaagagtttcatgcaagagttgaacagcaggacctgatcaccaacctggaaatccttagtgatgatcttcttgtcatggaaaagcttggttctctccttgtaaattttagagctctcataagcttctagacggatctcatcgaggtcagtgagttggatcaatcgcttctcctcagcagtttttatgtcaaagttcagaagttttaccgcccacattgctttgtactcgagcacaacaggtaggtgacatgattttccatagagaagattgaaagagttgtaccaatgtgggtcttgaaggctgtcttgtaagcccataatgcatcatctagctttgcagaccagtctttccttgtaatcccaacagtcttttccagaattgtttttatctccctattggagatctcaacctgcccgcttgtctgtggatgatagggagtggcgaccttgtgctttactccatgcttcttcaagaggttctcaaaaaccttgttgatgaaatgcttcccaccatcactgattactaccctgggaactccaaatctcgggaagattatggtcttgaacaacttcagcacaacttttgcatcgttggtaggactaacaatagcttcgacccactttgatacgtagtctatggcgaccagtatatacttgttaccgtatgaaaatcggaatggacccataaaatcaatcccccatacatcaaagatctcgacttccaagattggattctgaggcatttcatttcttctactgatgttgccttttctatggcatgaatcacactttagaacgaactcgtgagcgtccttaaac

SEQ ID NO: 18768 - DNA, 1093 bp, Arabidopsis thaliana landsberg
acgctaaaatagtttatataatttcttaatatccgtgtttaccaccaattacgaacctgatgaatgtttctctctttaacaaaacagttcgctccaactatgggcttatgtgcttgaacatacaagcccgtgtactcttgaacctgctcaagagtttacataaatttttgttagttaattattatgaaggtcataataattatattatatatacatgtgtgaatatataccatcttgctggtagccatgatttgacgtgtgtctattcttgtgtaaacaccattgatcacatatgcccctcgacatttcaaagccatcaccacctacataccatttaaatggtcatgttgataatgatgatcatgatcatgatcatggtagtgatgagattatggtaacaaaaatgatgatacctcctcaagcgacgcattgccacttctttcaccaattccgttgatcgtcacttcgacctgtcttgctcccgcacgtataccctatatatatacatatattatgtaaactcattggttatatgttcatatttttgtcacattgagaatctatattagtaaatatatatatgaaaatatatctaacacacacacacacacacacacacacacacacacacaaaagagttagttccgtacggcgattgagttggcggttgcaagaccaaggtcgttgtgacaatgaacagcgacgacaacatcgtcaattccaggggtgtttgctttgagataagtcacgagttccccgtattcatgtggcatgttgatccctaccgtatcaccgatggtcaccaccgtaacaccggcttttatggcttctcctcgaatcttgcatagaaaatccttgtccgacctgaatcacactatattttaaaatcaaatatatatatatatatatgacatgatcatatatgtaaaattcgcacaaaatccataacatatctagtaacagctaaaaccgccttttctattatgatctagaaatctagtgtttgaaagatcttaacaatgttttagtgacaatctaaaaaccatcttatttgagttcttcacttttcctgaacaaattcttaacataacat

SEQ ID NO: 18769 - DNA, 200 bp, Arabidopsis thaliana landsberg
cttcccgttccgcgacggcatcgacgcggccgccgaagccggcatcagcgcagtgatccagcccggcggttcgatgcgcgaccccgagaccatcgctgctgccgacgagcacggcatggcgatggtgttcaccggcatgcgccacttccgccattgatctgcatgctcgaacgccgcgccatttgacggcaccggcacgc

SEQ ID NO: 18770 - DNA, 1308 bp, Arabidopsis thaliana landsberg
taaagacacgtaataggccattgaataaccggttttgttttccggtggataaaccggttcaatctcacggatgatgcatccctgagccaacaggatttgacggtgttcctcaggcacgtccgggagaatcgcaaccacaagaggataagcagatttcaccttacgaagtcccttggctagaccaactacacccatccagtagtctttgtttccagcaaggaaagtgacgtaagcccttttcacacggtcatggctcaccgtcacgtcagctttgatactcttctcgacggtcatcgacatttgacccatctcaaacagttaaaatgagaaaaatattagtgaagaaccctttttttgcgatgataagtgaattggtaaatatgagaaacgagcgtttattatataagggagtgagaggagaggggagaattaattagagaatatttgaaacattttaactcttgataacgttttttaagggagtaattgactacgaagatttaaatcggaaaggataaagaagaatgaatctaaaaattgtaatacatatggaactaagtataattcatcataaatatttgcgcatatggattaaatcagagaggatatagaaaaatgaatctaaaatgcttaactaatatggaaacgaggataattcataatatatatgtttgctcacggattaaatcggtgcattgaatgtttgattcatatggcatatatagccatatgtgttacctttctgaaatatccctaatcccttaaatcattcgttacgtgtactcttgtagttttgcgaccaaaaaaagtagtgtaactaaattgttctagttaggcccacttgcgttgaattaaatagcccatttatttcaacacagcaaaccaagccggagataagaaaccgaatcaatcttgctaaactatgggctgggcttcttaataggccgtagcttaaaggcgttttggctggagacactttcgttgaagaaacgatgatgctcattgaagttttcctaatttctccatcttctacttctgcaatctgaagaaaaatcaaatgaagaagttagcgagaaaatggcggagaactcgtcgtgacgaagatgatgataagttcgtccttcctacttctgaagacgtcgattctcggcctattgatacgcaaggtttattttgtttctctcatcctctggaatttttggcagattttgaaaagcaagttcgtaatagtttattgctatcactgtcgttttacagagcaggaggagtacgttcggtatcttgaggaagctcatgctcagcaaagtc

SEQ ID NO: 18771 - DNA, 1404 bp, Arabidopsis thaliana landsberg
tcctcctcctgactattgcctatgttgcaatacaggtcttggacctcgcagctcagtttcccgagctaatgacgctgagaagctgtgacttacttcggtcaagctggttttctgttgcatggtattgttgtttgtattttgcatgcacttgcttgctgcaatatgttgttcatgtctctaaaaattcatgtgatactttgcaggtacccaatttacagaatacccacaggaccgacactgaaggacctggatgcttgtttcttgacgtatcattccctacacacatcttttggaggtaaaccaaaactcttttatttatcaaaacaacaagttgtaggtttacactgttccacaacttacactatatctaatcagaatacttgagtggatccaaaatgttccaattgattagagtgacatgtggctagagtagcatcatttgactatcaatcacaatgacaacataaataggtgtgttcattagaagaaatagagactgttggtgcgaattcaaattgtttgtaggataatagtttggtagatagaactattgacaacgtttggctgttgtaggtgaaggcagtgaacaatcaatgagccttacgcatccaagggagagcgagaagatgtcattgcctgtgtttgggcttgcttcatacaagttcagaggttcattatggacacccattgggggttcggagcaccagctcgtgaaatctctgttccaagccgctgacaaatggctgcattcttgtcatgtcagccaccctgatttcctcttcttctgccgtcgttgagtagggtatgaagttgtgacgcactttgagagagtttcaaaaagaaactcaaaactgttgatatggagggttgttgtcagattcaggtttaaaaacgagttgatttttatgtttgtaagttatagataaaacgaattttgtttggtcagataatgtatgtgaaccgtgggcttacctcgtgttgttgtatacctataccatgttgtcttgcaatagaaacttttggagtaaaaatgtgaatgttcaatctagcagtagcatacttacggttattttcgaatatttttaatatttatatatatttttaattatttaatctaaaaataaataatattttgaaaatatatttatatttcggatatttttggctatccgaaatattttgatacgtagccattcggtttcgatttttcggttatagaatttgggacatgctaatgtctggttaaagagtaaccacagattgccatatctcatatgttctctccatgagaaagttcactttggctgcatgaccttcccttaggctatatatcccaaacagctataataatttcgctcgaaacctttaatcttttttaaagaactcaataactggagttcggtt

SEQ ID NO: 18772 - DNA, 477 bp, Arabidopsis thaliana landsberg
  unsure (1)..(477): unsure at all n locations
gcctcttatctacataacagctgcttccaaccacctggactaacctctttctccacagcagcgttatgctcctttacagcctcatcttcctcaccagcttctgaagagttgtgaccaacctcctctttcacaaccttagtttctgacacagcctcagcttcctcactaacttctaaagagttgtcttcccaaaacaactccttattattacatcattagcagatacttttaaaacaatcttttgctggaatttcggcaccaagttcacatatgtggaaccggattttggcaccaagacacattttttcttgggttttttccttgttttacctcagaatccagaggatatgcttgcagnttcattatctcctccataacaacctattgagaattatgtggaacccgcaaaatcggccttggatacaccaaaacccaaaactctacctaataatactttgggcacaaatcatataacct

SEQ ID NO: 18773 - DNA, 916 bp, Arabidopsis thaliana landsberg
  unsure (1)..(916): unsure at all n locations
aaaagacactcatgaagaaaataattggactatgattttgtatcgtaatgattatggtatgagatttctgactattaagtaatgaaggtaatagtgtaaaatatatacattaaacaatataaactcaaaaattatgaaatgtaagtggttaagcagaaatagggacaaatgattaacaaatttcagagcatggggaaagggaatcgcaataataataactaggatttaatccgcggtaaaccgcggacaatcggtttatttggttcttatactaaatatttgaataaatttgatatcttaaatttataaatataaattttttaatcaaacataactaaataataattgggattttttttggttgttatttagtgataagagaaatgtgttaaaatgtgtttaaaaatgtgtatgtaattttagtgaaagtaaaatatttacaaaaatgtaagattcacaaaattgagataatattttttatgattataagtggtttttttaactatgtgacaggttatacacntttttggcanaataaagaccatatgaattatgttatttataattatatgtctttaaagggaagataaaaaaaataaaattatttcacttatttttgttgaacggaattaattttattgaacggtttagattgaatcggatcatataaagtttaggagattgttaagaccaaattaccctaatgattttgaatagcaaagaacaaaatccaaaattaaaatcaaaattaatgcccaattaaacaaaattttaatttatatttcccttttaataataaagggattgaccgtcatcttgaatgtttcagtgtcagcgaaaaatatggcaaaagattagaccggtccgaaagcaattcacaagatttcattttgtttcctttatattactttaatca

SEQ ID NO: 18774 - DNA, 981 bp, Arabidopsis thaliana landsberg
  unsure (1)..(981): unsure at all n locations
aaccgataacatgagtaaactagtactgtcccaaaaaaagaaccatccccattgggttttaaaccagataacgaatttgctctctaagcaactggcattgctggataatctgtggtggttaatggagcttccggtacaaaagcagcttgagtaacaacctgagcaggtgcaatgtatacatcatcttctnnnnnnnnnnnnnnnnnnnnaacatcaggcaatggtgtcatcggtccttgtttgcccttggggtcccagtcaagcatgatcttcaccttgagaccaagcacannnnnnnnnnnnnnnnnnnnnnnnnnnnnnnnnnnnnnnnnnnnnnnnnnnnnnnnnnattcaagaaacaggtttccactgtgaagaactgacctgtctaagaagaacatgcctaactgcagcatcaatgtattccttggttggctgacctgaggaaaccatgtaaccatccttgaacttcatcgacttagcacgtgcagcacggagttttccactcacaatgacctgcatacatgataagaaccctatagaggtattctgaaagaaaggtaacagaaaacaaagaggtttgcactcacttcgcatcctttagctccactctccataacaaaccttaaaacaccatagcacgccctatacaacaaaatatcatgcaatattaacattctgagcataagagatcaaagcataaaagccatatttaggagaacagttcaaatttaaagtaacataatagaaagcctgatagactcgatgtgggtatctagacaactaaaaatcaaaccgaatgataatcacgagtggaataaaaggatttctaattacactgatctatagacgcagctaacaacaagtccaacactaatataacttcagcggcaaatcatgtttactaatancgcacacttgttacacagtttgtttaatcgaaggatagaatacagacattggaccgatacatagcttaac

SEQ ID NO: 18775 - DNA, 548 bp, Arabidopsis thaliana landsberg
  unsure (1)..(548): unsure at all n locations
ctaacctgcaatcaaaccaatctttgatctcactcttcttcttcccagctgaannnnnnnnnnnnnnnnnnnnnnnnnnnnnnnnnnctgtagtttgcttaacaagctcaacaatgaagataactttgtctggtccgttgttgatctatttgaataagtatttaactaggggagtcacacgcggcttgccggccaagcaattttgtttcacatcaaaataagaaaagattaagcataccacattttatgaaattcgaagaaactttttttaaacaaatgttcttaataacacctcctcaaaaggatatgtcatataatatttagatctaggtttactttatttgttaacaaaaccaaacatataaagcaaaatactacttataagataatacgaacattagttatagataattttaggacattagttttacattacaaaccaagaccaagaggtcgaatgatacgaacattattttgattactaattgattaagtcaacaacacatgaatttagtcacgacagcataatgcacactttcaatcttttg

SEQ ID NO: 18776 - DNA, 742 bp, Arabidopsis thaliana landsberg
ttgcattctgagaagtttcgattcccaaacacaatcagcccaagaagcgccgcgaaatgctctattgagctttgagaatctacagatctcaacaggatccaaattctcaacaattatagccacacacgcctctggtaaatctcctaaaccaggcttcaagatattccgatccccaaaacaagatgaagaagacaaatcattgtgaagatcagagtgagccacacccatctaaaccttaaaacctcttttcacgagatagaaaaatctcaagaggtttttaagaaaatgggtgatctagatagatcttcaagaaaaagttatgaaatttcgagacttttcgtctttgaggtttcttcgctcgcgaagaaatcaaaattgtttgctcaaagaacagagcaataaagaaggggtttggtggtggtgactggtgacagacaatattagacggtgacgcaaaaaggcatgtggatcgtctattaaatactatatttctacattttctgttaattttgaagtttgtaataaccatcatcataataaattcaaagctgttggaatggatgttttttttcgccgttttcctttttttttctaaccggataatcaaattcatgagttgtaacttgtaagaaccatattacgaaaacaattataatatccaaatcatttaccatttgagatatcaggtataattttctgttacacctaatccaaaatgtcaacgagaaaatctgtttatttg

SEQ ID NO: 18777 - DNA, 2627 bp, Arabidopsis thaliana landsberg
tgtgtggaaattctcaacataataaactgagcggagtatcaaacaaggtcctatcctaactgatctttccttaactgccactttttctcttccatcgaccaatacaatactgatttgttccatttccttaacactttctagaatgtctaagtgacccgtcaagtgatacgatgcacccgtatccactatccttaaaggcaaagaagacttacccgtcagtttttcagtttcgttagtcttcccattgttgagaagattcttaattgctttccactgcaaatcgataaatcccgttacttcgtcactgtccatttctgtcacaacgtagttagcttgctcatagcttgtcagtggattgacttggactgcattggcgtaggaggtgctcccacaacctcttccagctcctccgttagtaccgccatgacctcgtccttgcaaagttctgccttttggcctatcaccccaccattttggatagccaaacaccgcataacacttgtctgggctatggccaatgcgattaaaaaggttgcacataactcctttttccttgtcgtcaagtttgaaacgaggtcaggtttgaactgaaaaggatgtcacatctgtaggcttctcctcaacatttatgcgaagatcctcttcttgtcgcacaatgttgtagacttcctctaatggctgcacaggaacacgagcaacaagggttgaacggactgtccgaaactgatcatcaagtccacaaagaaattgatgcaccttatcttcttcaagatctgcttcttgtgccgtcgcaagatcacacgtacacaaaccatacttacacgcacgtattggtcggtaactcgcaagactatcccacatttgggtcagcttcccatagtacgcttcgattgctgcacctctctgtttgcaacaagctaatccagcttggatttgttgaatccgagccccattcatcaccccaaatcgtttcttcaagtgatcccatagatcctttgccacatctttgtgagagattgttgaacgcatcgatggatctatagtcatctttatccaagacacgagaagtgcttgaatcgtccaccaatcttccaagtcaagtgatccatcagccggttttgggattgagccgtcgaggaatccgaatttcttgcgtaatgacaacgccgttttcatcccgcaagcccattcgtcgtaattaactcccttctagagagggtgtgatatcaccgctccgggattgtcggcagaggtcaactcgtaaggagagatggttcttctcacctccacagtcgcagccggagcttcagtctggttcgggtttgtcattcgaagtttcagagatcacaaagaatttttgaagaaaaactttgtcgctttgataccataaagatttagaaactgtaaacagtttcttgtatttactttgatgcatattacatgtcttttataggctacaaaagagatcatagaaaatcctaaattacaatcaatgcataatcataatcgtatcaatcgtatacagattgtatcaaaaacagagcaacttccttatatggttaggtgatcgttgggatcatgacttggtccgcaaactctgttgagtcgttaatacattaggctttcatcgttggtttctcatcaatcagggtaacgtttaataaaccttctagacttattcatttactataccataacaattcgaccactcattttctttttatttccggtactctttctctcccctaaacttattctttttagagggtaaacaaagaggaactcgcatactggatcgacaccctcggcatttttccaacctttgtaattgatcatttcaaacaatgtataataatgggataataggaaacattcatacccatatacattatctgaaaatccttttaatctctcattagtatacatattttttatcaagggagagaaatactttcttagtcaagtcctacgaactctaaccgttttgatgaggtaaaaggaagagcagtgagattagcttcagcctttgtggattatgttgggaacgaatgtccttaagtttgttggttggccttctggattttccattagtcgaattgatttgaatatggagtaattaagcaatccaggcaataaactcgaaggagagatcataattttgaacaaaagttttgactcaataaaatgactcataaataagaaaaagactcaaacagaaaaatgcacttagtaactgcctccctcagacttaaacgttactgtccccagtggcattcaaatccggagtaagcgagaaaaattaaagaaaaacaaaaaataaaagaaaaagaaaaccataccagtgggttgcctcctactaagcgcttgtttatagtcaatagcttaacttggcggagttcaggacttggatggaggaacatgggacttatgctgcaatctcgccttccaatgcggtgtgtaaacagatcggctatgtgcagcatctggtgtcgatcgacactggtggtggtgtcgatcgatactcccattgttacctgcaaaatcagcagaggaaacaagctctcgagaaacccgatgctcgtttaccagtgaagcacacttcaaagattctaaagaagtagccgaag

SEQ ID NO: 18778 - DNA, 1099 bp, Arabidopsis thaliana landsberg
cgcctttgcgccttttggtggttttaccgctacaagaaacggtaaactagtaagctccattcctaaacagagttcttggaattgatccttctctagagttatttgacttcccaatgcacaatatattaccgagccgggtttgaactgattcagccagtgattccatcgatcttcgagtggtctactattgtctggctctggaagcattggacctgtcaaaagaaccttcctctggtattgacgctctatatagtcgcagaatttaccttcgacttctttacaagtcctaatagagataaaatcacaattctttagacctgttgttatccggtgatgaagcctctcgtagaacatggaataagtcaacaaagcgtgagcatcgcgtccacgggacaacacttttgacgaaggatagccaggtggaggaactcctaattcaccacctggtacaagttcatgagctatggagttagctgatatcacgaagtacatcacactcttgactctatgttctttcgccatttccggaacccaataagcagtatcgaaaaagatcaggtctggtcgcaaagcacgaaccgcggcttcgacctgatcgcgagtgagatccatggctgcggtaagaaacttccccaacgagatggggatgtccgaggcggtctccgcgccagcaggtaggccatcaacatgaggaatagtaagaggatgaaagatgatcctgtctggaaacagattgtgatgttccaactgtttttgagctttcttaggcagcaagaaagtaaccctatgacctttagcagctagcttgttggctagatgcaagtatggagtcatatgaccaaaagcaaaccatgggaacataaaagcgtgaaacgtttggcccatttttatctcctaaattctcgaaacaagttgaacacaaaaaaagcaaaggtgtcaaagagagcttaaagaagaaatttttgctgtgtttcaattttcaaatcatgagcatttttgcttttcttgattaaaaacttttgcgattgataaagcccctatatttagcttttgagaatgtgctcgtggaagtctttgaagggtgttttaggtttattta

SEQ ID NO: 18779 - DNA, 587 bp, Arabidopsis thaliana landsberg
  unsure (1)..(587): unsure at all n locations
agtgctcaaacaataacataaaagagggtaatagttgattacatcatgatgtccgagacatccacatagtcattaacatatatcaaagtgtagaaatgaaacatagctaaacacggccttcacaggcagccgactagggatttgccgctaacccatgcctagaactcatcgtactcttggaactcctagaaatcctctgttggggcgaagcaaagacgctacccttcgcnnnnnnnnnnnnnnnnnnnnnnnnnnccaacagaggcaaagcgactggcagcttacacccttcgtccaacatactgcaagacgaaggcctacaacgaagtcgtcccgtcccgcgaggtcgtcgaccacgaaggcccatgtggaactcggcccattgtaacaggccctgcgtggctgtgtgtattacgggcccgatttgtacaggcttttctgtaatgacagtctataaccctgctttatgggaatattccggggatgacctaggtgtctgagggcacatgcgtccttaatccagaacgttggtactcaggtgcctataaataccccgcacagtgcctagagaggctaggttacagagc

SEQ ID NO: 18780 - DNA, 637 bp, Arabidopsis thaliana landsberg
ttgacatatagtccccttctggaatagttgttcttaatgcctattgctttctgatcaattgaaatttgagcacagacatttccgcaccctagaggtgttcgataaaatgtctgaaccactacttccagagattcgtggctctgtaccaaggtattggttatagggagcgttttggctttaacttgttgattcgtaatgcctgttaggttagctctcgtaaatggtgattgattctgggaatactttaacttgaggatctctgttgcggtggcacttagatttggttatcaaacttgttgtctagggatattttattgagcatgtcaatcacctgtagactgaggaaactaactattctattaccccatcctcgggaatttctcatctaattgatttctctgttaactctgccattgttaactcctcgctaacttttgccatttcaaaaatgttataatcatatactcgaacccccccaaatggcggggaacaaacctggccatccgagtatttttggtaatggctgggctatttacttgacttggtactccaccacacctaatgcttggcaacatgctgggttgggccagtggtttaactggttctgcttgaactggttcctgcatgttcatttaag

SEQ ID NO: 18781 - DNA, 1160 bp, Arabidopsis thaliana landsberg
cgtataaaaaccctttttcgtcttctcttctatctcgacctcccaaatcatgaaaggatcaattcatgactccgctattacgggtttagaggctcagcttatggcatcgaagcgaggactaatcgaagccgtgagtttggggatcactcataagtcatatctcaatctattgcgatcattatcacatttttgaactggtaagtaagtgttactgctgcaaatcgaaactgactattgaaagctatgcccatctttcgacacataaactaagagccaagtgggaacaaaggatcgaagagacaactgaaagagattgggtaatgtgtgcaaagtgccaaaaattggcttcagcaagtcatggtataatctctaatcacaatctctagattttcttaattagtccttatgtaatttgattatgttttaattcgcctcctaattaatttcatggttgatggatagtcgtgggtattccttttgctacgcatgtcgagccgaatggaagctgctaggattaaatttacagaagctgaatcaatttttaagtgggccaaatatttacagtttttataagcccaaatctccatgtccatattgtttttaacgtggcgctacctaaaaggggataaagatttcataattatgcattaacaatttaacatcaacaagattttaaagggataaggattaaggaatcgtaagcaaatttatccttagagattagatttagacgaatttggaaaagtaaaaagttggtaattaaatagaaatgtacttaaaacacaacatgttatacattagacatatgagctgttgaaaaatcgtggtttttctaatgatggcgctacctaaaagggacaaggatttcataatgatgcattaccaatttaacatccacaagatttataagggataaggaataatcaaagaaaaaaacatgtcttacatatgagctgttgaaaaatcgtggattcatttaacattggtttcttcaacattcaaagcacatttattctccatagattacacttaaacaaaagcattagtctcatggctataaatagctgattcctcatcatcgattacaaaaaaccttttcgaactcaaataatgtatgcaaattgagattaaaaaaaaaaaatgcttgacttcaccccaat

SEQ ID NO: 18782 - DNA, 1222 bp, Arabidopsis thaliana landsberg
gactgagacagtatccatatctccacttcagatttcgacacgtggcaacaaaaaaaaccagacactccgattcccacgaaacaaaccaatcaaaatcgttgccttatcccaatcttatctcagcccttttgattattactctttagtctttactttgctcacagctttggatcaccaaaaaaaaaaactcaagagagactttgtggccatggcagcctctctccaatccaccgctacattcctccagtcggcgaagatcgccaccgctccttctcgcggaagttctcacctccgatcgactcaagccgtcggcaaatcttttgggctcgaaacttcctcggctcgcctcacttgctccttccagtctgactttaaggacttcaccggtaaatgctccgacgctgtcaaaatcgccggattcgctcttgccacctctgctctcgtcgtctcggtaactttctttaatctccgactctcctttaaaactatagattaatcaagaaacaaaggagaattgagtaacagagaagaagagtattttgttgtgtttgtgataacatgtttatgatttgcattactatgcatcgaagttggcacttgagaacacctaaaccaataacagactcggatagtataatagaaggagaaaccgctattccaattctgtaatcttcgattcatgtagatacaatcttcttggatcagtgagtttgatttaaagttgcttgtttctcgtgtaatgaaagggagcaagtgcggagggagctccaaagagattgacctatgatgagattcagagcaagacatacatggaagtgaaaggaactggaacggctaaccagtgccctactattgacggtggctctgagacattctcgttcaaacctggaaagtatgcaggaaagaagttctgcttcgagcctacttccttcaccgtcaaggcagacagtgtaagcaagaacgctcctccagagttccagaacacaaagctcatgacccgtcttacctacacccttgacgagatcgaaggacccttcgaggttcgatttcgcgtctttgcttagactgcaagaaaaaactctgcttagggttagggtttgtgattgatcgtctctttaatgagcaggttgcttcacccggaaccgtcaatttcaaggaagaagatgaaatcgaaaatgctgcagtcacagtccaacttccaggaggtgaacgtgtgcgattc

SEQ ID NO: 18783 - DNA, 952 bp, Arabidopsis thaliana landsberg
agtgtccaataaagcaaggaccgcaaaccataaatttaaacttgttaaaaatgtataccttcatatgatcatcatcaatgttgactttgggttgaggctcaaacactgaatgagatgtcgcagtcgtctccaaggtaccctgaatgatgaattacacacgaagatggtgagaaaaaagttaagaaaaattgcctacaaatataaagtatctacaaaatcatgtccaatataactaggcacatgtgaccattatcaattttagttctaaggttgaccttctttttagagcttattaaactatgtagcactttttgtataaaggtttgttcggtggtgtgatgtaacaaggactgagattcagcaatcttctccaatgtattctacaattcaaagtcaaaatgaaaagtggcataataagtaattttggaaaaacattgcaaagacatttcataaatcattaggtctagtatagagaagccataaacataattaaaggccataaagttgatgcgttggtctgtataaaagtaccttgatatttaactcattctatggcccattgtcaagtggatctttacggtgtgtgtcaaatatcggttggtaatctgttgtatctgtcttacctagggtcctccgattgaattggtgtaaacacgacgtccatgggttaaggagaaagaacatggagtaatgtcaaaggcctcctataacacccctgaaccgtcctaaaactaaggacaaatccggaagcgtcacgttagacccccgtagctagtccaccaggtgcccggaacacgaccgttcacatagtcgaccaaccatgagaatcttttccttgtgttcgtggcctaaggcttttcaacccattccgagaacacgagttgtctaagctttggactagacaaataatttcaataaatcaacatctatttcattaaagctttgcgtcttt

SEQ ID NO: 18784 - DNA, 1936 bp, Arabidopsis thaliana landsberg
gacgcttgcttaaggtcgttagcttgacggcagtgagctcttatgccttatttggatccgttagaggaactgctatgcccttttcaggagtggaaagagcaaggtacggtttcagcctttgtccattggtagaaaacggctttccattgttatcccagagtattgctaaaccgttaggtcgcatttcctttatgacgaaagggcctgaccattttgaacgaagttttccaggaaatatcttgaggtttgagttgaataagagtatcttatcaccttctgcgaacttccttaaaatgatctttttgtcatgaagggctttggtcctctccttgtaaattctagaactctcataggcattcaaacgaatctcatccaactcattgagctgaagtaaacggcgttccccagcgggtttaatgtcgtagttcatcaactttgtagcccataaggctttgtactctagctctaccggtagatgacaagatttgccatagatgaggttgaatggcgttgttccaattggagtcttgtagcctgtcctatatgttcaaagagcattatctagctttacagccccatcctttctagactttcccactgtcttctccaatatccccttaatctccatgttggaaagttcgacttggccgcatgtttgggggtgatagggtgtcgctaccttatgtttgacacaatgttttgccaacaagttcgcaaaaactttatcgatgaagcgtcttcctccatcactgatcaccattcttggaactccaaaccttgggaagatgatctttttaaacattttgagtaacactgcaccatcattcttgggtcatgctatagcctcaacccacttagagatataatctacagtaaccagtatgtatttatttccttatgaagatgggaatggtctcatgaagtcaattccccacacatcaaacacttctacttccagaataaagttcttaggcatctcattccttttgcttatactctccttacgatggcaagcgtcacacttcgcaacaaatccatgagcatccttaaacagagtaaaccaccagaaaccagcttggaggatctttgtagcagtcttgaatgaggcaaagtgtcctgcgtaatctgaagcatggcaactgtaaaggataccttcgacttcactctctggaatacatctcctgaaaaggttatcaacacacttcttatataaagaaggctcatcctagaatttcttcttgaagtaaccggtaaaatcgggtggtgggacttcacaagaaaggtagttcgcaaaatcagcataccaagggaaattactttccccagtgtgtaatgtcataagctcaagagtgctcactcgtaacctctccacctcatccatgtagcaatcttcaatcgaagcaaggttttcattctcaatacctttcttatctttaatctccaagtcaaactcctgcagcagaattatccatctcaatagtctcggcgtggcatctttcttagacaacaggtatctcattgcggcatgaccagtgtgaacaatgaccttagacccaaccgaatagaatctaatttctctaaagcagacactatagcaagaagctccttctctgttgttgcataattcacctgtgctccgtcaagagtgcgactagcgtaataaatagcatgcaactttttatcattcctctgtctcaaaacaacatccacaacataatcactagcatcacacattacctcaaaaggtagttcccattctggcggttgcacaatgggagcactcacaagagattccttaactatattgaatgcctacaaattgctgtcattaaactcgaacttttgttccttgcacaccaactgagtaagaggtttagcgatcttggtaaaatctttaataaatctcctgtagaaccctgcatgacccaaaaacctc

SEQ ID NO: 18785 - DNA, 1697 bp, Arabidopsis thaliana landsberg
acattaataaaagtacagaaatacaaccttgtatgttcgtcattgttgatcagaggaagacaacttgacatgaggtagagtgtctaggaatggtaagcagatctctgaggacgacagattcctttctggaacaaccatccaaacatagagtgactttcttgaggactggtgagttctcaatgaagtaactcactaatttcatctccaacttgtcccatgaagattttatcttaacatactcgagagatgataggagacgccgaggtcgagataagatactagttctcttctttgtataataatcagattcctgatattacaaccaagtgaacgaaacaagttggagtaattatgatactttccccatttgcattgttataccaaagaaagtacttatagtttaagtaaacctaccacgacaagagtttttagattcgggcagctctcaagaaagattggcaacatttcccacatgtagccgtaaaactcaacacacaagacagataggttacggaataagggtagtcgttcacatcttgagaaatcatagataacctgtaaggaaaataaaaagttatcaggaaagaatagagctaacacattcaatcaaatagcaaattccacattgtagtgtacctcaagagtactcgaataaatgatcatatctttaataatagagatcccgacgagaaaattacgtatcatagttctctttggtagatcatctggattaaacttattctcggaactcaagttaaacacaacatcgatatccgctttgacaagcttaccgggtttattaagtataaaacttgcaactcgatgatcacttagcctcaaatactcaagcttgggagcatcaattgaaacaacaagatcttcaaccacaccctcatcactatccgcaacatgagtgaacctcaacagagactcagaccgcacacgtaaaacttcaatctcatcacaaaaagacctctcaatagtcaagctttcaagaaccgggcatttcgtaataagcgtttctaaccccatatcgtcagcaaacttagttataatcagatccataactttgagtgaaggtaaagaaacaaactcgggactagccaaagttaatccacaaagctttaaagataccaaactctcacaagtgtaaatgcttgaaggtaactgaacctcccaacccccatacgaatcatccaaaacatcgatatgttgaactttacgcgtgacgatagtgttgatccaacgtccgataagaaaaaagtcagggtcatactcgtcatcacaatcatacttcaagataaatttttgtaagaatgattcactgttgaaatcgagaaagctatcaacaaaactcaagaatgtgttgaactattggaaatcagtattgtctaggtctaaaccaggtacgtgtttccagagatttctccatctaggggataaaacactagtcttaacaacatcttttgtgggaagattcaagagtacctcacatagcaaacaatctggtaatttgcttatccaatcaacttcatcagatcctttcgcacgaacacgtttctctctatcttcatccatgaaaagaaaaaaaatatcgaatcgataagaaaccctcaaaaacttagagagtatcgaatcgacagttgtacaagaaaaaaacgagtctacagttaatacgacaccgttttatagtataa

SEQ ID NO: 18786 - DNA, 769 bp, Arabidopsis thaliana landsberg
  unsure (1)..(769): unsure at all n locations
acaatcgaaaagagagtttttcactacgaagaatgtttaccggccattttaaaatatttttgattttctataatttttatgttaaattttagaataatataataataataaaaattggagaccataaactaaaatattaataaaattaatttttattcaaaattataaaattaatatcatattataaaaaattaatagttaattgagatggtaagggtaaaattagaattttatttttgttgtgagatcgtgaagatgaaaataacaacgattaattgtttgtgtattaaattgcacggttttattacttcgtgtatttaccttccatccaaaaacaattgggtattaaacgtccaaataaaaattagttgaagtttgttttgggttttttccctataataaagcatttatttcatataatatatagtaaagcatttattttatataaaattaatttaaagaaaattatgcgttaaatatttatattaaagaaaataatatatcaaatcaaagcctttgagatgatgagttcaattatatctttaaaacttttgaatacaaatatatgttatagtgaaaacgtttataacatattgcaaatcgcacaaataaaattatattgggtattattttaaatttttataaattttatttttgcattnttttggaatggtgcacaaataaaattgtaaaaaaataagcgaatttttgagaagatttttttcggaaaaattcctaaaaaaaacaaaagtaaaacttaggttttttc

SEQ ID NO: 18787 - DNA, 784 bp, Arabidopsis thaliana landsberg
atactgaccactaatttttttttacctgttgtcataatggcagattttatcatggaaggctaccatttaggatgaaacgtcttgacgtaggcggctacgcctgcaacgtgtggacaagacattgaagttccggattcaacagagtatttcacataagcggtgtcataaaacggtgatgctttaagtgaatttgcagccaaaatttccaatcctggtgctgttatatccggctgcattttcattcaccactttctcagatagaagaaaaaagagattaatctaagcaataagcataacaagtacatatcatatataccttgagaatatcagcaacaatgatgtttggaccgcgagaagagaaggatagaattttaggagctgtctgataaaagattgactcactttttaaaacagccgcttctggggacctaaaggttcaagctcaagaaaaatgaggataaagagaaacatatacacaacaaagcgtataattcaacagagagaagatgactgtttacttttcggacttaaagtaagagaggacagactcaaagtcatcgttttgtaagccagatacaggtaagccgttgatttgggcccagtctgaaccatctttaaaaatggctgcaacggctctctttgtataggctacgtagggaagaaatctattgcacaccaaaatctttcccttcaccagggatgcgtcaagacactcaggcgtgcaatccctgaaaaaaagtaaagaaaaaacctcatcatcaccaatcagaaatctaaaagtatt

SEQ ID NO: 18788 - DNA, 579 bp, Arabidopsis thaliana landsberg
  unsure (1)..(579): unsure at all n locations
caaacaacctggacaacgacaatagaaagaattggcactttcaggttaaacattttcctcagattgttggcaattgctggaccctatgatacaggtaaacaaaaaaatgttatgctgcagataagataaaccagtacacttcaaacataaaagacatttattgtacctgtccgagttcctcggatttaagttctgcataggctccaggaatgtcgatgaattttacgattggaaaaccgtgatggtctgcataatacatcatccgaagtgctttcctctatctgtggtagacattatagaaatttgataagagtgttgctgattctgaatgtttctatttaactgcaaaccaggaagctcctcatgaaaacatacccgtgaggagtaggcataccaaagttccgcattatattttctttgggtgtttctaccttttctggtgacctatgaacatgtaacgttcatcaatggttccaatacccgtcacaattgcagggtcatcataccccgctcggtctccatgaagctccataaactgaaacaagagcagagagtcccaagaaatgtaaanaaaaacaa

SEQ ID NO: 18789 - DNA, 605 bp, Arabidopsis thaliana landsberg
tagtagtaattattaaatgcaattaaggaagttaaatcaagcaaacaatattaaaaatgttattagcataaacaaatcaacagaacaaataaatcaatataaaaacaatctcatcatagcaaaactttgaattagttttctaaaaatctttttttttctttttaatggtcatattttataacataaatgtgtaattataaatttatggaaaatgatattgcaaactatttggctaatcatttgagttgatgtgggacgataaacacacattttttatcaattgggtaatatatgtccgttttaaaaatttcgagtcataatatatacgaagaaaaaaagttgagatatttctatactttatgtattatatgatgattcaacaatgttaaaaaacaaaaaaaaaaatcataggagaatcataattttaaatcttaaccaaatcttctaaatatctatattgttaaatatgaaatatcatatgtaagggattgaagtaaatttgttaccgggtcagtaccaaatttggcgaatcacaatttaatccaccccgattattaatgtaccttcaaaaaatattaataggaggattattcttcaaaaaagga

SEQ ID NO: 18790 - DNA, 1275 bp, Arabidopsis thaliana landsberg
taatctctcctgaactctttcctgtttcaaaaaccctatgattacaaagaatccagcccattgaacacagaaagcgtcttcttgttgcacccttcttaattttatgagtccaccatctcgtcttgaatctcattaggagcaataagcccaggaattgaaagcattctttgacgttctctctctctctgtgcagctgcttcctcagcatagagatctttgttatcctgaaaaataagtattcaacaaattggcttcggctatttggttttgagttcttaaaaccaatttgaatggcttttgcgaaagacaggttaagtacctgagcggaaaactccttagactgtacaaggaagtcacgaatgttattcttaaatccagacgggtcatttctagactcgtatagtccattcacaaattgtgtgacctgtattatttgttgatatcaatatatcaggatacgaagtaaaaaaccaacatgaaaactgtgaaagtgaaacttctggttttagtttttattacctctgctgcagtcatgttggggaatgaagagctcagtagcttaatggtgtattcgcgaacaaatgcaacgttgtccggatacgggtaaggaacggttgtagcatcccacaagggttctgtcaaagcaccgctctcaggctgaaatatataattatcaaacggctaagtgcatagaactacccattcccaagtaaatgattacttaagctatcaaataagaaacaacaagagaagagatggttttaccaggcaaaacagttgctgcagcaccaacacatgtagcttgaagccaggcttatggaaggtatcggtcaaaacggcaaatatttcttgctcgatttgcataaagtatgaccggtagaattgattacaaaattcagattgctgtcacaatcagagtaaagtgttagagcaagcgtaatatatgccacaaccactgagctaaaagaaggaaaataaacaccaaacctgaaagtttttcagcatctcaagcaaaagattaagcccggtttcagcaatatttctctcagtatgtctaaatgcccagataattgaatccatcactagcttcagttgctgttgcaaaatgacgatacagtaagaaacagaagcaaataatgagagaaggcttagaaagaaggtcaaacgacttttcaatcacgtaaaagaatatatatgcaaaaccgtatcactacccgacttgatactttatcagggcaggaaacaaacgtagcatagcacgagtaatgagaaaac

SEQ ID NO: 18791 - DNA, 678 bp, Arabidopsis thaliana landsberg
  unsure (1)..(678): unsure at all n locations
tgtcttgaaacttattccaagcactcatcgaaccaatgttcttatgcgcaacagtcagactcttactcactcttggtggtggtttgtgttcttcaaaatggaacctactagcattgtagttctcccaatccatctcctctggttcttcattctcagctcattcttcactctcaaccctttcttcaatgtctgaagcctctctcgtcgggggtgctctttccatgaagaagagttcttcattaggcgggttgaaattgatgttacctctcactgtgatggttgttagctcttggttgggtaagagaagcttggcatccatttccgtcctatgctgaaacttgagaatatgcatcccctcatgactctgatgctcaacaaacaaagcccatctcaggtgaggaatgtcgatccatttaggggcaaagggagtcgactaaagtggcactccacaagccattagtataggtgttatcactcctcctatagaaatggttctcttctgcttattcgctaaaccacaaagatgattcaataaacgcattgatggtgaagcatcattggtgtcaccccttataggtactttgttcttggtatagagtaggatatctnttatgacaatatcaagcagctctatctcgccattgttaatcgggccggtcttctctcttgcgtagagga

SEQ ID NO: 18792 - DNA, 772 bp, Arabidopsis thaliana landsberg
cagataaaaggaattgactatgatgaagggagtgcatggggcatatttatacaaaaatttgttgtaaatttgttatgactaagcaaaaaaagtttctttatggacacatgtgaatggacttgttattatgtacaccgaaaatgtattttttgatttttgtttaaattttgatagatctttactttcaagacaatagattgaggctacgagaataaatcatatgcatcagatctcgtcgtcttcacaacacacaatttcgctaatgtgaatcatattttcacaaaataagaaaaaaaaacaaaattatgtttgttaaataaaggtaacaagcctacacaaaatcaaaatctagagaggcttctccgtaaagtaaatacataaggtacactatcttcacaaactccatcgttgctctcagcacacacactcatcacttacaaatcttcaactcgccatttaaattttggatttattttagagagaatgatagaaaagacatggttctttgtagagaagaagagagatgttcttatcagatctagataaccagagaataatttctttttatttcatcttagccatagatatgaaaatatatatttttaatccaacggtctatattaaaaagaacataatcagccacaataaaaaaggaaggttagttaatttacgtcaaaatcgcaggggtaattttgtccattttctcaccaaaaataaattaaagtgcctaaactcttggagtgcctaaaacgtcaaacattttcaaaagtgc
